United States Patent Application Publication US 2021/0254056 A1 - sequence listing, part 22

SEQ ID NO: 44569 - DNA, 2809 bp, Homo sapiens
ataatcatttgtcaattaaatacattgcaaatatctgcttctagttttccttgtcttttaaattccatatatcaaatgaagtattcaagtttgatacagtcatattaaccaatattttccttaactcttgattttaaaaaaatcacctacagtatttcaatgtcatactctcttacagtgttttctaaactatttaaagttttattttttacacttagatattctattcatctggaatgtattttgtgaatggtgtcaaagagggatctactttttaaaaataataaccaattgtctcaagagcatttattaagtaatatctttccccatttacttgtcatatactaaaattactattcacatgtgggtaagctctctcttctgttccatttgattatccctgcaccaacaccatactcttttaattgttgtatgatatttctcctttaatctgctaatgatgagattatattgatagatattcaaatattaaagtctttgaaatgcttagataaaccctttattttagtccactcttggattcaaattattatacttaattcagtttttgcatgtatattctaagtaaagcaggtttataatgattctttctcatatgtttttggtattttggtatctaaattatgataacataaaaaatgaagtggagagaaatggtacagtttttttaagatggagttctttgtgtgtaaagatttgtttaacttttgctcgtaaaactttattgattttagaggtgtagggtgaattttgactctaatttcttcaataatttttggtctagccatgttttctatttttattgagtcacttttgagagttctttttatgtttcatcttgtataaaatttaaattttatgatcatgtgtagacctttttatacttaacacaatggaaatgttcatatttattttttccccaaaggaaaaatttctgaatcatcactatgttgcacagtagaataggaattcaggtacttagtcaagttaagaatgcaaataacagacaagattaacttctaaagtctgaagtcatcaacatgattttgtagtactctgtctcaggctttacctaaaaattcattattattcagataaagataccccctaattacatgtttttgaaaagcctctgccccaccacaatttcctgagatctgtgaagaaactgcagtcttgtgatcagagtccatatagtactggcagttttgtaatcaaaggaaaaaacgtcgactgattttatatgtcaatcagttgtagtctgctgatctgattagaaaccttgacaaatgcctggtggcgattgcaaataactgccaatcatatagggatgatacagtagctcagtgttttgggatcagctcttgtacacaagtaaaagaacagaaacatctgtaagtaaggtattagaaaaataattgtccacaaccaaaaaggcaagaagagtaatcgagatttccaggagtgtgtccatgtggttccttcaaggggctcctcaggttgctgttgaatgtgttccaaggccagcctgttgtaagtctcattgatttcaaacatagtaaaatgctgctgcacttgctaacagatacaatcccactccaatctatctcatccgctgacggaagttcatcattctgcatgctctgtgccatggtcccgaaaaccttcctgttcccatggccagcattaaagagtcactcaactctgaataatctggtggctttggcatttcagagaaagccaccataaagtaaatcccctgggtcaccaggctgggagaaaggtctggagcaccagctactagtgattaagaaccttgtgactgtggcaggtcacaccccactcctgagagttctttttagaaaatagtttataatctaagtattcaaatatgttagcataagatgagtcatattattttctgatacctgaggttatgtctcattgtttttgtgccttccttcttcttatgatcaataatgccaaagattgttagtatcttttcaaagaattagctctttaaacacttatatttcatttatgtgatcaataaattttattaactgctatataccagactgttctaactaattgggtttctttttaaaaagtaaagagtaaactaatcctagatccctgcgcttgcggattttatgaggcagagataagttgttcaaaaaagaaaaaataattaattacgtgatatattaacaagataataaatgctatgaaaaaataaagcagagtgaggagaatcagaagtgccacatgttgggagcagcatgcgggctgcaattttaaagaaggtgggcagaaatattattgagaagatgagatttgagcaaagatttaagggaggcaggaaagttagccatgtgagcatcccggaagtaatattcctggtggagggaacagccagtgcaaaggccctaaggcgggagcaagctgggcatgtctggggattgcaaagaggccagtgtggctccaatagagtgaatgagagggagaagagagaagtcagaatagataaggatagtgagtctgagtttaagaaggctgtgggaggaatgacataatctgatttatagttttaaatataaacggaagcagagtagaaaagttatgatgctattgtgatgtaaaggcaaaaaatgataggcgtttggattaaggtggtaacaactgacatgtaatggtgaatttagagtcgtctatctctgctaccttcatttgtctttatttcaccaatattggcttatatcattagtattgtcttcctactttctat

SEQ ID NO: 44570 - DNA, 1100 bp, Homo sapiens
taaaccaagaccactgaactgaaccaattgataattatccatgttaacaaaatatatcttaaaaagtgatatggtttaaagatttaagaataatttctaggtaaactagtaaacctttctcctttaccctagagtttatgtgacacagcactggtttattctcataaagcttgtgtttgtttatggatttgtcactggtttatccccataaattcacatgtttgtttatggatttgtcaggccaagtctctgtttaaatgcattgtctgatgatccaggatgtctacttcattcttttgaaatagttaagtctaggctcagtggaccttacagttaggataacagcagattatttcagcattttaaaaaaagtcttaaaactttccatatggtgatctacttggaacaagttagcccatttggaataaatgattaaatacttaactaaatacacgaattttacactaaatggccatacctggacacttgttgccctttatattaattcaaaatcaagacaaatattatcactcaatgtaattctggatagcttgtgtttaggcaaacactgggatttaagggatgactataaccaaatgaaatgaattttcataagaaaaatggcaatctcagacaaatataaagctcacataaccagtgtatcttgattatttttgaagggggagtgctttagatgaaagaaacaaactggttgtaagcaagaatgacaatacagtgctacgggttccacagggccaactttagggcttgagcatccttagattttggtatctgcaggaggccctggaatcaatgcaccacaaatactgagggacaactgtatgtgaggtttggaaacacctcataaaaatttacagacttatcagttatctaatgcaactgttcctctgacatgagtcatgtgcgggcctgccagggagaattccagatgtcctcctccagatcctgctggtaaggaattagaaaaataattaactataccaatctgggtacttgtgctgacactaagggtctacattttttggaaataaagcattaggactcttttccagttggataaggtattccttgggtggtat

SEQ ID NO: 44571 - DNA, 1969 bp, Homo sapiens
gtgtgtctgtgctgcccaggtattactagtgagtattatacttaggaatgagcatgtttagtgtgatgttcactaaacacttgatttattcaatagtcccctaacccctgggaatgcatatgcaaagaataaaatgtttcagacatttgcttaacaagggattttagattatttgcagaatatggtccctgaaaacattttaggttatttttccatggagtctgacttacgctgagaagcctcattatagcactgaccaggagtttaaacagtcaggtgctgggcaggcctcagaagtccttgcacttggtttcttcacccatcatgctggagggagggtggcatgacctctactatcccttctagtgctcagattcaatgaaggaacttattttttaaagaaggaagtgctgttatctttctaatgggcagctcagaatggcagggatattaatagtggcctgcattccaatagtcaacactgagatcttccagcagtcaccccatccagaatgcaggctttgaaaggctagaaaccctccctcttccataaaatcgttaggtaattgacctttttttttttttggcatcttttgccctctttttggaagctttgtgggagtgggacagtagtatggaagataagaaaccctaagtttaaatccctagaaaagcccctgaaccaatagtcaatttactgctgctaacaccactggccagactggtttgtcagtcactggtggtgtgatggtgtcatgttgggcttccttattacgtgcctctttttgaatgacccatcattaccttgacttttcaaattggaccaagtttcaacactgattttgcagaaacacacatgagtcatgaggaaaagtagcaaagggaaagttttcctccttcccctcatgcggacgtgctgtggacacaggcagacaatcataattgcatgactgagtcaccttacacacctgctgatcggtaaagaactcaagagagaaagagctgatttcacctgcctcttccacaaagtctcctgactaccccaactgaggcactgttttctttcactgaactcatactgcacagcacttttctctgacacataaataaatgtgatgaatgttcacactttcctctctactatttggtatcttctcttttttaatgcaaattaaatcttgtatactgtatacataggaggatttgggcttagcaatagacgacagtgatcatggttatcttttattgagtacctacggcatgccagcctctgatccaagacctttacatgtattcactcatttggttctcactgcactcttgtaaggtagatgccattgttttccctattttattttttggaaaactgagctgtggagaagctacatactgagtatgtggagaagctacatagttgcaaagtcaataagaggtgtacctgggatccttccaaatatctggcctcagagccttcattattaccagtattttttttgcaagcagaattattctaacccatcagtaaaaggcttctcctcactctgtccttccccctacattataccctcaacagcaagatcattttcttttgagaagcttctttacaaaaatcataaaggagctctcttgacatctgtctatctagctcattagacgtgtctagtttagggcagttcaaattgggacttttaaaatgttgcctctacatatgtatgatctaattcttaccacttcaaagcttcagggaaagtgaaatgtgtcatttccccctcaatattgggaattccccataaagtggataaaattttagcctgtatttccttttagttttactttcctcttctgaaattaattcatgacctctatctcaagttttctccagatttttggcccatatttctttttaacatttatcaaatatcccttgcatattggccttttacatttcttaagtttccagttttaactg

SEQ ID NO: 44572 - DNA, 809 bp, Homo sapiens
tctatatggttattattctaaaactcagatagcaaagaaaactcaaaatagacaagtggaaagggtaataaagtcccttggccctgagaaaatctattctgaaaacgtctgaaacaaactgcattagaacatgtgtagaataagtttagttgatcattatgaatcagtcacttcatctttgctcttaaacttaccaataaattttggtgtcttctcagtcagaaaaaagatgtgagtacaggtttttccaacacacacacacgtgcgcatgcacacacacacacacgcacacacgcacgatgttatataatttctgttcttaagtgcctggttggaatatgctaatttcgggagcacactactgcctgccattttctggtggaacagtcttttaaggagatttctacaaatccattgttgctttgtggtacttactgaacagtccagcaggtggtagtctaggagaggaacagttctcatcctcccccagccatccctgggcctaccagcagccccatttgcaaaacagaatgtggactcagcaatgtgccttctcccctctggcataagaatgggatttccaaggttgttctctcaaaatgggcactagaataccacagaaagaagccaaaaataactgtgtatacatgtgactgtgcagtattctgaagctcaaaaattcttttttttttatttctagaaattccactgattttatatctctttgctctgatttccgtgacatggctttggggaggactacacatggcctacagacacttctggatgttggttctctttgtcatttt

SEQ ID NO: 44573 - DNA, 1337 bp, Homo sapiens
tctgagggtacaatggagaaccaaacaggaatggtcccaaacagaatgcataaaatcacagaggttgcattttactgtgggaggaagatttgaataaaataatcacacaaatattgttataaactgtgataagttctacaagagaacagtatggggtgttgtgaatgcgtaatcagaagaatgccgtctaattgggggaattcctgaggaagtgaaatcagatggctgatgaggtggcaccaggcccaggagggactctccattcaagaatagtgttccagccaaagggagcagcatgtaagggggagagggcagcacctgcaagataaatattcatggaatgactgagttaatgaatgtgcaaaggcactgaggtggagactggaaatcagatgagtggagctagatatggacagtgaaggaggggtaatgatgaccttgaaaaagtgggcagaattcaggtcatgcagaggcctgtaagacaagctaagatttaggtctttatcttgaaagtagtggtaatcattaaagtgttataggtagtgaagttgcatcttctattatggagaattattataggagaggaggggaagagactagggagtgagctgatagtgagatttttgtccaagtgaaggtgtgatatcatggtgttttctttttcttaacttttattttaggtttaggggtacgtgtgcaggtttgttatataggtagcaaagacttaaatgattattgtgttttcaactaacatattagcaatgtacttgaagagaagttggaggttcaagagataattctgaggtgatattgactagacttggtgatagattggacttggggccaggggaggagagagaaggggtcaccctaggtggcctgggccatcctggtgactcagtatctatagatgattcatctggcactctcctgctccagtaatgccacctctagtactcacatctctggtcccaccctggactttgccactgtcctaagctactcactgctgaaatagaagggaactacaaatatccttgtgcttccagccacctcacatccaggtttctgagcttgctaaggagaaccatgtacttgaagaagttactgaccctctctgaaggctcctaggatgaaggatggtaattcctaccttattagactgttggaagatgtggacgacaatgttacaaagactctgatatagtgtgtggcacatacataaacgcaatgagatagaaatcacctttcctctttcatgtgctggttcttatatcttaaacttttgcgaatcccactaactttgatttgctactgccataagtatgtttttaatt

SEQ ID NO: 44574 - DNA, 641 bp, Homo sapiens
tcttattagccaaattacaaaattctgttctctattctgaaggtattagggaaccactgaaacattaacacctcccccattgccccctaccattttctgaaatgactcaataaagaataaaccttattggtgaatcaaaagaggtgccagtgccttaaggaaggtggtcaagaattgtatttagacctacacttaaggcagaacagcaccttggttcacattctctaccagttctgggaaagaagtggttcttagccaggtaaaatattcaaccacgaagatcctgcttggccttgtaatgttatgttatttctcagaagacagccttgtggcaggccacctcaactggtaggaatgtgctgtacaaagaaatcaatcaaccaggttaaggatgagatcaactttgtgcaaattcttttagtagtaaaaacaacaatatcacctttctttataaatttgatctacagcttacaaatatatatagtacattttatttgagatgcataaaaatccatggaagtaattggtattgaaattcctatttcccagatttaaaaaactgaggttcatataaataaaatgtagttacacataatgataattagcaagcagcagagctgagattcattccaagatatcag

SEQ ID NO: 44575 - DNA, 386 bp, Homo sapiens
aattaccaagctttatagacacaccattagaagtatacagtagatcctttgtagagaccatgaatgagagccagtgtaggcgatgtcaggaacagcaatacaaattttgagttgctgtctgtgacgaaagcccagcaattgtcaagagtttgactgggtcgcaaaagaatttaaagggccagcagctctttaagaatgcatgcgttagctttatccttatgtaacatttactgtgaggcaaggcatgccaaatattaagcaatctactgaattctgctgagtccctacccagtgattctattttcaaatgagataagtaggtgagatatacaaatgaaatcagaggcttgattaatgctgcccatccagaaatctacaatgtgaat

SEQ ID NO: 44576 - DNA, 778 bp, Homo sapiens
tagaaagagccagcagatcagaggataagatgggcaagtaccatgtcacagaagcaaagagaggaagtggagtttcaacagcggcctttaacagagagagtgcgaaggtcagagacccagaagaaggagggcttggctagaaggtcactagtaggctctggcttccatctccagataggctaagattaagccaattcaccattttcccacaactgtcaactctgcagaattgccttttcttcctctcagacagaaagggaaatcccagctgcctgagcaaccggtttttcactttcctccttgtttgcagagtctagtggggctggccctggtaacctctggtgattcatccagcacaccctatgaccacatccccattgtgtgtgtgtagagaggatgagagtttatgtgttcctctgaacgttattacaaaagaaaagaacattgttctctagaaatatgaaagaaaaagaaaagaacaaggtgttactctagcatagttttttctcaattatctgagttgtgaaaaaaaaagtaatgaatagtggagcttcctcaaaacagattctgagcgctgtcagtagttaacagtaactactgtggtggaattcctgtgtggatctattttggcactgtgttacgtaattatttttatcttaggatcagatctgaatcattcaaagccaatgtcttcagggcactggtgtgactccaggtgttctcacatgcctgtctttcttctcagatcactgcccaacactgaatctcaagtgatgga

SEQ ID NO: 44577 - DNA, 751 bp, Homo sapiens
gatagtcacttagcgtggagtagtagtagggatgacagagaacatagtcaaaatttttgtcaaactttctcgtacaagcaaacaaatgagactgtgttgcttgattaaactaataatcagtttcaggatgttccatggtcattactggctgcatcctgtgaccatctggagaccagaatgaccagccaagcccctatgtctttgcacacgcacaaaaacaacttctacagaattaattggcatgctccacaaagtttgctgtgttctttgaactctcttgaccttgggaaaatgcttttctcacagaaaacttttcagccaattgagcttggactcttcttaaaggtcacatggactcttgtattggaaatactatttgtacatttgtatttcctttgttagttccagagtctacattcctctcatagagcaaacaaaggctaaaggaagatcaatgaagaagagaaatgaaggacatactggaaataaacttcctgaagaaactacatgggaaacaaatgccactaaaactactaggtagaaataatatctatatgccagacagagcaataaaaaaatcgataatcacatacagacaactttcatgagatctgtgtgcctaggaacagagtagtaggtagtgtcagaagataaaattataaaaaattaagtttaaagatttcaaatggcttagttgtgattctagaatcaggcaacactccatcccataaaatagaataagtgttccaat

SEQ ID NO: 44578 - DNA, 2721 bp, Homo sapiens
ccgcctcggccttctctctttaaagaaaaaaaaaaaaaaagaaaagaaatttgtctatataaatatacagttaaagcaaacaatataatatataaaaccaaatttggaaatattttttccttccatcaaaacttaaacatcaattttagaacacagtgttctatatcgtaaggagtcctagagtctacccagtataatgtctcacatcctcgccctcttgctatagttgtcaaacctaaatgtacctaagaatcactgataggtagttggttaatacgatggattatttctaggccccgacctcagacaggtgcctccatgcccccacccagccaggacattctgagtctgtaatttgaagtgagcttcaagaatctgcatttttaccgcggcgcttttgatgcaggcggtccacggtaaagttagagaaatgctgccctgctgctgcgctgcagattgaactctggggaagaagaaatgagcacgaccgggagcggtccatctaaaccggtccatttagatggacaggttttagcagtccatctaaatctgtctcaggagctttctttctttctttttttttttttttttttttttttgagacggagtctcgctctgtcgcccaggctggagtgcagtggcactcactgcaagctccgcctcccaggttcacgccattctcctgcctcagcctcccgagtagctgggactacaagcgcccaccactacgcccggctaattttttgtattttttaatagaggcggtgtttcaccgtgttagccaggacggtctcgatctcctgacctcgtgatccgcccgcctcggcctcccagagtgatgggattacaggcgtgagccaccgcgcccggcctgtctcaggaactttcaaaggggagtggcagacagaaaatgagcacggtatctaatcagcaagtaggattgcaaataagaacgcctttatgaaggccccagtttttacagtaagtccctcactgcccgcacacaacgatgccaagttccaacctgatttgcgtcaccacagttgtgggtttgcgccaaggttagttatcaagcgtagtgagaggataaattcacaaaatgagggacaaaaataagacgagagctgggtacaacggaagtgaaacctgggtggaggtcatctccaaatcacagtggaaggacgatgtcagggatttgtcccaacactcttttgatgaaagaatttgattagtggactattgcactcttaaaggcaaagaaaacaaagcacggcagtgccccgctcggtcgggattcaaaagcagtgaaagctgccttgctctgtttaaagcgacaggactgctctgctattcaggaaagactaaggaggcagcggtatctgcgaagtcctgcgagctcccggcgacaggagtagcgcgagcagctgacgggggaaatccactggcagcgagtcggatgagtcagcgctgagtcacgctcggcgctacgtgccggcctgggcggccgcagcccggggcccgcagccgcggagtcagcagagatccgccgcttcctggaagaccctccctgcgcctgagggagggggcggcgtcgcctcctcgcgccgccaaggccccctgcagtcacacactcgcccgcacgcacgacctcctcgctccatcctggggacatccaggattcacccccgaggggaagagtcccatgtgacaaatggttagagcttgggcggatgctttcatcccatgtgtttcctcaaagctgagattccagcgctcttgctcttttcgtgttgttgttaggtttttaacttttttttcccgtttcctggcagaggattaacacgctgatctttttatagtttccaatattttaaatgaagcacaagaagaatggattaataaaacgtgttgaaacttaagcatcaaatcgtcacactgctctgggttctaaaatgactagaaagtgactgcactagaagctttgaatgttgggtaactgggaaggattaactcggttctgatgtgccctttgttaatgaaaatcaaatctttgctatttgtccaaccacccttataataactaaatttgtctaaagactggagacatgtgtggtaataattagatatggagtcaccaaagaacagggtagccatgcctttgtgttttctgtgccttaactaacattctgttgtcctaatgtgcaaatgatacattgttggttttaaaaaatattatggcaatgtttatatccatgctgagagttaatagcaggtattgtgtcatgaagtgcagctagtcagtgagatagtcctgatacaggtggggtaattattatttagggacaatttgcggctgtttttcaagacagactgggtctttagaagttgtgccagctgttaccggtggttctgcttcattgggagaattatttccctccttatccctgtgtacgtgtgaaatgatgcaaaacaatagagtgttcgtgtagtttgactgcttttcttgcaggcaaggagactgaagtaattagaggttgaactgactcaccaaggttactggagaagcatgactacccaattttgtaaaggagagaaaagccccaaacaaatacaaataggaaacatgaaaatacgagagaggatcagagcccaagaaagcaaaatgagtaatatggaccagaaatggaatctcatatacttgaactagttgtaatgggaggt

SEQ ID NO: 44579 - DNA, 3900 bp, Homo sapiens
cccaaagtgctaggattacaggcgtgagccaccgcactggccgtaatttcttttctcttcctttctctgcttctttcttctcttcttctctcccttcttcctttccttccgccctcctttcttccttctctccttctttcttttcatgtatctattcaacaaacaagtatttagagcaggagtgttcaatctttggtttccttgggccacatagaagaattgtcttgggccacacataaaatacatgaacactaacaatagctgatggactaaaacacatacacacaaatcttataatgttttaagaaagtttacaaatttgtgtttggctgcattcaaagccatcctgggccacatgtggcccgtgggccttgggttggacaagcttgatttagagcctcctttatgcaacgccaggtgctagatgctggggctgcatggtgaacagaggaaggcccctgccccgggagacacagcttgattcccttatggtgtagaacacatgagccatgaggtcaggagctgtggggtcttgttcaccactgtaccctctacccctacctagcacagcacatggcaataagtacatgctcaaaaatactctgagtgagtgaatacaagttgagtgctgccacactgattaaagggtgctcttgaagtccctcagctggtaaatgccaccctgcagactgcccaagttcccctcaggaaaaacagaaccagtgtacattcagatcttaagagtggtcatccggaatacgtaccttatgaaaaagtaaggatattcaggttcagtaatgatatacttggtttgcaaataacacacgttcgttttcatgttgctaaagactccttgctaggaaacgaaacacttgtaatttaatatgcaatgttctcaagagtctgaggccaaaccacctcaagctgtgaatgccttggctctgaagagccagtcagggtcagggcagggcagcacttggcctgatgctcctccagaataaaccaaacagccacaggaagtggtttctgtgattcagtaggtggcacacttccttttgagtcagaactgaatcacagctgtgagaggcgaaaaatacctatttctttatcccatactttttccctattcccagtggtaaatttatcacagactgtcatataatgtatcctgtttagttccgcgtatttaagcaaacaaaaaaaatttggcaaatcaactacggggaggcaagaaaggaggggaaaacacagccgactggaattaatccaaacgtcattatgtcgtcacagggccatattctcagaggtgattgaaagaattgccacagtgattttgctggggtcattcaggcccctggttctctcaactggagtctgacccatttccagtgaaagcagttagatcacacttacataaactgtgttgcttcaaatgggcctgccctcctcttcactcactgaccctggcttgcttcttggcatgtctgctggaaggccattctctgtctgtcccaggcatggccctagttcagctgcgggtgaaattatcctgttctgaatgtactgaatgctgctggcaatgctgtaaattgttgtgaggcttaaggaaaaaccctgtagatatcaacaagtcataaaaacaggcgtattttctcttcgtctctttcccactgtgtgttttattcttcaatattaacagttctgggaatgtaaatgtatttaactatattttcctctgatgaactagattttagtatataatttgtggcttccttccataccaatttgttcatattgatagcatgcttcagaacaaagcttcagagctcaggctatacatcctataacactcttggaagaccagtaaccagactggaaccagaaatcttattgccatgttaatatgtcattttccttctgtgaaatattccaataatgtaaagaatgcaagattcaaagtcacatagacccatgtacacgttcaatctacaccaaagtttgtggagctgtgtgaccttcaataagtctcttaacctctctgagccataatttcctcagtctgaaaaatgggatgctaacataaggccaacattacagtgagaactaaataaaacttttacatagtgtctaggacagctcctagctcatatttagtgtttaaaataagcctctgatctttctctttatttacaataccttttcattgggagatgaggacagcatttggacacaactgtacaggcacgctaagtctcatccttccaaagacgtcagtcacattcagcccctttagcagtttcatcaacagcatgtatagcacatgtgatagcaaacagcaagttggattccttaataaagcagtaaagaaggtcagccaggatgtaggctttaaagccaaggccagctcttctgggcaggacagttgtggctgatgtatgacagccaaatgtaatgagagtcctcatttgacatattgaagcgagcacctcaaggatgggcagggaaaagaaccatcagcagtactcaccaccagagcagcagtgagtgcccaggtcaaactggacaagggctggcagacaggtggaaatgtgagtacatcgttagatttgaaaaggcctttggcagggcacagtggctcacgcctgtaatcccagcattttggaaggccaaggcgggtgaatcatgaggtcaggagaacgagaccatcctggctaacacggtgaaaccccgtctctactaaaaatgcaaaaaattacctgggtgtggtggcgggcgcctgtagtcccagctactcaggaggctgaggcaggagaatggcgtgaacccgggaggtggagcttgcagtgaaccgagatcgcgcgccactgcactccagcctgggcgacagagcgaaactctgtctcaaaaaaaaaaaaagaaaagaaaagcccttttaaaatgtccatcctcccataaccctttgaagcctcccacgtccccccagttcctcccaaatggcatataaaaagggtgatggcttttagacaaaggcagtagtactccccaaacagttaaggtccagaacatcatcttgtatatacctgtcttagagctatcacgttgtgtactggagtttcctgattacatgacagactcctctgctagacaaactcctgaagacaaggaggggttcttattcatcctttagccaaaccttacctgtagctcagcatgtagcccatggtagatgctgaaccaattttgttaacgtgagagaaatacaagaaagccaagtcagaaataccattgttgctgttagaaaacttcaaagaggaatttgtggtctctggtgccaaggtcccataagagttccagctgggtgagcttcttgtgaggaaaggagccagaagtcagaacacatagtgtgacaatatgagagaaaagaggatgaaagctgttcttaaattgcacctgtctaaggcaatccgagcttgacacatggtttctggaggtctgggcattgtctgagtggagtgttgattgtatgtctcctggagccttctgtttaaataactgccagagcaggatgactcagcagccggaggatgagatgctcttgatctgccgtcctctttaagtgacaaatcacattgccctgggtgtctgtggcaatctctgatatgacacactccttcctgccagcccatcaaccagggtggcaagtcacagttactaatctggagacggctgaaaattgctgacaggcaagatcccatgctccaagtgtagagaatcatctttaaaatgaactcttgtcaatcttgtcaatagattttcttttttttttttcttttttgagatggagtctcactctgtagccaggctggagtacagtggtgtgatcttggctcaccgcaacct

SEQ ID NO: 44580 - DNA, 6630 bp, Homo sapiens
cttcggaattatcatcatctaaaacaaacataaaaagaaaacaaagaatttattattcaacatttacatactccgcagggtggcataactttaaagatgcttacataacaattaagaccacaaaacaagctttggagtctgagagatctgagttctaattctaacttcatcatttcctctggacaaaataaaaatcctgtcgtcagctgccttatctgtaaaatggggataatgaatactcacaccccacaggctttttattttttctaatggaaaatgacccaaactgcaaagcatctgtttataaaatagtatatatactcaaaaggctcgggtctcacatcatggtaagacaatgctatcctttgtctccaacggtttgcttaaatttatcacattaagactataatgtatcaaagaaaaactgttcatgcaaccctcttaaaatatgtcagtttatagggaataataataccagatgtgaatagaatagatactccaaaaccactagaaaaccttgtcaaatagacggagtaaaaaaaaaaaaaaaaaaagccacacattgattttaatgtcagatttataactaaaaataattatttattgaactaaaaataattatttattgatctaaaatgatcacaacactcagttggtcctagcaacgactaaaacttgcataaactataccttagataattacaaagaaccgcatttaggtggtgtcggcttataaggaaacaatattttccaacatccttgaaaaaaatgaagtctaactattaatagtttccagtttctataaaaaagggatgacctttcattttacaaccaatttttttggtgaaattattttttttcaagtggcatgaaaataaatataatcgaaaatatgggagggggttctagatcattaaagtgcctatttagcgttttaaataattacagaaatatcttttaaagttttcttggtgtagaaacctttacgattagcccccagagtagaaaaaactggcacattatttaactttccttcagcaaagtattggatatacacaaaaaacgtgatgcctccctgatattaaacgagaaaaagggggaaaaaagcatgtatacgtcgatactttcatttaaaaatcatggtgattcgcttatgtctccatacaattttcctcgtcccctgtgcaaattcccctgaacggatttcagaaccaaaaactagctgatgagctgggggccatttaaattcgctcccctcgaaggcgcccgaagttcgccttcctttccctttcttccctcttcgctccctttttgtgccagctcagcagtctcattgaagcgagcggcggcggccgcgccgtggtaaacaagtgccgggctgtcaatcaagaactagaccggagcaggagaggaccggcctaaaccggcgcgagcagatcccagccggcctgcccgcgcgccgccgccgccgccgctgccgcccgcgcgccccgctatacatacggcatacgtcgcgcggcgctcgcgcccgtgcccgcgcaacctagcctgctggccggggggcggggcgagcgagccgcggcgcttccgctttacacgccccagccggcgaccggttccatctggctcgggccactctgacacctttagtttcggcaagggatattggggtggcgaaggggaggcgggggcccgaaggcttcggaaaacgatgggggagggggcagaggatacccgtcgaagcccccccctcccccaacatttcgatattggaatcactttccttcttcctcgggccagcctttgctctgtcccctcaggtcaactcaaggtagacagtgtggcgactggagaggtcggggaacaagctttgtttcagctaaggggaaaacaagcgttcacaggagtcccctgacacctcccactcggaagatagctaacgggggtcctgccaacccttcccatccaacttccatctgaaaaggattttctgctaaagttgggtccatggccatccagcacctgtaaggccggcaggagcgtctgccctctactcagttaaagcctgaagtcgtttcctttcgatggcccttaggaggcccaaaagaggggcgacagaacatgatgttgacacgggctgggcgcccccagaagcccgggaacaaacgtgagtacgggctgggtgggggtcgctctggaggaacctttaccggcgcacgccggtttcctagcctcgccccagccgcggcgcgagctcactctccccacccgcccgcgcccaatccaatcagcgcctgccatcgccttagcaacaggctaacaaacctggctccgcctatcccgggcgcccggggcggggtctcagttaccaggctagtttgagagctcccagtttcaagtcattgaaactattccagactgagctcgtctacgcgttgcagggtttggggggcattttgttgggggtgcagggcatttagttttctttaccacgaaatcatggtgcaactaatgaaattatatttgtcctcacatctcgttgttctacttttccccactgcaagtcttaaccccttgaggaaaaatctgttttctttcatccgtttcataaaaggctgcaatattcagaaaggtacaaacacaaagtcatctatctgcttttcaacaaataccaaggctgtcattaggcatttgcatctcctatcagtgttaacacttggagagattaattagttatttcaggatgcaaagtacctgtatctaactacgaaaatcctgctaaagaactgagttcaccttaatagtttcaaaaataatgcattaatactgtccctcaaagcatccttcatttctcacttgccttagtcatcagcacttctccaggatgtacgtttttaatataaaaaataaggtaaaatatgtctctaattttttttctgaaaaatcgccaacatctgaactaaatactgcattaaaaaggagaggcacaaaaattacataaccagttttaacattatattcttcttgggctaggaattaagtcatcgccaccacctgacgcgtgtaaccaatctgctgagagcagaacaagcgcccctcctcaccaccccccagaactggtccgaaacaggattgaaccgcttctaacaaagggtggaaacttagaaaaacaagcctagagtctcctatatttccacaatgtaaccatttaaacaatagattggaaatctcaggactccttctccttttgacaaccctttatctctctcttctaaccaaaaatcaaatccagtgtgccctatacttttcaattccatttgactggcatgggtttcattgaatgcacgttccaaagttagacatgatgctcggaaaagaaaattactgatcctaaatggcttctaaacctgactcgatacctatcataatgacagatagtcattcctttaaaataaggaatgctgggtgtaaatttttaaaggaatggtaaagaatagagaaaaaacacgtggggtgttgataccatatgtcaaaataagccacagaaatcttttatgaaagaacagtcatcaattatttaaagtcttttgcattccaatattaaaaatgaaacacacccattaagtctcttaaaaatgttattacatttcttgatcgaagttcagtttttacatcttaggttgcaagtaaaagggcaaaaatctaagactgcagcttttaccaattcatttgaaaatatattagtaaaacgactgaattggattcaaacagaatttataagtaaggtgcaaatggactacaagtgcgtgtggcacagaccgagccgggtacagaggtagctgaataagtgtagtttgcagtcactttgcagatgcctgcatgcattacggcttaacacacgatgaacgtcaaggagaatccaaaccttccaactttgctaacctttctcaaactgcttagttatgctaggagtagaatcacgttaattcagaaaactgaaaaggtacgtttccaaagaaaatgagtccaatgacttatgaataacaaaaacttacctctttcgtgcccaattaagatgtctttatggttgaaatactctacttcttcagtgtaattctgtgtataggcagtattggagccggcgtttctagattcagtccagcgtactttcgcatgtcctcttgcatgaattttaagagattttactctgatttccccagtaacttctaaatttacccttcctgagacggtatccccactagaatacacagggacattgctgtcattaagacagtcaaagcttattgtcaaactcttcacctttcccagcaccatgtttataacaaaatctataaaaatataatgtaagacaaaaaagtcaagatcgcatataaaatgtgatcttcacttaacactgatcgatatttttgccgtgcaaaatgcttgcaggccggatcagtgattctctacaaatagttcattgagatttcttaaaaagtcagggcagcagaggctgctgctccgcgctcccgctcgtctcagtggtctccttacaaagacgggcggctaaaagctgccagctcactttaagagcagctttgtgaaaaacaaccccagtgcgcaggcgcaggccgcggctgctgtccgccctccctgcgcgccccctcccgcgccgcgccgcgccgcgctcgctcccttgcccgctcgctcccgggtacagtaggtgtagagctaggggaaggagatactggagctgctggccggctgaacctgacttctcttcattgtgggctcctattggtaggcaggctaccgtataccctcgacgtgctatctggagcccgttaccgagcgcactctactagaaagataatggcagagtggggtgcgagggtacaagggctgggtggggagtttgcaaagccaagttaggataaactgcagcgaccagcccgaagcgtgcgttaccggcactgcagcgttttaccaactgcctggatgggaggaggaaaaagtgatgtgtgaagagagatgggggaagggagaaaccggttgggcaagcggccgattgttgagcataatctaacgaatttccaaagaaaacgtaataaaaccggacaagaaatattgttcatagacaagagcatactttgcttggattttttttttttaaaccagtactttgtaggcaggttggaaatgaactcagtcgaggtcaaaggaaccttaatcctttgaagagcgaggtagagaagcaagtacaatgtaatcaataggctttgctgtctcctcaacttctttctcctacattgcttaattagcaccgaaaaacaaccaagttgtttccaggatgacacgggtgggggctgggggaagcttgatcacttcctcgaaggaagaaaaagtccttttaagacaccacctacggctagatttgcagagtaagacatgattacaactcctgtgtccagaggaataagaatagagttcggcctaaaaaagtactaccttataaaaggcatatgacatagtggtttagctgacatattgtttgcaacagaatcggaaaatctttgttagaaattagtgaagcgcataaaattgtttttaaaaagcatgatttggtatataaatagggatttaactgtgtgaagctttaattttcggccgagagccttggaccatttaacgtagtaattctcatgatacatcttaaatataggtacatttctctttttattgtgaatgtttggtaaaaaatagcagtgctttcgtcacatcacactgggattcagagcataacagcataaactcatctagattactggcaatcaacagaactgccttacaagagaaatgtagaaagaaaaaatatgaatctggtgctctctctatatatatatgtatgaccaaaaataccttggaagatttttggctgtccgtgtctaaacgttttagattcttttgcgtagtgtatatggataggttgagcctatgagtcacaataaactaaacttattggtcttgctgttttatttcaaaagaaactaagcttttgggggttggattttagttgacaaggcaatatcttggactcaacagcaatatataaagagtataaatatgcaaactagacaattaatgagcaggccatttatttcagagtttagatcgctatgcataaaattataaatttgcatatttaagtgggaaaaacagtcttatcttttccctacctcttggttgacacctggtggaaattctaggtaaagtacctggggccttgtactagctttgattacagatactacttgtgttttttctccacctagtggtagaagtggtgaatttcctagaatgacagcttttcctcagcataaggtcaatgatatttaataagcattcgaaaaccactgagcaaggaatggatttaaaagtgtagtccataatgaatacataaattcattgcacatttgtgtctacatttatgttaaaaattattaagggttagtgaacagctgaattcggatttttttagtaaaatttatttaattagaatataactcatttcagaaaaaataagaattagctatataaatacaccagaattgcatttaataaaaaagaagt

SEQ ID NO: 44581 - DNA, 623 bp, Homo sapiens
acttgatgctaacaatgtgacagtggtataaataataaatgcagaataagatttccatagtggaaaatcactgttttggcacagacagaacttctttccatattacttgcccagggttagagaaacattactattaaaaacgattttaaaattcttttaccaagttatgatgttaagtcatattggtgatgaggtagcttctctctgtagcaaccatctggttttgggttgtgatagttcaatagggtaaaggtatcattgcaaaactcctgtactcagtcactctccacctccacgttagctgtgtgccatagtgcatgcaggtacaaactccgaactgcatttcaaattttccatatcctgttttctcttgcccttaattttccttgtaggttctggtggatgtgttgccaaagtttgttcatacattagcatctgttctttgaccttcctcatctgtgaaatagtgttgttacatacctacattggatagatgtaatggagaattttattttgcaaggcattttcaaatatttttttctcatggagtcgaaaagtagaatattaactcatttattaggagactatcatgggagaaatgtggctgtacaaaataatatgtg

SEQ ID NO: 44582 - DNA, 2043 bp, Homo sapiens
tcttttcttctttattactgtagctctttgcctatctgtctgattcattaatcttttgaatggttctttatgtctcaatttcctttggctcagctctgattttggttatttcttgtcttctgctagctttggggttgatttgttcttgtttctcaaattctttcagttatgatgttaggttgttaatttgagatctttctaactttttgatgtgggcattgagtgctgtgaatttccctcttaacactgccttagcagtgtcccagagattcttttttctcattagtttcaaagaaatttttgatttctatgttaatttcttatttacccccaaataattcagaagcatgttgtttaatttttatttaattgcatggttttgagcaatgctcttggtcttgacttctatttttatttcactgtggtctgaaagtatgcttggtatgatttcagttctttcgcatttgttgaggattgttttatgtccaattatgtggtcagttttagagtatggactttgaactccatactttagtcatacctattaatgtttgcatattgggaaatgcagctctaggctgttcaccactttgaaatactattccgataagaggaggcacaatgcaattatttagattttctcataataaattaccattatattgcagacctgtatgggagattacatgtagatgtccttaattgaagttttggctgtttgctaactcacttatgacctcacttcaccagtttccgaagtgttgggggagaggagaaggaggctaactcaccttcctgcaaggtactttgttatctatgtaaagggagcacaaagacatttcacataaatgatgtttttggcttccaatttttttaagttatatagtagcagcttcacttaatgaatgacctggctgtgtccataagatattaagtcattaaaatatgctaataggaggaggatggaagatacaaatctactttatttgatttccctacagaacattctcactgacccttattcttgaacctgaatgaaaaacaacaaccagaagccaatactgacctcattcacgttaatccattgcagaatactgtccgtggagtcaaaaacacaagaaacaatcaataagagattaaaaccagtttattttgtctctaagacatttctcctcaggttgatagatgcaaaagtgaacaacagtaaaatagtcatgcatataattcatcttctcacagagaattataactttaaaaacacagacttacaatctgtaagtcaggaaggaggaaggccgtttttagagagcaagaccctcatatagtatgtcattaccaataagtttactctgctttttatttaagaataaagaaactgaatacttgaaattcatttttcttacttctgccagttgtttactgttgtttaccgagaacatagcttattttatacctcatagagttcctgcattttcctgagtcactgttacttggtcactcactgaatacattttattgagggtttaccaattgccagtcactgttgtaggtgctgtggggcaagtgagattaagaccttgccctctaagtaatattaaatagatgataatgtgatagcaagtgacagctggagtgagagactgtgcttgagttagggtaatcaagaaaggtctcatagaagaagtggttaggtaagactgggtgtagtcatgtgaagatgtagagaagaactttccaagcagaagagacacaaaatgcaaaagctatgagatgggcaagagcatatgtgttaataagacagaaggaaagcctgtgtggatgagcaatgggaaaagagaagagaaaagaaaagaaagatgaagtctgaagtctaaggaacaggaacaagtctgaatcttgtacagccttgtagcccatggtaaggagtttaaagtttattctggtggagatggggagcattgatgggtttttaagtaggtgcatgatattatccaacttgtaatttagaaaatcactcgagcatgcttctagggagggttattg

SEQ ID NO: 44583 - DNA, 3586 bp, Homo sapiens
cttaactcagtctctccttatcagggagaagggttctaggtgtgggactgatccaacacaactctcacagtacttttaaggacctctgactttctcagtcatgcccaccctccatatcggcaggggttttctccctccctacagttaagtttcctctgctactcccttgtgcagtactcatcagttttatctgtgcatgccagaatccagattatgaacacagatcaaggtccatttcccttcacataacatgtgttgtcttctatataaatatcccttatcattttataatatcttacaacatttataaagtttccccaaaacagatgtttgtctttaacccaaagaggactgctagtcttccatcataatctgggtatagcttggtcaaactagtctgttactgttttcttttgatcatttctcacctctcttttccaacaacaggaagtcagattgttgtccaagcccaaggaaaactaaccctcagaaatctagagtaaggtcagttgattaaaacaaatttcaagattaatgtagcacagaacagcaactactgctcttcccttccaacatgaggatcctcactactatacatccctgatatttgtcatggaacactgtagtgacaaggtgtatcttcagtaaagtctccaaatcataggtaaatatttccaaatacctaggctgagttccctggcaagcattcatgcaagtaaatatatcaatcttactttcaatgctgcgaaagactatgggaagacccactaatgttagggtattaccttcggatcaccacacaatttacacatatctagaaaggcactgttcgattaagttgttaattagaatttgtgaagaaacacacagtgtgtgttacaagtctgaatgttaaaaatatgaagattacaggattgtgagaatactagtcattctttttctctaaaaaagaacattcaagatattatctttgtttctgaagtcttgggtatagcaagctactacaggttgtttattttgtgcttttatagtcatatattcagaaaaagagacatagtttgatcttttatattttgatagcactataaagtttatagagcccttgtctgtacattacctccttaatcaattatattatcttaacaatattggcacatcacagagtcacaaattctaaaagtgttcctgataagactattgattggctttcagaattataaattaaattcataatttctataccattgcaaaaacattttgaacatttttagtacatatttgtatgttttcgctttgaaaagagatagagtatatatctattaatattaactactaaatttggaacaaaaataagttaatgcagcagtaggtttcatttggcataataaagcatttctatccttcattatttataattttattgggaaatatgtgctaatgcaaacaattttcatacatgaataaaacataaggtggagtagtaattaatataaaaggattcaacggcacataaaggtggttaatatatctatctcttcatatatcaacgccacttatattttgttggaagacactaaagatcgaaaatcaagcatgctaattaattagtttcattctcagttaacttgaaggttgcatataaaaaggaaatcaggttgactgtgagcaaggagaatgaatagttcagataaaaagatcaagaggagaaggtatacaggaaagaaagggaaagaatgtcagcacacttagcagaataaaaggtctcctttaatgactcaaagtggaacaatttccccctatcccgtcactgaacacagggaaagttagagggcagaatccattatatatatggaggctgcaggatctgcatataaactttcatagaaaaaaagtgagtatctagtaagatagagaagaaaagaaaagttagaagtatattcaaagataatgttctggatggcattgaacaggcattttagtgagattcttttggatatgtagagatagggcttaccaggtttttcaagaagggaggatacagatattgtcacaaaaggaccagagatcccatgggaaggacaaaaatacagcaggaccaggcattactacatctaagactggatccaggactctctgctgggcctgagcacaggagttcgtgaatcatcacactaatggttaatctttgatgaaatttagctaactctgttggtgtttacttctatgtgtctactcttccctgtgccaagtgatttcttttccctgtagtctacatgttttctctagctcatggcttcagttgcctctcagttttagcttatttataaactaccatggcctgtactctgtatttgtggaaagcaattcgcctgtctctcacaaactgtccaattatccttatacttcctaacttctcttcaatcagctcatacaacctgctggcctaaggaggctggcctatgactcaggagaaaggctgaagtcacaggctggcctgcccctctagcaagggctttgtgtaggacagttttctttagaaagggctattggagtagcacattttatgatgaatagatcaagaaaaacattcatccctgaaaacgctttgttggttttcttagtcacctgtgatatctgaacttctgctcttatggtatggttctcagctttatatttccacctaaaactcttttcatctcaaagactaggaagcattatgtttttgtttgcatcaagaaaaaatctacataagatgaattaatgtatggatgaatgaatagattttttccacaattttttccagtagattggatgataatagtgcttggcattaatcattttacttcaaatgtctgactttatatggttactatttcaaaacactcaaaattatacatcatgtatttcttttcttggatattctgttatcatttctcccgtataacttactgaagttaattagcaaacctttctttctagtttcaatgcctatgttctaattctttggtttcagtgattagttttggccatttaaatattatcaaaattgcattgataaaaatactgatatagttaactatgaattttatatcaactcaaattcttatagatagttagagctgtgtacctctactacaccaagagaactttttaaaagttggtgaaaaattgttttactacattttaatcttgtctgtaacttcctgaataacttacataaataagattgttttttcttcttattagtaatgacaatattagaaatctataggtacagtttacatgcatttttaatgtcttattagtagcaaaattgtatgagattttatggcaggtggcttaatcatcatttcattgagtcacattaaaccacaaagttagtcatgatgtcttgcatgctttccaatgagaggtgaggtattaacatagtgtacttattggagtacacgctaaaattttcaataattttgtggagttgacaggagataattcctatcttaaaatttctaagatataattcagatcttaaaattttaaaaatatatacaaatattgcaaggaaaccagacttttgtatttaaaagct

SEQ ID NO: 44584 - DNA, 1005 bp, Homo sapiens
tgtgtgggttgtggttgttgcttaagttcccatgactattgagtgaggaagttgggtataattcctggcagcatagtagtttatccattacactaaagagcagatcgtatttcaaaatgtttttctgagatcattacagcaacaaatggcagggttatcagccttattaccaattgcccagaaaatgtggggaaaaaaagccactaaaaatagccacaggaagcaataatttctatgacaaaatgttcggctgtttacttagtacgctaagtaatatatttttgatcaaagataaacagtttaaaaagttacatttgtgttgtggggaggcaaggctgagggaaggaggaaattgctgttccctaaaggctgatgtaccttgtaaaataatctgtcttcaaactcagaatgaaagggagccaaaaacagctttgaattacatgaagaccctggagaggctgttcattacacaatttgctgtagtggtttgcagatgtctcattttgtgagtcagattatgcactttattttttgttgtttaagttatgttgtatagcgttggttataaattctttcctgatttgtcacaatttctctgtaaacagcacaatgtctactttgaacaaactgatacattgtacccctgctgtttcaaaactgtgactgatgaaagagctgtactctggctctgaagcaagtaaggtacttagtagaaaatggcccttttatatagtgcatccaactataacatcagaaggctggacttgtaaccactttatagagaaagtacccaagagtacatggtgaggtgatcagcaaaatgccaactctgaacagcaatgaggcagtgatgtcaaatgacccgttttggcacattttattttaaggatgtaatcctgtagcacatacatagtccttgctaaagttaataaaacttccattataagctaagaagtcttactaaaaaaatacttattcatagatttgttctaaagttgggttcct

SEQ ID NO: 44585 - DNA, 1108 bp, Homo sapiens
taattttgttaattggccatggtgctgacatcagaaaaatggaaagcatcacaatcacagtccaggaccttaaaacccatgttgtaagggaaaaacaattttgctattctttataagcaaaatacatgagaaagcagtacctttcattagaaccagaggtaagctggactttggggtgcccacactacagtgaaaatacactcaaaagggctgtaacctgattttctatgcaatgtcatcacagctgaacattaaaagtgagactggagatgtgcatatttaccatcaggaactggactgagcattaatgggctccggaggcttatttggaggcagttgcacttatcatgaatcaggaaaaggaaatagcagccctggtgtgctgtaggtcagtcagaaatgtcgacttgagagattcataaatctctggcatgacttcagccactgactttcagaacctccttctagcgttttcctataatttaaagattatgtaaggtatatcgtgagtgtgttcgatgaaaatattaatttagagataaatcctgtaagtgctctgaagccacggcttctgccgtgcagttacacttcaaacaggacaggctgctagttttgtcaacagtaggaggtcatggaaggctgccaaagaaaacaaacctttttcagtaaaatactttcagttctaagtagtcacagaatatctcttgtactgttttattgctgatatttaaactttgatagattgtcttttgctgacaatttcttgagtcagaaatcttaatcataaaatgaagtgtggaacatacactagtgagacaattaatcacagcaaagtctgtctggcaagttcaagtaattttctggtgtttttgctttggcgccaagaggggaggggtatggcaggagggagtggtaaaagttatagggtaaactatttctctgtcgtttttgttgttgttgttccctgaaagactgatgacgtattttagtaaggaaaatcctgagcctttgagaaaaatgacagaatttttccattgaagaaatagttttattaataattataataaggtgcaatgtcattttcatttatcaatatggtataattgat

SEQ ID NO: 44586 - DNA, 998 bp, Homo sapiens
attttaacatacttactgttttataaaacatactttgcaactaattttgcaagaatttatcacaattcaaattttggacttctgtccctaggaaaaaaaaagttctaaatttcttaaaatatatattattttgttgcttcttttgtacacttagtttttataaaattccttgcatttttataactttcagacaccaagacagagagagagagagaaagagagggaggggattgtgcaatagaatcctgcctcagccaactctcagtagtctgttggcagaaggcctgtgtgtgaactatttccaagacctcggtctgaaaggcagccaaaggcttcacaaaagaacaggcccaaaatggcttattacctttcacctttgacctgtggcccagctacctcatagtttacgaatttgaagtcttatgagagaattctttgccaacctgtttacaaacagctgacttattccacaggaacggtttggcaggacatatccaggtcacctgaccttgggttgtcacagaaaccatgagcctcagattcgtggttaagtgaaaactgcaacattttggctgaaatcagtattggattatgcagccatcatcaatcatttaattacttttatgtgttcatgtcaccaaattattaatacagaaaatgtgaaagcaatcatactagaaccacaaatggtataagtcatggcttccacagaaaagagaaaaagcataaatttttaaactgaatattacaagttaatctcaactattacactgtcctagatcctgctaaatttatcagtacacaacaaaaatcacacgatcttttagttattcatgtgttttcaaaactctagtgtttgtcttagtcagacgttaccttacattaggcttttacctgaaaaaattacttgattaaatccattatctccagcatgtttgaactaatccctcaaggctgatgctttgatcattttggtgattcctttaaaataattaatt

SEQ ID NO: 44587 - DNA, 669 bp, Homo sapiens
ccctccctggtgagacttaaagtgagaacgagtattaaaaaacaaaccctacctctgtcaatacagcgtggccatttacttccacctttacctgagggcgtgttggcgctaggaatgctcgagctgagacaaacttttacgccctcgcgagtcgaggggcgggcgggcgagcgcggctcccacccccggcggcggcagcggcggctttgtcactccgcgcggctccgcgcccgcctgagcctgcctaggggagcgatctcaaaacgaggggggtgcgagtatgcgattggagaatatgtaactaatagaagtatcattttcccccagtacgatctttcaaggaaaaaaaaatccattgaaagaattttcaaagtgctgtcttcgtttggagaaaaggcacaggctgcctgcggggaggggaggagggactcggctgtgtgccgcccgggagcggctcccgtccgctaggtggcagccggagccagcgattcctgcaagccccgccgcgggacccgctcctcccgcctgcccctcctcccgcgaccaatcaccttcaggattcaggaatcggggtctcggtctctctctctctctctctctctctctctctctctctctctctctctctctctctctctctctctccccctctccctctccctctccctc

SEQ ID NO: 44588 - DNA, 893 bp, Homo sapiens
tttaaaaacttttcagaagaaatcaaaataatttccctctaattctccttttgcccatcgctaggcgttctccccctcgtcatcccttccccctctggggtgtgagcgtaagtgtgtgtgtgtgtatgtgtgtgtgtgtgtgaccatagacgacccatactaatcaggtctcagagtaaatagcagcgcagggcgatctcaatgtaaattgcgcttgtcagaaacacacccccctccctcactttctctcctcctccccacaccatcccagtctgtaggtagctaagcgggggggggagaaagaaagcaaaagaggaggggggaggggctctccaaccaatggcgtgcaggaggcttggctaaccttagcctcccattttctctccccccgattcagggctctgaccagtcagtcgcctttgattatcagttgccagcagcccttctcttggctccttgacacgagctccatataaggcagcgatctccatagaaacgtgtcagtttcaatagtagtgtcaaagttcactatatacagacattcgcgcagatccccctttcggaaacattgctctgcgagtcctcccgtttaaacgcattcaatttttgggtctctctctctctctctctctctcttcttctcttctctctctctctctctctcctctctctctctcctctttctcccccctctctccctcctctcctctctctctcctctcttctctgaacctctcttctctttctcttttcttacatattctactagttgttttccccttcttcttctcctttctctcctttttctccctcctccttgtctcttttactccattcctgcagaagagagagggctaaacttaaagaaaaaaaaaaggaggaggaggaggagg

SEQ ID NO: 44589 - DNA, 922 bp, Homo sapiens
ttctctgggataaactccattgcttcgtttctctgggataaatgcaataatgcaattgctaggttgtacgttagttgcatgtttagttcatgtttagtttttcaagaaactggcccactatttccaggtccattgtgccactttatattccttccagcaatctatgagcaatccagtttctctgtatctttgccagtaataagtcttgaagttaggtagactgatttttcatattttattcttctttttaaaaattgttttaagtattctagatcctttgcctttacatagaaatttagaataattttgtctatatccactgtgccgtaaaggattaaccttgcccaaagagaggtctggcctttgccctcagcacctggggagtaatctcttagcccttggaatgttctgcctgatatgaatggcttcctttatttcgacctttggactgtattgcatcagcttgacctttggagggtctggaggctaaggtttgccatgtgggtggttaacatgtcaaagtaactgaatcccaataaaaactctggataccaagcctccaatgaacttcccagatttagaattctaaatatattctcaaacattgttgctggaagaagacagaggtgtccatgattcaactgagagaggacaattggaaagtcatgcttggaactttcctaaacattgccatatgtgacacttccttagctaatgttaattggtatcttttcactgtagtaagctgtaactgaatgtaacagttttcagtgagctctatgagtgctggcaaattaccaaacctgaaggtggtcttagagatgcccaaacttacagttgatgttagaagtgagggaggctttgggacttcacaattttacatctacaaaaaaatcttgctggcactttgacaggaattctg

SEQ ID NO: 44590 - DNA, 1660 bp, Homo sapiens
caaacgatgtcatgtactacattaaaaaatcgcactgatattttgataaatatacaatgcacttgtagataaaaaccagagaatttttccctctacagcttttttgaggatttgggagaaatggacaaatgcaacaacattgcatgtcattaaatacagtatatccaaacacaacgagtttcttggcccaacagatatagaccctggagcactataagaatatgttaaacacctggatgagggaaagagaagactgcttccaaaacatacttactttatttcaaagtcaaaagtattcaacacttaattcatactgcatcccagagaaacgtcccacccgcgcccatgcatgttacaagttttgagagcattttataactgcactttaatccctctgcagtgaatgacttctggtaaagcgctggcagttaataatactttttgtagaaaaaaaaattaatacaacaaccacaatacctccactcgcaagaaagcggaggagggcccattactctgtctccagggactcccagaatcccgtacgccccgacataaggaaagtcatccagggaacacacacgtcgctcccgcctagagagtggaaatggaacatgggacctgcccatcagcggaggcccagacacaagtcagaggtgtccgcagggaatgcagcgtggttccagacagcctcggtccccagggccagcgaccaccgcctgagaccgacccaggccagccccctcctgatttcgacccgggcctgcccccggagctcacatccccgcaaacggcagtcctacctgagctctgcccccagccacagggctgagggggcaggcgggaggaggcgtggccttccagttcgccagtcgaactccctcgtgcggttgttatgactttccctctcgggatccgcgccccgaccaagttcgagttgcacttccggggtcttcaggagattgatacgtcattacgcacttgacggcagcggcggcgacaacccggaaacgggcggggcgcgggccctgggtaggttcctgtggtattaggtggactggagaaagaggcccgcgtgaattaagtgtagttctcttatgcactggcggactctggtcgcccttccttgtgaaggctgcctgggtagccgtagaggacgaggccactctaaagcctcgttttcccagcggaattttaactattctaaggatgtccttacagccagttccccactccgctactcagagtgtgtcagactttaccctgtccattcaactccagaaaaaccgggaggtctagattcggaagattaaatttacctttgaattaggacatgtaaaataggaagttaatattagcatcctaatgacaaaagttttctcgttatcatacttgactcaaatgggaatcttacggatattaatgttttttccagaaacaggtttgaaaggtatttcaaggataaatctggggaaagggatggaagcaactgatttttaatttttagatagtactctcagagcatttatttagtccaaaactgttaatttaatgaattaggctaaactagacgctggggtaacaaagctgagttagataccctctcctctgaggcagctaaagagaaggaaagtctggtggctgacaagtaaaccaacagtta

SEQ ID NO: 44591 - DNA, 1761 bp, Homo sapiens
ctttaattttctatctggtgtgtgtagataccattttaaaatgacttacgtatcatttaaaaaaactttccttaaaatagaaataaatagcatagtgaaaaaacttagcaagagagtaaaaggcttttactcatacagataaacattttcagtggtatctgatttcacatcttttgcttccattacagctgagcagagccccataaatgagaagccacgaagactgaggttacacagtgatccacagttgccacaaaactgagcagtgagtgaaaccctggtgtcacacatgctatttaccatgatgggctgaactcctggtccactgagcagcatatttagttatacatacccatactgtaggtagccctatattttgaaatgacagtcttgatttaaattttgctttctgaaaatgtacttcaaagatagagaattattagaccagggcagagaagatagaagtatagtccaggaagaatacttttgctattcatgtatttagatatcagtgtttttttaaaaagggacacacaaataatattatagagatttaaggtgtcagtagtgagaacataagaactatttgggactgagaagtatataatactaagggattgtgtgaataatacttagattcacttataaggcaatacgtttttttaacaaaacaagaaggtgggaatgctgcaaacgtctcaatgttgggcattcttataactcttgggtatgttgcccaatagtattacaatcataaagctcattgagtcaaggtaatgaaattcagggaacattgaatatatgcaatgtttgtttacaaaatcatcatgtggtagaataacaataaaacacaaacacgtaggtattctaaaaatgaaataccattagtaactccaaagttagtaaagggtgtgggcttaccatgaaagccatataattatatttctcagtttcacatcaaaaagcaaatattggagcaataatgacactccttagaaattacttgaatgaatgcttctggaatcctgaacttcttatagtttcccgagctcaaatgctgtttcatacctttttctcatgcttttcttccctgtgccttgaacacctttgcttctgttttttacctaattccttcttgtccatctagactgagttctaaccattttgtttttggaaagtcttgactgacttcacaggctgggttagggatgcctctccatccaaaagcattccaagcatatttccaataaccatgatagttcaaaggatttgccccactgtaagtgatgtgagggcaaagaatgtgtatacctttttatcttttatttccctgctttggaacagtgtttgtcacttagtgggtatccaaggaatgactgttgaactaaaccaaactgcagtagcaaacattccagaactgtgaggaaaagggagattgccaacataccacagagttgatttcatgctatgattaaattggagtgccttgtccatgaacttactccatgtgtcctgcctctaccctctaatttatgctccttcctcctcactgcatatttcttcccaatgtcacctgctaacatcctacttatctgcttccagatctccatcaaatttcttgttctccatgaatgtattttccaactggatattactcctctgcccttaacccacagatttttgttgttgttgttgttccttcctatgacatttaccttattcagctttggggtcttatttatgtgcttatctcgtctctat

SEQ ID NO: 44592 - DNA, 4286 bp, Homo sapiens
tttgtgatggttaatgataattgatttttaacaatccatattacttattgaatagtacattcttaccttagcatttcaccacgagcgaagccaaaaagtacaatcaacacaatatatcaacagtccctccctctctctctctctctgcctgcattcccatgtttgtcttcccccatttctttcttttttcctgaggcagagaaattacatagcttaggtaagcatgacatttaaatgggagggaatatgatcaacgttagtgcaagattaaaattctataactagatttatcttcttttagaatgaaatatctaagaaactgtggcacatttgtgccactatataacataaagaaagttgaacaatttcttcaatttgcagaacttttggtttctacctttgtcatctaagttctgaacagtttattttaatgtattccttttgtgtatgtaaaagttgttctttagtttttctgttaaaacaacagaatgcactctcatattaacacttttataacctaggaaaaatgaatggaatgcctgtctgaagtatacttctaactttcattttgtaatactgacaatttgtatctttgaaggagacttggagtgacagcactatagtaaccccgcttcatcggggccaatctatagaaaatgtttgaaatcagtggaatttctaagttttcaaaaggtctacacaggtgtcaataaatatgagaaacggtctcagagttctgtgtaaatgaataggttgtatgtattttaaggcagtcttacaggaacacattgagagatctggcattctgaaaatcaaacatatgtcatatcaacattcctagtacaaagtattttgttactgtttctgcactctaaatagccctgtgtaaaggcacatcattgaaccaaagcatatggaggcagctattcagttatgctgagctatgctgcaatatcattttgctactgccttactcacctatttctacacgtttgccaatggaaatttctgctctagaaattataccatggcaaagagaaaagtaaatacatgaggtttgattccatttctcaaggcatatcaatatgaaacagtgctattgtctgtttcctgcaactgctgaatcaacaaaacatatgcacctatgccttaaggaaggagtaactctttaaactgccctttttatttacaattacttaattactttattttgccaaaaataaaggtcattaaaatcatcttgaagcttgacttaaatttcagaagtagcctgcaaatagttgtacagtctttaactatgttccatttaacacatttaatagatgtaaaagctcacaagtgatgatataaaggataatttacgcttgcaatgcatttttgtccaattaatagattgcctgtgtgttgcatattttgcatgacaaaagagcagaatattaaactgccattcataatgaaaatgcactttgcaaattaaaagtgccgaaacagaaatttttcaccctgtttaggaaataaacagtccttaaccaattaaactgcattgtaataattctatgatttattgcaagttgtttaactttcaaaactcggctaacccatattaaggtcacaatccatcatgtcttgcttggaaagccagcaaataatggctgttgtattagctgcttttgatgatagtatgaaagaagtattagcacttgtcaacaaaactgcttacaacataacattagcatgcatgggctgctgtacctatttattattctggcagcttcacacatattgttacaagcttataaaacattttgtcgggtggaaaccgaatgtacactgtttggttttctgatagactggcagcataaatgtctgggctgacttagtttagtttaagtgtaaatagagacacaaattcttcaacctgttctcttattgatactgaaaagtgctgaattattcagcatccaactcttctgtttgtgtctatcacagttatcaattacccatcagtcttcttgtcaaaacagaatggattaatctggctgaaaataagacaaataaatggatactataacaggggtgtggggttgccagactgtcaaagggaaatccaggcagtgacatttgccgtcaaaaatgggatctctggcttaagtgagcaaatgattcccttcgtgagccaagaatgcacttagctcaccgtaagtaaattaatctgccttcttcaactgctaatgcattagcactgaggtaatagttccattgccgaaattcctttatgtttcaataattttggtcattgctattgtttctcacaggaaaggcagatacattcagatactttatctcggtaaataaaaggttgcctggtaaataaatgaatccatttaacaatgaagttattgctgatagttttgtgccacttcatagctctcagctgatgtgacaccaagtaactctttgcacagatggctggtggaatccatccagcatctgcaaagtccatccctgttttctttcccaaacattttatttggaaatcttgtttggcagacttcctgagactctgcctggctgttcaaagtacatatttccaatctatctcatttggcccttctataaaaaaagaaccagcaaagtgccttctgatttggcacaaaaatttcagccacagactgaagcaagttttaggttcctggccaaaaatttacaagaatttcatcttagatgcttccatactggactgttttacatagtcatcattaacatctgaagccttcacatcacgacaggatcaaagcctcccaatctgtatcatctgatagcttcactttgccaaaagttccctcttgttcttattttcccagacatttcgtgtcctaacaattgcagacattgtacttactgcggggtggtgagtaatttaaggacagctacctgctggaaaatggttccattcacttgatgatgaatgaacagattactttagaatgaatcatcatcttttttctttttccagtagattgtgtaaagaattttaagcatttaaaaataaaatacccttcctacatttggggagtttcaaagaggtcgtactaaaacttgaattctaggtacaacttctgctatcctcttaaaagacttagacagactggaaatttccatctcacattcccagaacattatctcaaatttctcctcaatgtaaatcaggttcccagaacttcaacattaaaaagaaatgtactaattggcccagtcacaatttacttttcatttgctttgtatataatcccaaggttacttcatagaagcactgcttgaaataaggcagtgtttttattaccagtagattgttttactttatctctctctcattcttcctttttaaagcaaataactcatttatatggaaagagagcattctacaaaattttgcatggcctaaaagtgttttcaaagttttaatttttttctagaattaattctttgctacactagaaactaagttgattgacaggtatgtataatgaacttgcttccaaattccagatgttgtttcccactcttgaggaacatttcaaagtatacggttgccatttcagattcaacttgtccccatctaaacattctctttctctggttccctttttccaaaatcccaattagttactaaatcctgcagtctgcctctataatatctcttctgttattctcctttccattaccactatcagcatgctttcattccccgctgattcatttggatattcatgcatgcaccagctcacttattcaacaattctttgagcacctaacgtgagtggtctctctgcttctagtccttctaacactcttcccaccccagacctcagccctcattctgaaatgccttccacctatcctacccattaaatatcagttcaaatgacatctccttgtatatttttctttccttccttcctaccttccttccttcctttttttctttccttctttcctttcttccttccttccttcttcctttcctttccttttgctttttcctttttcttcttgctctgttgcccaggctggagtgcagtgctgccatctcggctcactgcaacctctgcctccagggttcaagtgattcttctgcctcagccacccaagtagctgggattacaggtgcctgccaccacacctggctaatttttgtatttttagtagagattaggttttgctatgttgtctggtctcaaactcctgacctcaagtgattcacctgccttggcctctcaaagtgc

SEQ ID NO: 44593 - DNA, 2037 bp, Homo sapiens
gccccacccatgacctactgaatcagaatctacagttttaaccagatccccaggtaatatgtttgcacttaaagacaagaagccttattttacataatccatatcccactacctcccctagaagcaccacccccacctcaccctcatgaagtctcaaaagaatctaaatggtaactctttctgggactaataattttatggagcccactgatacctctaaactagttcatcagcattcttggataggatctttggataggatcccatatggtgacacacaaatatggttcttagtaaagaaagtgacaaaaaaaaaatagaacaagtcagagtcctgtagtgcagacatcattactggcaaaagcagcctatgacatcattgttatgttggctaacaatgggttattttaggtcacctccttcaaggcagttattaaattgcactttggtcacacttgcaaaacaaaacacatggctgggtatctgtaatcccagcactttgggaagcaaaggtgggaggattgcttgaggccaggagtttgagaccagcctgggcaacatagcaagaccccatttctaataataaagaactaaaagaaaaacaataacaggaaaatacacacacatacccacacaccatacacaacaaaacaccaagcttctgccataaaatgccttatattacctgaaagaccaagaaaatattaactatatggtaagataattttaagttgattcattcattttattttattttattttattttttgagatggagtctcgctccatagcccaggctggagtgcagtggcgcaatctcggttcactgcaagctccaccttccgggttgacatcctgcctcagcctcccgagtagctaggactacaggcgcctgccaccacacctggctaattttttatatttttagtagagatggggtttcaccgtgttagccaggatggtctcgatctcctgacctcgtgatccgccagcctcagcctcccaaagtgctgggattacaggcgtgagccaccgtgcccggcgattcattcattttaaggcaacagttacttgctaatggtagtagccttttagtcagaattttctctagatatttttctttgttatctttaggcactttgtcatgaggttaaaaagtacaaaaggtactatgaaaattatctactacttaggtttctgatagttcccatgaattgtgcaatattgctatttggtaaatgttctgtggctctgcttggaacatgtggtgctgtgtgaatggaaacagaatttgaaagccagctgcctgggtcaaatccttctttgtcatttactagttgtgcaacttggatttctctgtgtttcagtttcctcatctctaaaagggaaatgacaatcataccacacagagctgttacgaggtttcaataagtaaacacatttaaactacttagaaacaatgtctggaacatgttaaatagtatgcatttactagtttgctgctgctattatattacaaattaatattatcagaagtcaagaagttttactggcaattattcttggggcgataggcaaaggaaagaatgttagtcacacttcattcaaatgtcactagcaggaaaggttacctgctaacaattgggaaattgccaaatatttgttcctttgatgacacatgtaagaaacctgtaaggccatgtggcctcagcaagataattaccagaacaattgccttgggtgtcaaaagtcaataattcaaaatagtgtctcacaattttaaaatcttctgtgatcatttgtagttgagagtttcttccctgcagatttaagatgacctaacttaaaaccaagaaacattaccttctcctgccaactgaactgtactcagtgttaaaagccacctaccatgtgaaatcagtttacttttattaagttttagcaatgtaatcattccttcaaaatgctacatattttatacagagaggattattttacatggcaaaaacataattccacttcctaaaagtttgcagc

SEQ ID NO: 44594 - DNA, 1303 bp, Homo sapiens
acacatacttactgatcactgctttccaaaaatgcatctaatgcccaagcatgaaattacaagcttgttctcttatgtctcagccatgaaaacaaagaccgttcttctcatccaattcaaatggcgggaggaaccttcaattaattctaaatcaggaaggaacctccccatctcacttcctaaatgtttgtaaaagatgtcttcttcagccaacctcctgccttccaggcacggcaccccagaactacggaaacagtactcaggaatcaagagtggccaaacgctgccaatgggagataggaaactcgttgatcattggtagagaaactcggcacaacgccgagtcacggtacacggtgtcttcggcctcgcccagggacacttggtgacccgaggtcgagttccaagtcggagacagattttgcgagtggataagacggtaagccgggatcccagggccttctccagctgcactgggtgtcaagcgccacggggtttgatggggactccttctggttccaccctcgcccactcacttctcgggctggccataatgctgcacagagccccggccagccattaatatcaggcgcaggagaaaacccagtaaaatcacttaccagtcttccacctccggtgctgatctagcaagagcctgacccgctggccagactcaagctctgcaccaggtattaccaccctggcgacggctccggagcgtcactgacaaccacccggaaatggtactatcgcttccggggctgcctagcgcgcggcgggaaattgtttcccagagcccggattcgtgaagcagttgagtgctgcagcggcagtcgtcgcccctgccgccgctgccaccgaaggaagcatcccagacaccgggaaggtaaaggggctcagctaggaagacacagtgtattctgtctctgtggggatgtttcttcgccgggcggtacctccgaagtttctgcctcccggctgtgaggctaggaaggaagcggctggggtgagcggcagcggtgtctggctctcgcgctttctccagctgcagttcgttccagctctcccgacttcgcgctcggcgccggagttggtgggctgcagctgcagaccccgcgacgcttcgcccgtgccgctgcggggactgccaccgagcgcccctctgcagtactgggctgagccacttcccccgcttctgcttgcgcagctctgccgctcggcccgccgcctggaaggcgctaggccccccgcgtctctcgtttccatagaacccatggggacgcctcatcctgataccagaatt

SEQ ID NO: 44595 - DNA, 599 bp, Homo sapiens
aggcatcacttactaagtttttttgactatgaggcctacttttcttgagtgcatcttttaggaccaacaatccttggatctctctttgggaaatgttacttccttatatttcattatagggaaattacacgttttcaagattatattattattgactttacagtggatttaaataattttattgtaatagaactcccaggaaatccaagtcactaatatgtggtatgtggttaatcttcaataaacatactatacaaaaaggatttagtttgttggttcgaaagactcaaaaaaatcaatagcttcatatgccagtgctgttttgttgcaatattgcataaaaccacaagatggcaatagtacttatcaaattaaagagaggcctgtggttctgctattgaaaccaaaggttagagcgccttgcagggcacactttgaagttcccaggcattttctggcagcatatgctttgttgttattatctggaccattactttcattgacatactttttatgacgataaatgaattgaaaacaagtcaaaaagtacgaaagatgaatctagaaagtattcgccctacagtaaaattcagattttg

SEQ ID NO: 44596 - DNA, 1772 bp, Homo sapiens
tggcacgcagcagatgctcagtaaatgcttagtataacgctcagcacctaagtgccatgtgagtattaaataaacaaatctgttccttactacaattatcttaggcaaaaaaaaacctgccagatattagtattcagttgacttaagtaagtagtataactcctcttttaactgtcagaatattaaaactactagtgtgatgtgcaaattatatacccgaaactagatacagaaattggaatttggctttgggacagaaatctgcttcttccagaactctccaaaggaattcaacagtcaaaagagaccggtttttattctgcagcaaaacaatgatattctgaacctacgtcaactaactgaacatgtcacacagcccatttccccctccagtttcgcttatctcctttgctctctgaaggcaaggaacagctatgctttcccctgcctacagcctgaaacttcttactaggccccgctcctcgccccatgggagcacagtaaatcctgactgcacggggtaagagaagcaataagatgagacaggctagagatttccctgggaaggtattcgggggggtctaaggcattcacggcgcacctgaggcggtccacccagaggccccacaaggcaccgccctattcaacttaagtgacagccgcgccgccacctcatcgccgcccagttcacgctctcgccgaacactcagccacgcttgcgcggcccaaaatgaacagccccggccccgatcctttctttctctaagtaccatttcaatcgcctttaggatcccttgtgcaaaaccgacagaaatccaaacccacctggagcagatgctcctcttctacaaacgccgaggctgcaatgagagcgcatgcgcctttcccaggactcattcacgtgactggaagtggctgggttctgatttgctcggtatttgattaaaaggtcttaacgtgggtaaaagcgggaatttctctgttgcgcatgtgcgcgctctccgcctgataggagttgtagttctgcgggtgaagctcggcgttactatcaagcaaccaaactgcaagctttgggagttgttcgctgtccctgccctgctctgctagggagagaacgccagagggaggcggctggcccggcggcaggctctcagaaccgctaccggcgatgctactgctgtgggtgtcggtggtcgcagccttggcgctggcggtactggcccccggagcaggggagcagaggcggagagcagccaaagcgcccaatgtggtgctggtcgtgagcgactccttcgtaagtaccgcgaggcaggggaggggcgccccgctggggatcggcgacctcaccgccgccgcctgtgctgcaggctttggggagcagaacctgagacattttcaaacaccttttaccccgatgcaaagaaagaaatacattttatgtgaggccccgtgtactcacacgtacaccacatacctatgcaaacatgtaaaacaatagtgaaacactgaaaacatctttgcagatcttttttttttaatactgacctcgattcgctaaattattttaccacgactaatgaactttcagtccatacccccgtttggtttaattgtgtggtaaaataacattctgcatctccataaaagcgtgttagctttccaaaagtcattttccagttcacctcaagtttgcaggaattcatgtttgggtgagaagtgaagaaagtttatttttattacccaggtctgtgataatcctgttagtgctgatt

SEQ ID NO: 44597 - DNA, 456 bp, Homo sapiens
aaagccatcaaaaatgaaataatggcctttgcagcaacatgaatggaactggaggccattatcctaagcaaattaacacaataacagaaaaccaaataccggatgttctcacttataagtgagaactaaacattggttactcatggacgtaaaaatgccaacaagaaacactggggactactagaagggagagggagggagggagggggccagagggccagaggttgataaactgttgggcactatgcccagtacctgggtgatgcaatcattcctatcccaaacctcaacatcaagtaatatacccagggaacaaacctgcacatgtacccactgaatgtaaaacgttgaaaaaaaaagtcaattaattttaacaagtgaaatgtgtgaaaattgcccccatgtattaaaaagaaaatgaaggctttaaaactgtacaaattgatgtttttgttt

SEQ ID NO: 44598 - DNA, 1653 bp, Homo sapiens
gggacaaggatggaggatctctttagcccctcaattctgccgccggcgcccaacatttccgtgcccatcttgctgggctggggtctcaacctgaccttggggcaaggagcccctgcctctgggccgcccagccgccgcgtccgcctggtgttcctgggggtcatcctggtggtggcggtggcaggcaacaccacagtgctgtgccgcctgtgcggcggcggcgggccctgggcgggccccaagcgtcgcaagatggacttcctgctggtgcagctggccctggcggacctgtacgcgtgcgggggcacggcgctgtcacagctggcctgggaactgctgggcgagccccgcgcggccacgggggacctggcgtgccgcttcctgcagctgctgcaggcatccgggcggggcgcctcggcccacctcgtggtgctcatcgccctcgagcgccggcgcgcggtgcgtcttccgcacggccggccgctgcccgcgcgtgccctcgccgccctgggctggctgctggcactgctgctggcgctgcccccggccttcgtggtgcgcggggactccccctcgccgctgccgccgccgccgccgccaacgtccctgcagccaggcgcgcccccggccgcccgcgcctggccgggggagcgtcgctgccacgggatcttcgcgcccctgccgcgctggcacctgcaggtctacgcgttctacgaggccgtcgcgggcttcgtcgcgcctgttacggtcctgggcgtcgcttgcggccacctactctccgtctggtggcggcaccggccgcaggcccccgcggctgcagcgccctggtcggcgagcccaggtcgagcccctgcgcccagcgcgctgccccgcgccaaggtgcagagcctgaagatgagcctgctgctggcgctgctgttcgtgggctgcgagctgccctactttgccgcccggctggcggccgcgtggtcgtccgggcccgcgggagactgggagggagagggcctgtcggcggcgctgcgcgtggtggcgatggccaacagcgctctcaatcccttcgtctacctcttcttccaggcgggcgactgccggctccggcgacagctgcggaagcggctgggctctctgtgctgcgcgccgcagggaggcgcggaggacgaggaggggccccggggccaccaggcgctctaccgccaacgctggccccaccctcattatcaccatgctcggcgggaaccgctggacgagggcggcttgcgcccaccccctccgcgccccagacccctgccttgctcctgcgaaagtgccttctaggtgcttggtggtcagagacgggtcatctgtcgctaaggcgcaacctccagggaactcgaggcctgccagggtctgtccagatcacaaggggcaggagagtctgtgagagagtgacactgaagttgtccccttcctccactctcctattcccttctcatgtttacatttccctatgctcttccagtttctcttcttccctacagttcctctcatatctccccatttggagacagtgagccactggaaagttgtaaaaacaaaaacagttatttttgcagttttctttcacgcatttatagtgctctggataatgccatttatttttgctgattacccaac

SEQ ID NO: 44599 - DNA, 2121 bp, Homo sapiens
caatggccttgatccacagaagttaaattactttgcttttacacattttacaaaaacattattatcattattcctccctgtcttctttctcctttctgaacaattcagtcctaaagccagtaggtgggacagagcggggaagacacacatgctggctagggggatgagaaggaggagtgaccaaggtggctcacagaggagtgtcagagccctagtgggatagatggcaacatggtgtagtgacatagcacggccagctcaagcccagtgggaagggaatcaaggggcagcctacagaggctcaaagtccagtctctgtgatgtgccttcattacctgaatctaatcaggaggaaacatcagatgaactcaaactgagggatattctacaaaatgaatggcctgtaatcttcaaaaatgcaaatatcataaatgttaaagaaagactaaggagatatctcagactgaagaaagctagagacatgaaaactaaacatacaatcttgattctgaactgaatttgaggattagatggtagtgtgtcagtgttaacttcctgatttggatggttgtattgtggttatgtagaagaatgtccagatttggagaaaatacatactaaagcattagggactgacggggcatcagattggtactatactctcaaatgggcgtttgggaatagagtttccctgtatttttctgtatttttgtgtttgttaccaaattatatataattatatatgtgaggggtaggggtgagagggcgagagcatatgaccatgtgaacacattactagtgtccctcaggacctcaggatcttggaaggccccatgcaaatatgggaacctgaagcttcagtttcatcaatatcactacctctaactgcagcaaacctgactctacccactactgtctgaaaggccaaagtccttaaagacataatttagaccttgtcttagttatacctgctttcttaggtctttgtggcctccctatctctgctaacactcagtgtagcagaatgaatatgttctgaatgttgttgaaggtcaaggagcagcagcttgcacccgaggcccacgtcacctaaagctctctggggtttgcctttgctgggcccacatagctctgttgtgtgtatttgctaagcctggcttggtacaaatggccagtgttttgcttcaggctcaatgtaggttcggtggtatttgctgatcagactctcttctccacacccccacttacgtcagctgtgtatcatttgcttaatgctcaggacttggagtcccaccaggaagataaaaatcagcagtgaacaagaagtgtttcagctagtcaaatctccaaccttcactcacttctcctggtatgctcagcttagctcctttcttctttctacagatttgtgtacctgtagagagggtacaatctagtctgtccgctagagaggacagttttaagagagttttgatacataagtttaattcaggaggctgttagtccctttggctgcatgtttaagccaccccaattgagacgttcataattaaataaagctcacaccttgatctctttctgtgtctctcaactggttccaaactcaggcagaaaataaaagaaaggtgttattgggccctctcaaagtccaacacaaataaaagatgatggtaccttcagggtggtgatagcagataaggtaagaagcggtgtgatttcagataaattttaggaagaattggcaggactcagtgctggattagatatggggggatatcaagggtccctaagacccccttcacatttggagattcactagattctgggactcattacagttacgctattacagaaacgtagtaaggatacacagctggattgtaaagaaaaagactcaggcagagcatggaagacttcgtgtgcaggattcctaagtgttctccctttcgcgaggggtcacacagactgcattcttcctccagaaatgaaaatgtagaaacatgcctgcaatgtttttgccagggaaagactgagcctcagcagccagagtttttactggacattggtcacaggcacctctgcctagcaggtaccaagttctagaatctcagaaggaaaagc

SEQ ID NO: 44600 - DNA, 1288 bp, Homo sapiens
ccttatacatgggttaccagcatcgcgacgaccttctgcaaatatttttatagggtaaataactgaatgaagtcgctgggcgcatctaaaatttgaataaatgtaatgagatcaacaaacaactaaaaagtaaactgatgctatccacatttgtcaagtacacgagtatgcctgccagtttgaaggtgctggcgcggcgctgttggccagagatctctatcaaccagggtcatctgccggcaatgccatagaggcggtcccgggggcgggccttcttgggtcacgtggacggcctcgccccgcccccgtcgaggcgccgcgcacgtctggagctctggctcgtgcagtagcgtcacgcggaggcggagcgaggactcggggacagtaagttctgttctcgccgcgcagggggcgggctggcgggaccagctgcttccggctgggctgcgggcgtggactcctcattccggctgtggccgcgccgctgcggggcctgaggccctcttgggttttggttcagcgttagttaacggttaacccgccaaggcgggcttccgcccaggcacaggagactcaccgagcttgttcaccttgaaacttgggccacacctgagacctgccacctaaggggggtacgcgggtcgtttttaacaagctttcatggcatttgtgccatgaaagctctaaagtatagaagctgctccagggcttccgcagccccggccgtcctggagatactcgcctcctggagtctgtgtcgagaatttgcagcacctggacagccacgtgcagtctcagaactgcaggcggtctttaccgaaatgttaaacacaacttgaagttaggcaggataactgccagagctggatggaccttagaggtgccagctaacgcgctgtgagcgttttctgcggttaggcctgctctaaacatttgacatgtgttaaagcatttatgtgctttacccacacccctatgtggcgggcccttcttaaagtaaaagaaactgcagcacagcgaagttaagcaacttgccccaaatcacgcagaactgggatgcaaacccaggtctagctcactcgtgatcacaattcaacatcatacgatggtgctgatttccagagcagctctgtgactttatataaaattattgggcaagcgttcaattgtaaacattcgtgaacatagctgttgcacattagcgttcctttttttttttaattcaggaccatctttggtgacaaatataaatatcaatactatatatatcaccaatatacatatttgc

SEQ ID NO: 44601 - DNA, 1582 bp, Homo sapiens
tacattgtccaaaaccaccctgacgagagttacaaggggagtcataggggaagttctaactctcagacaaatgttgcaggaaacactgactgctacttatagagaggtccaggaaataaagtattcctgttaagtttggaaaagctgcacaaatgtgtctttacttagcaactcacaacacctttgaatacaggaaagactcctgactttaaagaaagctacctgactttattaaccccagtgttaacattctgtagaacattgttcttaaacaagcttttaatccggtggtcctgtaaaggctcaaatgtcctaatccctttgccaacgtggaggagtactgtatgtcttcaagagcccaggagttctatctaggaaatatcctctttccccgggtctagattataccagccaagttagcctcatggcaggcccatgtgggacctacagaacttcctgatatttatgaggtttatagtttaaaccccaaattggagtctaacttagagggtggggtaaggaagaaactttacataggtaagtttctgatccttatcctgaaaaaagaacacgagttcactgggatccaccttacagcccaggcattgtaaacgctgaggattttcttcactttggtccctatcttattctataccatgccgcagtatgcatacaaagtaaaaacagtcaactctaatgccattatagggatgagtctatcacaggaagagctcttggtcctgtggctctgcattggcctgccagaatcaacaatgatgtctgggagctgacgtgtcttggctgaagtcagcattcaaggcgattatctaggtcactgcagcctagagcagctgcggactcaactcaggcaggcaactcacaaggctaagcagatgcaccattctgtaaatactggcactggagatgttgaaaactaccaggaaattctctactaagagttttccattcctgaggctttttatagaactagccacaattctatcactgcagtctcattcctgcagaacctggaggggtttgaggaataattttattcagcatccatagagccaagtacaaaagaaccctcttctaacaaggtggcaagctggaaaggcttgaccccaaccatctgtgcacatgtctcaggccattagaatcgctttaggccattcctgccggttgggtctttgggaggcttctatttggcacaacatttcaatacgctatgacatattaagcatgctctagagctgaacatccaatcagaaaggcccgggtggatggcagagggagctcctgagccagtgtccattcttcaccttgagaagaacattaatggatgctgcatttcagagctccccatgtcgaagagctgaaacactattctagttattgtttgtgtcctaatgaaaatgttcctctatttctttgtttccaaaggaagtcacctgcctcactggtattctcagccatataatagagagttttggtagagctatttaaggtgctccagctacaaatgcattttttcatcatttgtcatccacaaaacagtgaccagacagaacacatccagaag

SEQ ID NO: 44602 - DNA, 981 bp, Homo sapiens
taagttaaccaggccacttaccttcttacagctaagttttcctagagtgatatctttcatgcatccacaaagcatatccccttgcatggtccttccagctttcaccccttttacttccccacacaaagctccatctgagacaggcagtttgacaattcttaaaggaattcatgctggaatccactctgggtaagctgaactctgtctgatgcggcttctcatactactgtactttgctctcagcacactctggtaccatggatgcactccatttacagaccaatccattgacctctgccacatctcatacattccggttgcacctttgactctccaggccattgtcctcatagtcagttctgtttctgtcctcactgagcctttgagatttgagagacgttgtttactacaacttagttttccctcactggcaattctgattatcaaccctagctactgtatactccccacgtaaagcttcttcctaaccccagcccccaaggaccctggaacctctgacctgggactgttctcacttgtctcactccagccatacagaactacttatgttctccaaataagtcatgttctcgctcacctcagtatcttcatatatactgttcttttcttggaatgattctcctacttctcatctagctaattcctactccaagactcagatacagtatcctatctctagaatgtctacatggaccactctttggaatgctatgtctcttcttgatgtttctgtagtgcactttgcatactttgatcatccacttgctacatcctactgacactgcttatttgcctgtgagccccacagtccatagggcaagggtgagacatctctgagtccctggtacctaatctagtgattttgcatatcaggttttcaataactttttttttgtttttgagatggagtttcgctcttgttgcccagactggagtgcagtggcacgatcttggctcact

SEQ ID NO: 44603 - DNA, 2026 bp, Homo sapiens
taacttcctttaaaaacgatcacactaaaaatcccagcatttaaaatcctgaagttttcggtaaaatacgctaaatatagcttgaaatagtaaataatccccccaaggcgacattagcaaattaattggtgtgtgaacaaagaactctttctgcagcagcatgaatgttgcctttattttttctcacaagtatgattttagaaaacagctgtagcgcatgttgacaaatgagaaagcggcagacgtggtaaagcactttcggtcaaggccaagagggggggaaatcgggttgctggggcggcactcgggctggaatccctagcttccctaacctcctttttccagtccggagtgagcgggggccccatcgccccacccccctttcctggctctggttacggccttgcgagttgaacaaacttgctgcaggcggattggcggctgggagctctcgggctggggcgttgtatttattaatttatattccgcggcgccccgcgcgggcggctcctttgtgtccagccgccgccaccggagctcccggggcctccgcggggagcgcgtcccccgcatccgcccgacccccggggctggcacgtgctgcgcccggtccgctgagggggcggaggccccgatctccccgaccccccttctctgcttagaggaggaggagcagcggcagcggcagcaggaggcgacagctgccagccgaggaggcgcggcggagaggggactgcggtcagctgcgtccacttggggctgtgcggcggtcccgcgcccggcgatgttcccgggcactccctgagtagcggcagcttatcccccgcccgctagcccgccctggtccccggctcgctcgctggctggcgcggccccggccccgctctgcgtcggccccgccgcggtggaggcgcgcgagggggacgcggccggggatgagcggattgcgggtgaactcgccgcccgggggccccgcgaagccgtgagccgctgcttttctccgagtcgccgccctgcccttggatttgagatcatgtacgtacgcgccgccgtcctgccattgtctctctccagcgcgtgccgtgcgccccagggacaggggctggtgcccatcctcgccgcgcgctgtcccccgcacttcctgttccgaggagagacccgcgcgctgaccgtgcttcccttctcccctcgccccctctgtccgtgcaggtccatccacatcgtggcgctggggaacgagggggacacattccaccaggacaaccggccgtcggggcttatccgcacttacctggggagaagccctctggtctccggggacgagagcagcttgttgctgaacgcggccagcacggtcgcgcgtccggtgttcaccgagtatcaggccagtgcgtttgggaatgtcaagctggtggtccacgactgtcccgtctgggtaaggaagagcagctgctccgcgctgaggctgaagaagcttttctttccttttttttccccctcccccttctgcccacttccgtgagtgtggagtgtccgcgttacatgggtcaaatttttaaacatttttgagaaaatctttggtcctttgtttcactgggcagggaacagccctgtcagagaacactcttaggaagatagaaggccccagtgggaatgtggagcacttactggtacacttcacgactgtgggttgacccttggtaggcagcagacagttgaatgtgccaactccaagggacggggtcactaagtttcatcagcaaaaagcagtgtttttttatgtctaccctatgggtgatagtgtaatattggtgttctaaaaatacatccctctcaaagctcaacacaggcaaaaatacttttcactgggacagttcagaaatagttcctctggaaagcggaggaaaagacagggactgggagttaattttaaatgactcatttatagcactattaattgatctctgaaaacttaattttaataatgcaaatactctttatgtgttagccatttgtcttagtgact

SEQ ID NO: 44604 - DNA, 656 bp, Homo sapiens
aagttaagaagcagcttttctgtggagagtaagaataattgtgtacaaagtagaggaatacccaattatgtgacaacctttatgtaatacagatttgtttaaagttaaaaaagaatgaattgtcagataccttcagttaggcaagaaagatcgaaggagctgttttccagtgaaaatctgagtagaactttagatgggcaattactaaaaggaagatataatctaatttaatagtagaattgtgtagcagcgaacaatagtcatttacttttaaaaatatttcctcagaaagatgcacattacttttaactttggtcatctgccaagacagggaaatggaaactttccaatgtaccttccgacaagccacggccagccctgtgtgcagtgtgagcctgggacgctgaaagtagggcagcaagagtgaccttgagatacagaaaaacaactgggaaaaaagctaacaagaggacacagactttatatcatgctttcgtcattttagagagacctataactggctctaagccccttatatgatcacaccttgatttatttgttgcctaaataaagatccaaagtgtctatctaaagacaactttcataaattactcattataggtaggacacgcctagtcagggataaagctcctggt

SEQ ID NO: 44605 - DNA, 762 bp, Homo sapiens
gtatgtaggagatattggtgtgcctcatttatccttgcagaatgccttttgttttcatgtctcaccttattagcaatcactgccgtatgtgtacatgcttcttctgggcctcttgtaagctcggagtcttttgttttcaataattatatcattactgattttagagaacgggggtgggggagttacataattaagttaattttaagtaactgcagttacagaggccctaaattatgaatcagagccaggtctgtaaataaactaggactactgtgttgaaatctacttcccaaacccccagatgtgctcacagtcaaaaacctgccaaatccttattcccactttctttcattcctggaagcagaaagcttattcagatgggccatcctaccgttggccattctgccattccatccactgcccgagacagtttcagcacttgtggtagttatggcacactcttgtgtactcaacttgtggtaagccgagccctctaggtttttttcacaggaatatatttgttcaatcactacagagtgtcagtacttcttgaactattatctggcatccaacatgtctatacctatcaactttgacgtccagggttacaaaagcatgacaacttttatctccatccacattgctaaaatggagccacatgatggggcaaattccagatctgtgacagctgaatgcttgcctccaagctgaaacgaattcattcatcaacacttctgtttatagaagggaatttatttgaag

SEQ ID NO: 44606 - DNA, 1517 bp, Homo sapiens
aggtgtttgcatgaagtccataagctggtgaggcctgaggaaatggaagtattagttattatttcaatatcaccatttattgtgctcttactgaggggcagacattctgcgtacatgacttccttcagaagagctgatatggcacaggaaagtggtctggtgggctggttgagcatgtgatgaagccagactgcacaggcaaattcacatcccagctccaccccttactgtgcgacctctgacaggtaaagtgacctctctctggactttatctgctcattataacatgcagctaatggactattaaccccatagtgtcactgggaggagtaaacgaggtcatacgcattcagtgctgaaaccagtgccttgcacagagttagcactctgcaagtataaccactcttattatctctatcattttattgtcccagcaatccagtgaccaggggctttgcatgtctgtattctaaaatgagtacagtgagtaatagcctaaggtcacatggttaataagtggcagagctgggaagaactaggacctgactccaaagctcacataccctactgactagcaaacagcctccacaagcattctaagaaaaatgtacaataatccagcaaacacggaagtcaatgtcctcctttgaggatgctgttgcattgctgtctttgggcaatgtgagggaggctgggcatgttgccgggagacacattcttttaggtgacttgcaaggctgactctccaaggtcaaggagttattaaggtcatcctccctccccactttccttcccacctctgaggaaactattccaaagtctgacctgattaggattcttcaaatgttgtgacttgttaacacaccaaccttgtggttaatatttgacttaacccaaaacagataataggaaaaaacagcatgcttggtaagaagtgtttggggagaatggagagctggttgcatggcccattcagccgcagggaagccagagagtgaggtttctctgttaatcatctttaattttaatttaattagttaatttaattttcattatccttaattcttataataaaaagccagactacagagatttgcttacctacagtcacacagttgggaaatcacctaactgggatttgaattcagtccacgtggcttctaaaccatgaaaggagcaggaattttagattctagggccagttcctgttaggagctgagcagcttaaacattccctcattgaagaaaatatacttcagtaaagttgtagaaaaaggaagaaagagagaagagaggaaagaaagaaaggaggaagagagggcatgagagaaggaagggaggaagaaaagtataggtagctagaaaaatgcgttctgactggttctgtaaccactgtagaccagtgatgtgttcaaagcaaggccagcaaaactggataaaaatggaaaaattttgtttctgggcaaatgcttctcacaccctctcgtgatcttcttctgaatttattacccaccgtg

SEQ ID NO: 44607 - DNA, 692 bp, Homo sapiens
agtttaggaatttaccatcagtttaagaatttaccagttctttctccttaaggggcatctttggacagccttgaattggaagaaatggctgtctggagtctagcccaaagggccaggttggaggaagcagagaaggtggttattaaaatcaacaacattcgcaggagattggatcacttgctttcttcagtaaacagaaagagtagagctttggctgtgaattttttggtggttaatttttgctgtttttttctgccagcccctattgccaatctctctccatgttctttgaaagatcattctttctatccttgcagatcacacggaattactcagcaaggagcagggcagaaaacaggaggttacatgagagtctacacactggccaggaagctgccaagtcccttttccctgcttggcagccagaaccctgaggatgaggcccaacccccagctgtgaagctggagagactgaatggctcaaaagaaaaggtgtccaggaaccaataattgggggatctcccagtgaggcaaccagatctgtacctgttcatttattctttaatttgttcactcaagaaagagcctactatctgccaagcagtcttgatgctgcagatacagcggtaaatagacaccaatccctgacctcaaggcacttatattctaatagtgaagagacagtaaactaa

SEQ ID NO: 44608 - DNA, 1133 bp, Homo sapiens
atgaaaccctgtctctaccaaaaatacaaaaaattaggtgagcctccatggaggtgtgcatctgtggtcccagctactcaggaggctgaggtgggagaatcgcttgaacgtgggaggattgcttgagcccaggaggcagaggttgcagtgagctgagattgtgccactgcactccagcctggatgacagagtaagaccccatctcaaaaaaaagataaatgctatagaaaaaaataaataaattgaaaaagagggatagggaatgctaagtgaaagtgaaagggagagtgttagatagggggatgggggatcccttgctgagaaggtgacatttgaacaaagacgctctcgatggtgaagctatccgttggcaagcctaatctatgcacacaagtcttccagtcagtttttttagtgcctcattctttaaatatttacagatagtcagatctccagacatttgaggaaggctttcaaatgtaaaacagagaaagaaaattggggctcagaggaaaaacaataaaaaagagaaagctgcagtttgctaactttctttctatagccattctccccttcttttgatatagatctcctcgagttttagtgagttttagttaggtaagaggcttcccaggcaggggcccctctgcctagcctaccccgcagctggtggggctatggcattaagttctggctaatgggatgtgagcagaagtggtacataggacccctgggtcagtcatgaacccttggagcaaatgccacctgcctgcctctggaatttttttgataaagaagcttctatcaggcattatatctttgttatagcagcctagcatgttgtgggggaaagaaagatagactgttactgtgtctatgtagaaaaaggaagacataagaaactccattttgatctgtactaagaaaaattcttctgccttgagatgctgttaatctgtaaccctaaccccaaccgtgtgctcgcagaaacatgtgctgtggtgactcaaggtttaatggatttagggctgtgcaggatgtgctttgttaaaaatgtgtttgcagacagtatgcttggtaaaagtcatcaccattctccagtctccagtacccagggacatagtgcactgcgg

SEQ ID NO: 44609 - DNA, 3953 bp, Homo sapiens
tatgcagctggtggtcccactaggcagcaagagcttctctcgtcattgtgtatactccaggacctcagcacacagcagtaggataacacactaagccccctttctgcaccaaaatgctgacttcttattagagagaaggggagagaaacaacctccaatgctttatactcagaacccagagacaaccttgtaagtcaaactaaaactgaaataggatatgtgcttggcctaacactgtgctgtagaattcgtgcatcgtaaaagagaacttagctgagctggtgggacatttctcatcccacctcacagcagaactgatacaggtgatgtggctggcatccctcctgaagcccaggacgcaaagccaaggatgctgaagagagggaagtctttcggatggaggagagcaatttttagagggtcccacagtctattcgtagcaaatgggactctgaggtcacctaatctggtcttgcagctgggatctttgaggactactggggtggtgacttgcccaggatcacacagccagccattataagagccaggccagaactccaggctatgattccctacaatgtggggcctggaaacatccataattaatttagaacaaggggcagataacggtacattagatttttccagtgggaggaattagataaggaagaatgagcaaattagaaaaagaaagcctagagaaaagaatgaagaacatgaatctcatgttaaataacaaacacatcacacccggccctccaccccagcttccacctccagccctgccaactgaaaactgtcatttcctggcagtgcttaaaacaaagactctagataattccccagggactcaccggcaagctgctggtcccacttaccctgccgcacagcagacatcagctgtactccctcttctgccccgtgaagacctttggctgcagtgccgccgctcattcaagtgaccgagatcctctctaaggcgccctcccccacaccccccgccccgcacagccctctggacgccttgaagtacggagccgcagccttatcctaaagaaaggcacagctctgacaagaaaaggcaatccgggagcctttccctagccgtttaaaatgaaactcaccgttcttgctcccgtgagctgttgcaaataatcttgaatctcgttagtgtggttggtggctgtgatatcgacaaattccagaagcccttgtttgatgggcaattgactgaggatctcttgggccctcctgcagtacgggcaggtgggcttgatgaacacaaccaccttcccaggctggattttgcagttcacaaactcttgagccatgccgatgggctgcggtctccccgggaagaatcctcagttgcaggtattgcttggggtattgagccccgacccagccagttggctcctatttaataaggaacctccctggaggcggagtttgcctggtagcttgctcgagttttaaagggacagcttcgaagacatttccatctggtatacttcactagttagcaatgcccaggaatgcaatacttgctatttaatcattggtagctatgaaagacactctgggtatctttgttgtccttggacatttggggagtgcctgcccattggcaatgatcagagtttagtcacctctggggaagcataaagtgcttactcacaaaggggctgaggaggcagtgacttcttagagcaaattcttgttttccctctaggagatacagttgtattttaaaatgcaaacagaatcacttaagaaacagaacacttggaaatctctttagaagaagtgaaattgaaactgtgactttgcactcctcatgaaggttgctctcacagcattttgcttggactgtatggtgggtgtttgttgttgtgatctttttaatggaattcattctcagtatttaaaaatctggaggtctcacaaaacaattcggacttaaaacttctctctgaaaagtcaggtcgggcaatacagagcttgcaccttttagtggaagctgctggggctgacagctgttgccccctttgtatagggcaagtagtggctttggtttgccacaggtcccaacgacaggcccatgcctgagacaccggcttcaccccataaccatttgagttggtaacccttgaacagcagtttaatatggaggcaaattccaacacaatccttgatacaaaactacagatgaaatgagaatctttttttctggttgagcctatgtttgtgaccctctgcttttaactgtttgtgaggggaagtagtgttgtaactcagacaccacattcacttcaagtgttataagacacgggttgtaacagtaggaaatctttcgctcttccccagggtgcccattctccttatcccgcaaagcaaagtcctctactcctgggtctagttccggccccctctagtgtatggtagcttaaataaacaaatcaaggaaaaactatgtcctttaaacgtgaatcatcctttccccaggaagttttatggtgaaaccagagtatcttcaaagaggcggggccaaggccagagctggacaccacgactgccacgtaagaggaatcccaagcatactgcgatcaagggaagggaagaaaatccactcccagaagcagctttttactgtgactctcatcgttactagaattaaaatggcaaaatgagaaagccagattctgagtcacggagggggagctaagtgacagctctgtccagagaaaaggatgtggcagggctgggaggcccctcacgtggtcagggctccggacttcccacttcccacttccctccaaagtaggctctgccacagagtctgagcctcctctcttttttcattcttttacctcagaaccctgtggccaggctccttccagaggcccctgccaggaggtccagggtctgtttcagggccctcaggctgttgccttaagttccctcagcctgaggtttatccacacgacttgcacctgctactcactcagagcctttctcttctccggtctgttgttggctcctcccttcctggtgcctcagcctgccactgtgttcaagttaaaagccaccaccaccaccaccactccccatttcctgctttcctgcctctgccctttcatgaaatttactgtctgtacctttctcacctccattctctcattttgttgttatctgaccttgtcaaccattctgctgaattgttggcagacactaatcatggcctctatgtcaccaaatgaccatttagctaggtatcctgaccttttgcaaattagtcacctgccccaagaggctgggatccagggagactattgtctgcctctcactcagtcccggggactgcctggtgtctgaagccttaggacagatggccataaggcacaagctaaaggcaatttttttgtgaggcaccatgtggaaaatgggagacaaagagatggcaaagaacgggtgtcctctccatttctcagaaaatgctgtggcttcaactcagtgaaaaatgacaagcatagaagcctctgctgcattgtacagcaggagctgaaacccagcatggaccttagggcatctcaatggaaagccgccatggggactgcagatgcgtcaagtgctgtggatggaaagagggtgtgcgtgtggactaacacgtgtggactctcctttggcttgtgtgagacactcccaggcactctcagaaaatacaccttggagggtgggaagtgagggcattttttaggggagaatcagtcctgctttacagatggttggcaacaagctagtgaaatatgtgtggttactctttttttttttttttttttttttgagacggagtctcactctgttgcccaggctggagtgcagtggcacgatctctgctcactgcaagctccgcctcccgggttcacaccattctcctgcctcagcctcctgag

SEQ ID NO: 44610 - DNA, 1337 bp, Homo sapiens
aaaaaaaattagctgggcatggtgacaggcgcctgtaatcccagctacttgggaggctgaggcaggagaatcacttgaacccaggaggcgaaggttgcagtgagccaagatcgtgccattgcactccagcctgggcaacaagggcaaaattctgtctcaaaaaataccagaaacaaagacaaaaattggactgctggtcctggatgaggcccaccttttcctgactgattctttctgaataatgcccacctgtgcactgggaaggcggaatggaactttgggaagtttgcaccgtttgcagcgaggaggagcctggcctctcctgttcctgtgtgctgacctggaactcaatctgtgagccgggaaacctgctatcaggactctctcttgctttgctgagaattatttttcctttttccttttcatccaataaattccattttcctcacccttctgtgtgtccgcaagcctaatctttcctggtcgtgtgacaagagcccagttttaccggaactaaggggaaagttctgcaacaatttctcctttgctccaactgtgtggactctgagccatttcgtcattgctgccactcacactttggacctgctgctccctgtgcccagggtgcccttcctcttatttctgtgtggctgactcctgctggcccaaagggactcagatcaggatggtgtgttagcacctctaggaagtaccccaaaacacacacctctttcccccatgggatgggtgcctctccatggagctcacatgtcatactgcgccctgactcatcacatgtcattgttcctttgtattaattttctgtcatctacagtgagttccttgagggcagggaaagggctttttatctctgcattaccagagcccaacagatacacactggttcttatccatccacccattcatccaacaaacatttattaatcaactactctcagccaaacacaaacatccatcatacagccccaggtcttaggagtttatagtttagtgggcaatataaacaaggaaaatggacacaagtgttagaaagtgttctagttaacagaagtgtgtatgggcattaggttaaccaaagggagtagtcactcccacctggagggtgactggggaaagggcccacatcaaaggagagctaggctgaatcttgagggataagaagaagcttctgagtgtacaaggaagggaggggcattgcaggcagaaggagtaggaaaaggaagaacaacataaacggtgctcgacattgaacatggatagagcattaggggtttgcgtggggagaggagagacaactggagagcaggcagagaata

SEQ ID NO: 44611 - DNA, 2773 bp, Homo sapiens
atattccttcagagcactgttgaaaatggatcaaacatggagatcctccagatccctgttctcaagtgttaaaaaatattttatattagcacatagaatatccttagatatattctgttatgttctaaagagtttgtgtttctccctttttgatgatgtcttcaatttcttctgagacctttcctgtatagtcatttggttctattgcttttaacttctcttgatactccagcggcaaaccatttttatttttgcacccatgcaaataatctttttatactgtgaagacggaggagcactttcgtaatttgtcatcagatatctttgacaggttatttctcttccttcttgagttgaaactttaacttctattacaacatatgttccttttttttttttttcttttttgagacggagtctcgctctgtcgccaggctggagtgcagtggcgcaatctcggctcactgcaagctccgccttccgggttcaagcaattctcctgcctcagcctcctgggtggctgggactacaggcgcccgccacgacgcccagctgttttgtatttttagtagagacggggtttcaccatgttggccaggacggtctggatctgcatgcgggccacacagaagcccgccgccgaggggtttcggaggtggatactctcgtcagccggttgctaccgtaggcgaagtacagaaaaatgtcctcatccgggcccgggacgtccctgcagcccaagttcgccatgtcccactgctgcctgcacgggagcctggagcagagctgtgaggagccgccagagagcgcagcgcggcggcccaggaccccggcccagtgactgcctcgccgccgcctccaggaagttgcacttttacctcatccctcaacagttcagatcctctcaccaggggcaacccctatttttggattcttgtgctaggatatgttatcaaatttttttaaaaaggtcagaccaccgtatgattccatatgtgtaaaatttagaagattacatatatatttgcaggtgtgggtatgtgtacaatatatatatgttatacatatacacaatacaatatataaaatcaatatatattattttttctaaaacgggactgatgactcaattaattaattaataatttccccatcagtcagatggggaaggggctttttattttccatctttcttcattgaatatttaccatatgcactttcacttgtatgtttaatctttttatttatttaaagtaggtactgggatgtagggagttggagaaacccgtttggactagactttaaagaactgtggcagaagggtatgagatacaataacagcttgagggaatagcaggattgagaaaaagcatctttcatttaagggaaactcgactatgtttgttttatttttttccttttgcagagaggaagcaactagttgaggggggagaatatgagagagagagacagagagagagaaagacgatgcttgatggagcaaagtcaccaacagcactggaggaggggacagagggccaggcagtggggctgacctcagagaagaggggtgcacctttggagggtgcaccgggaagggaggggacaaacaaggagggtgccgaggctgaggatgggcaagctaactggccacagtgcaagcccaaggggacgagggattccagactctggacacacggccgaaatagccaactgtgggctcctggctacagaggaggtgagtggagccaggagaagaagatgagagaagagaatggagaggcattaagtcaagatgaagaataaaaactggttcagtgccagggtttaaaaaaacaataatatttttaaaacgttatgcccagtgacaggaaattcaggctctgggtgacaggaaattcagtaggcactcggtggctgctgggctgcatgactcaatttgtgtagcaatgtcgaatgctgaaacaaaaaataaaagttttttaaaaaatactttcaaggttttgggaaatataattttggttaacatgaccccacaattaaatgaggtctatttaattagggaggcagtacttctggaggaaaacaaattgcctaggctgtcaatttagcaatgcaacaaaacatgaaatcaatagtttattaatatcaggtgtatgggtatacacctgccttatacagaagtaagagctgtattcacacacctagttgcaaagaaattaaacatgagctgagatgctcaaagaaaatgaatcacttagggatagagcatctctaattcgaaaggacagtttgtcccacccagaaacaatctctgggctcatgtgtagatggaactgtcacttggaatgacttgtcaaaagggcttcaggtaaaactaaagctgaaactgaaaggtaaaactctgagctaataataactattgacccacatcaccagaaagttttggaaatgaatcaagaggaaacaacagccacttagcccttcctcacccaagaatcctctctgccattcctttccatccagcactttttccctgtgtaataacttttggctctcatatttcattactcctccacagaatatgaggttcaattacaggactctcacacagatagatgacaagtgtacttgtgacaaaatgttctctagtgggcttctggctaatatatttttggcacatccaaattatgaaagaggacacaattgttggtaaaaccaaggaaggcatgtatgtgctgagtattctgtgtctaaaatcaaagtaggctg

SEQ ID NO: 44612 - DNA, 3296 bp, Homo sapiens
ctaaaaggaactttggaaccagcaataactagcattttctgtgggatatggatctaaagctcttctgttcctcctctagggcatcttcagtgaagttgaacctggttccccaaagtttacatgtgatggcttctcttaccccaattcctccttggaaaatttttaaagtagctgtgatttattgttacaaaaactcctatagaaatgtgtacttcctctcattcctgacccctagcttcagttcctctccccaaaagcaaccactgttaccagtttctcgtttctccttctggggatgcccttcatgtattttttcttaaacagtatcatttctgctgctgttccaccccagccctggtcacttcacaattgaccttgagcagatgtacccctaactcatttttagaatgctactcacaattccattttgtgaatgtaccctcatacattcaaccagtctcctgttattggagtttccaacatgactttcctttctgtgtgagtgttttcttttggagagctcagaggtacctggggggtactcaggagcttgaggtcagaggacccagagagttgaaatcctggggaattgctaatattggggaactttggggtttccccagccaaggcattggagatttgaggtgatactaaaaatatctcaagggttgatatttcagtttttttccctcctctgaatcccagaaatttctggactaagctccccttatgtgcattagtggagagatgaagagaatgcacctttacatgccctgcagtctgacccagaggctctccataaaattggattgaattgaatataccttatgtttgtgaacaaaaatatagcatttgttgcacagttttttttttctcctctgaatcttccagtagagaatggcaatccttgcaaagaccttcctattagttttgggaatcagcagatggtgtccgacatgcacttaatttgttttttccttccccccaactctggccccgtcttttttaggccctgctattttgctgggctgagcagtattcctgcctttcaacatcaccctgaaggctctgacctgtgagtactgattcacaggcggtgttggaggcactttaagattcctgccatgtcatcctgttcctcttctgacacaggcaagagcagtaatgttccagttgggcgttgacttcttccaggactgggtcaacattcaggaattatgaaactagttgcctcatttcctcatgatctgaaaacccaaaggcaattccctcaggaggaacaagtgggtggctgccatatagacaccagctggatatcctcatagtcggagtttgagatgaggaaagggtgatgccccttgatagcaacttaatgcacatggggcattattctgacacacagtgacacacctggctgttgttactcctcttggattattccatcccttgtactgagagcaaggccaaccccaacatgatgaagcaattggttgggaggaaggtttccataaaagaaaggagaaagagaatgatgcaatctccatttttgtttcttcctcacctagttgaattctatagcaacattagcagaaacactagatccaagctcaggattcccagttgtggtggtgggagaggtgcccccaggaagtattgtaggactcctggaagtatacacagggctaatgctaggctgcagttcagcagcatgcggcaaggaccagcagcagttctgattggttggggccaacgcgatctggggcgttaatattttaaatatgtctagatgtattctgatatttaatattacataaacattttatatgtggaaaataaaggaggggaattttgtaattcaaactacaggaactggtaggtgagatggagtaatgcaaaaatcacagtgggaggaaagaaatccctggggaccaccccagcatttgggatggtgatagtaagaattttgcacatatcagaagggcacatgagtaaaatatggttgagaaacactacataaaatagaggtggttctggtttgataccagcaggggtgatacatgaagaaaacccattataaatcttccgtgcatgccgttgcggggtggtgcgttgtcagacatagagattgaaatcactcagccttgtggtcatgaggcgtgccaatggctttcctgagtctttgggggctcctgagcagtgttccaggcaccctcgtttgttctcaccattctgtgatttcaggctcacgtgttggaaaagggcttcctgaagtagaggcccacagaaggcactacagtgtggtggtgaagagcgtggtttcagtcccaggcagacccagtcccagttcctcggctgccactcactggccacagaatgcaagcaagtgacttaatctctccggcctccagtttcctctttggtgagggtcacaggactcaccgcagaggagaggggaggagcatttgagatgatatactgataatgtgttttccacagggcctggcctagagtaggtgcttagtaagtggtagctggcactgccagtgcacaggagtgagagagcttgtgagtcccacttcagccacagaagaggaggcagaaatgccatgaaggttgagaactggaaaagggtgatgatcaggaataatgaccctaaggaagcaggaggtcttctgaatcctcgaagatttccctgtccccagtaaatctccagtcctgatgaagaaaaaaatcttgtttcttgttttcgagagtgtcagaagtagctggaaagatgtgtcctgtgcctagccaaagttaggagaagagaaaacacctaggaaccagaggcaaaaagaaaaaaaaaaaacctggaacctggggcttgcagaaaggcaaaaaaaaaaaaaaaaaaaaaaaaaaaaaatagtagctgacagtcagccaagactcgaagtgtggccccaggggcttggccaacaagaagcctgtggcaattcctgacgcagtagttctgggaagttgatttacccaataaacctccctgcatgggctcagtttaagtttgcagcttactataaataaatgtttgttcaatgaacacaactgaatgggcaggctagcttggctaatagtatctatgatttagctactctagagccttccaaaggtatcaggtgtgccttatccattagcacagagaggcacagggctgagcaggtgaagggagtacaccgctgtggtttgacctgctcaatatcccttcttcctgaaacagaatctatcttttcttcttggggagccacccctccactact

SEQ ID NO: 44613 - DNA, 1262 bp, Homo sapiens
gacaatatataaatctcaataacagaatgtttctaacccaagttttaagtaatgatatgtgttcaggaatacttcatctggcatctaggggaatggttgggaagattttgagcttctccagtgggaaaaaggctggcatattcaggtctaacttcagagtcaaagtctttgaagttaataaatagtttttaattttgaataaaataaaaactattttttttagtttgaagaaagactattcattctccagcttatgaactttttttttttttttttgagacagagtctcgctctgtcgtccagactggagaaatggcgcaatcttggctcactataacctccacctcccgggttcaagcaattctcctgcctccaccttctgagtagctaggattacaggcacccgccagcacgtccagctgatttttgtatttttgtataaacggggtttcaccatgttggccagactggtcctgaactcctgacctcaggtgatccacccaccttggcctcccaaaatgctgagattacaggcgtgagataccatgcccagccgaacttaagaacttttgaaaattataactctgagctttttaaggacacagggttaaaaggtggtttgttggcagatgggcatcagcaaagcctgtttcgaaagctcagcatgagtgcacacatgcaatcagccttggccttgcactgtaaatttttagcaaagtacacaagtatggggttttgttgccaaggaaatggctttgtttctctgaggaaggagacattgaggacacttctctgtaagtgatcaccgagcaaggccatattgtttcccagacctgctgttctgtacaacgtgaagctcttcggtcctgtctgtgcttctctggccagtcttcattacagtggcagcaggcaagccaggcttttgctgacatctaccttccctttctacttgcctaggcaattgtggcttgtgtttgaactgaacgatgaagaaagatctcaggcagttttgagtcagccttcaggttcctcagaaactttaaacacaggaatcaatgaggtcactgaggtcaggaactctaggcgcccctgcctcatgcttggagcatcaacttctggaggtcaagggtaggactatcagggactgcatgacgaagatgatagtggtaagaggtgacagcgtgctggcagtcctcacagccctcgctcgctctcagcacctcctctgcctgggctcccactttggcggcacttgaggagcc

SEQ ID NO: 44614 - DNA, 7971 bp, Homo sapiens
tttgtaccgtcagctcctaccattgtacactcctgcctgcagctttttttcttgtttctttatttttcatatgtgagcctaacacaagccttcctttatgctattgtacccttcctccacatgtttataaactcttataaacatcatgggatacaacattctatacttaaccatgcccctaatgttggacattcatgttgatgacaagcgttcaattatcatataggatattttaaaatcatttcatggaaatagatttccaggatctagatagcattcaggggaaaaaaataatttagaaagaaacagcattgtgtggtgtcccccagcacctcccagacaaaaggcttttgtctgaaggttggaggcctgtgctgtcttggcctagtgagtgccagtttccgcatggctgcccctcacccttgggaaggctattggggggtgggcagtgctggcctgggtcttgcttccctgctcctgcaggaaggtctgggcttcctcattcactcccttctactctcatccatcagcaccttcaaaccgaaacctggaactatggtattctctttggctcttaggacgggttggcttaatgggggaaatattaatagcactggtgtcggtggaagtgaccttgagccatgtaaaaagattctgataaaacgtgtcactcttgttacctatcaggatcaaactgcatcacggaagctgcacacgatgacaccctgtctggaaagtttttgccagagggcaaaagactgcaagcagaatatccctttgccatttctcatgtaagtgcacaccagaactaataagaataatttgagaataagagtactttcttttttttttttttttttttttgctgtgaaactgataaccataaaatttggtatctagagtcctggagtgtaacagctccttctcatacattagcttccattcattaccccacaacagttctgcatgctagctggcgttattgccacattacagtgaggggccttggcgtcttgggttcctgagagatgacattgccatatgtggctcttcacgactgtcccacaggccctcagctggaatgtggcagaactgggagctgaatccaggacagtggtttcctcatctgctctagccaggagcaggccaggccacccttctggacacagtctatcccacgtggggacagactggccagccccagcccgtgggtctcaacgcggccagagctgctgtgagaaatcttgtttgttttagcctttggagtcctgtctgttctctgacctctgacccagaactgtgtgttccaaccacttcccagtctgttgtcctggctcaaaacaaagtgaacgaaagctctttcctcaagccctgctctcatactccagggctctgtgaaaatgagtggtatgggcacatggctggtgagtcactgtggccctaaaatgagcgggaaaatagagggcaggtccgggcctcgcagggcactaatggcagggaagcaggagggtcagcatcaggagcctggcctttggcccgcagagacctgagtcctccccttactcctgagctgtgtaaccttaggcagggaacttacccctctgggcctcagtttcctcatcgggaaagcagggctgatcatagtgcatggcttatagagcagttttgaggatttcatgaacaaaaaaacaaaggtaaagcacttagccttctgcctggcatgagtaaaccctcaggaaactgtagttattatttagtagccaggaaaatacagaacacttaatctgttggctccctggtgtttctcgaactgtcagcaaacacttccacatcaccagccagcagagccattcatcaaacacctttgcctttgtctgtcaggcctcccacttcaacaagtgtccctgggtttaagtcagtaacctcctaggcacggaaagttgcctcacgcatgtgacatgcgagcacgtctctaaaggggcagaggatctggcaaaaacatagactcgcaacttgtctgtttcctgagacacccacaattggcctcgtggaagtggttgacttcttcccatagctgcctgtgtcttacttcatcgcctcctccaagcccagggccagccctgcctggctgggggatcatgacagtctttgttcccatatgggcaaagtcttttgaaaagagggaaagatcattagttagctgtcagcctccagcgtggttaggtcatgagtaattcttctagagagccagagcactggcaattcatttggtcgagaacgttttatctacttgaacggcgtagcgaggaaataaatggaacaagttatatcaaaatctctgtcaactgaacaattccttaccaatccaacaaggagtatgacgacgatgccacttttcctacctttgagaggtcatgcacagacaccgcacatgaacacaccacattataccccccccaccacaaatgggtgtaccccctctccccccacatactcactggtgcacatatacacgccacaccacattctgtagtggggaaaggatcatgtgcagccttaagggctggtttgcgtaacgggtgcatatttctgctagtgtttttgttcttgcagtcaggactggccgttgtctgaaagcaaacctcaaggacaggacttctggactccgcagccacttcaggctgctgctccatcgcatgaattccagcaggtggcgctgcaccccgcgcggacccggcttgcctctcggccccagggaggtcggttgatgagcagtcgggaagtgggtctgcgcgcaccccgctgcagctgtggcaaacgcaaacgatgacacacaggcttgacgagggcctttgtcagaagcaatggggatctggcgtcaccgcacaatggaaaacaaagtgcttctgcctggctggccagaatgcacgtttgctcactattgatgctggggcatttacaggcagaatgagttcatgtgaaatttcaggatctgccatgactcagattcactttctgtaaaccagagtcaacattacatttccctttactctgggccattccttgaatttttaggtcaccagttgtttttgtactaactgaagggatttgagtatttcacaagcaccttatttttattagcatttttagggcattaccaatttgggacggatctgtagtgtgagagattgttgtcactcttagctccaaacataggttgactttatatattatttacatgttcagaattatactgtgtagaaattcaaatgaaacttgcaaaatacttttctggcaggaagccctggagaggatcgttcatggaaacaaggatgacgactggggtaagaaatgcaggtgactcgtgagtggtcagggagtggaagagaagacggctggaaggttttagcattcagaaaaaaaatggagacaactagagttgatctgaagattatggcagaattcaatattgggggaaagaaacaagatgggggttagaaattagaaacagcagagctccacaggttggaaaggttggaaaggatttgagcaagagaacaaggagcctgctaatagcaccctgggtttacatcaagagaagcacctggagagaattaactcgggaggaggtgggggcatgggaaaccttttcatctccaagagcgggcaggaacagcagctggcctgaacttgaaggtacaccaggtagcttgcgtgggccaggagaaggtgattctcttctatgcctctctccaacgccctgcttctgatgctgctcctctacctgtattgaggggaagatacatccctaagaagttccctgaaccccattctttgttgtggctaactggtccccttggaatttttctactaattttcaattccccctctcacctggtgaaatcttgaatcttactgttcaataaaagttcttctaccgaaatttctataccacgttgaattttttgtgtttcctttgtttttagttctttgggagttttacttagaaaaaaaagcctctggggactagataaggaaggaaaccttcatgtggaccctcttgagctctgttttctttcctggcctcactggtgtgggctctctggctgccctgctgatctcttgctttactgcatttgggtgaggactgaggagagggacaggagtgtattcactggatactattcagactaaaggattagatgtcgtaggtgaataagcaagaaagcaaacacataaacaaaacatctgaacgttttcaatccaagtggagcagaatttagcttttccagctaaactgccccacccctggcacccagggaaaatggtgctcgtattgtaatatattctcccatggatgcatgcaatattatgagtattttttgccttgtgatgtaaattctctttcttcctcactcagaaaaacatattgtagttgaaaggaaaaaaaagaattctggccgggcgcggtggctcatgcctgtaatcccagccctttgggaggcccaggcgggtgaatcatctgaggtcaggagtttgagaccagcctggccaacatggcgaaaccccatctctactaaaaatacaaaaattagccgggcatggtggcaggtgcttgtaatcccagctactcaggaggctgaaacaggagaatcgcttgaacctgggaggcaaaaattgcagtgagccgagattgtaccactgcactccagcctgggcgagactcagtctcaaaaaaaaaaaaaagaaaagaaaaaagaattctgatcctttttgagtgtgtgtgtgtatgtgttttatgtgtgtgtgagaggacacaaattcaaactgaaactttgctaagtaataggttttaactgatctggatacatcagggtagtgagaacagtaagtctggaaaagaaaacaatagttatcaatacacatacactctcccatacatagaacaatgcctaggtctattgcattttaatatccgccgaataggtagcatgaattcacatcatttcagcgatggggaaatggaaactcgcagagagcttaactgaatttcctgagaccatgggatgtcagaagggccactaaatctttcaacttccaactcatactttaaactcctgcctcttatcctttttgaagtgactggggaagaccaggtacagatctgtaaaatgcttcattccattttcagaggagctgaggtcaggtgcttcctacagtcgaggtctcgccaagaagacggtggccacgttcctcaattctcaggcgagtgttttgatgcctgggtgcttctgcctgatgagcccagcattcatgaagtacatgtgacaagaggacggctggaatattgctcaatattttcaggccgacggcactggctgcatgtaatttgagaggagtgtagaatgtcagccggacttttatgacgcacccctctcctcttcctgagaattgtttgcatgtggagatttcctgcctatatttttagcgtcaaatttttttgtggttgctcaagtaccttcggccatgttttagtgacttacacagaagccctgatgcccctgataaaactgatgaccatcgaatggaaagaagtcagtgtagaaagcccaggcattgtcccatagctggccctgtgtgtttgcactgattcctcagaataagtttgcagatagcttaacttccagaattcctgagtttcactagtcccccttctttatgatgaattggaaaaagggtatattctgggataaagcaagaggaaactgggtgcagcaaagatccctagaccatttttcccagtggcccattgctcctgctgcttttttcataccagctgaatctccctaaaccccacgtctgcggcaaagtcttcgtggtgaaacaggtgagtcacacttttctgcttctctgcaattacaaatgttatcacctcatctgacacagagagggtgttggttggaaatacgcattaggaataagctctttggaaacagcaaaactgccttcatgaaatgaagacttttttttagaaagtctggagctaaagttataaaaataaagaggcgtcatctccctttccttctcctacaataatggaaatgaaatatcaaagtaaacagcaccacatccatgtcctcagcacatgtgactcgctaacagaaccatgccagccaccccatcccttctctcccatattctctgctgttctcactgtctctcaagacctgatttaaaaccaccttcactaagaagtcttcctgtcccccttctggtccttcacggaatattattttgcttctgaaacttaaaaaaacaattttgttctcaggtcattctctgtgtacatcccatctcgtccatcctacagattagatgttcttccagggtagaggcgaccccatctcatgtctttttattctccctctgctttttattcccacaggcagtcttcagtacaagaagcgtcaatctcagatcttactcatttccaacctgtaccaatcaaaggccctcccagccaagataaaagcaaagtctccctcctccagagcacatgggaatggccccccagtagctggggcatgcaagctaatgaagtttcatcttccacctctatccaaatatgaccttgctgataccatctcctattagatgacaaatccggatgtttctattgcatggttgttatttgccacatgcttcctggacaagtttctaggtaaccttaatgtctgtgcttctggggaaggaggagtagaaaataactcacctcttcagtaagtggttttaaaaatataacagtgtttaaaagcttttagagagcagctctccttccggctgctccagctctgtttgctttgtgataggagcccccgtaacacttcgtgcttggcaacatctgacgaggacagaaggcaggtttaaagctgagaagattgatttttcctttgtagggctttccatgaggggcgtgggagagaagtcacttggggaagcagtggtcagtgaggtttacttctccatatgctctgcattcatgtgtaaggctaaacaaacgtgttgtctccgcaagcaaatcccacaccacagagaggagcagtttgtcctggaggtcctaaggaggtgaccagtgacctggagggtaaaaggttggggctcctgagacctttcttccaactctcatttccatcctaaactggcaggggaaatgtacccaaattgcctgtgtgtttcgatttgatgtggacacactgtgaccactcaggatcgctctggtgctgctgaactccatggttcatattaggcccgactgtctagttttagaaagtgggaggagatttcccctctgccagggcttggggtttatgttccccagagcattgagcaagagcctcatgtttacagaaatctcaggccccatgatttcttcctgtcagggtagaaggagaaggagtaggcacagactgtggagtagatcttgccacttcagtccctttgttcttgcccagcatgaggttaccaaggaaaggatacctggggcgctgggggtgagggtatgtattggttgtttgaactctgaaaatataattttaaaattggcattgtaaatcaaatcattaggtcttctgcatatagttttattttttctaaaacttcataaagctgtcaaaaatacctacactatattttaaatgctgtgggcaatatagtttttaaaattttattgtgaagtgctgttgtaattcctttaagagatgtacactgtctacctggtttattttgtgtgcaaatatgtatatatacactgtatatatacatatacatatacacacaactatatacatacatgtatatatacacacatatatatttcaaagttttttgagatctagtgctcacacagcatttggtagtaactaacagctgctaagtcaactcctaaccttctcaacctcatctggtgtgact

SEQ ID NO: 44615 - DNA, 1772 bp, Homo sapiens
ctgcagtcctagctacttgggaggatcccctgagcctaggagtttgaagctgcagttagctattatcatgccactacactccagcctgggtgacacagcaagaccttgtctctaaacaaaaaagaaagaaaagaaaaaaaccagagcagaaatgactttttacaacagactgagaaaaagaggacacatttttgtttgttactggatcatcataacagtcatggtcagtgagttaggatgataatctgatgaaaccgatttgctcacgagtgtcctttagattctattcccatcctggcagcacttcttgggtaccatccaggacctgctgtccacagcctccagcctgaacctcttgccttgacctgttcatcctgcttcatcctgtcatgctccagaccagatgggcctccaatgtcattgcttggtttctggtttccatctctacctcatcatttggacttgatgcctgacagagctttggattctcctctcctgttggttgtctcaggaccgtttggaatgctcttctggggacactgatttcccatgcagtgaaaagacacaggctacatgaaacttttcttttctccttccttcttcctttcttctttctttctcctttcctttccttccctttcctttcctccctttccccttccccttcctttcctttttttttggacagtcttgctctgtcgccaggctagagtgcagtggtgtgatctcagttcactgcaacctccacctcccaggttcaagcgattttcatgcctcagcctcctgaatatctgggattatgggcacgcaccaccacatccagcttatttttgtatttttaatagagatggggttttgccatgttggccaggctgatctcaaactcctgacttcaagtgatctgcccttcttggcctcccaaagtgctgggattataggcatgagccaccgtgcccggctagccaccacgcacggctgatttctgaaaaaaggaacttataaccttaggtcactggtcaatttccacagcagtacttagtgatcaaaatttactatttgtggattaatttacaactggcaccagtgattactcaaaaatcagagaacaacacttttagcctagggtggtgaagaacatggactctgtggccagactgcctgggttcaaagtccagctctgtgacttactagctattaatagctgtgtggccctaagaaagtactcaacctttctgtggcccagccatacaatggggataacatttgtaggttattatgaggagtagctgacttaattattttcaaagtgcttgcagcagtgccagacgtacagcgagaactatataagtgtttgttaaagaaaatgtttgctttctctgtattcttctcctgggaatacttggctctgacattcacaaactgttagccccttgagggcaggactttgttttgtttactgtgttatcctcagtacctagaatggtgtcacatgggaaatgtgccataactattggttttaatgaatgaatggggattctggaggcaaaccatcacaatcataagagttgattatttattagtcctgtcttctctcacatttttttctctcctttatgtttttacatcagatgcttctgcctgggacaggctggcagaggcaaaaccttgactaatagcatcatagactctatatctcattcagctggaaatcagctaacactcaacagctgataaatagaaaacttctcagaaataagaagaatcccaatgct

SEQ ID NO: 44616 - DNA, 922 bp, Homo sapiens
tcattcaatcagccctctcatgctccttgtctctcctccctaccttcccaccctttcatcctgggaaatgctgggtggtgggaggagtggggaggatggcaaaaagcacttggcttccagactaaagcaggcctaagctggacgaggggagaatattcagttctaaatgtatttcagaactgtggctgttacatgactggacttgtgagttactgaaatgaggcccttgctaaaagtgaatacaggacttatttaaaagtagctgtctctgaggaattctgggaaccgccagaaatttcatctctgaaggcaaacagcccccaaaaagtggatttgtagggacacacatgacaatcgctgttgctttatgattgtccctcatggtcaatgtgacagtgtttaaacttcacaggcattatcctacattaccagggatgaaagaaagaagatctaggggtttaggcaaattgccctgggtcaaaggtaggtgaatgtcacaactggaactcaggcccagggtagagaactccatgttccgttctttcccccaataccacaaagcattttctatcctccccaatttttcatgcttttaggtccctatttctgacctggccttgtcaccatctatatgtcaggtcatttttaaccaaagacaaggggaaaatggtaagatgtgcatgctaacagaagaggggagccagggtcattcactcagtcaagaggagggagtgaagagaagggaggagcaggtggggagggtgagttaaggaagggaggggtggatgataattggctaccacagcaataaagatttgtcaacaggggcagagaaagaggagggaaggaggagggtggagaaaaaggtggctttgctgacggtccctagtgtccccttacagctgttctcagctgcagagtt

SEQ ID NO: 44617 - DNA, 552 bp, Homo sapiens
caactggaaaagcagattttaattttcattccaaaaatgagagactgaaaatcaaaggcttaggaccacaatccacaaccctcctcccaacctcctgtctgtctttgataaaaagctacaaagaaaaagtttcaggaaactttcagacatttataattagcataaacactgtataccaagatgtgtaagtcaaaacgtctaattactctgggatacaagctcaggcatgtggcaacagaatactgcctgaaaggtcatttcaacatcaagtcacggacgtcctatttacataaggatctagggcagaagcacaatgtgcacactgctgcaactttctcatatgtgaatgctaacatctgctgaaaagctgttggtacctttactgcaggtttcctgtccttgagtcaaatactttctactcaatattggattgaggtatacattagattaaaaatagaaccagcaagggttttcttcatttatttaagtgttttgttcttctgtgggattacaaatcattcaaacttacagaattcttgtttgacagacacc

SEQ ID NO: 44618 - DNA, 6901 bp, Homo sapiens
acaagatttcaaaattttcatcaaatattctgtttccacaaacccttagaacgctgtaaatttgctcaattacatctaaagaagttctctgttctgcctaaatcatagcttcctaaaatttttaaattcacttctctgaagccttacgtcaaagtgggttaatttagaagggtaactccaatagacaaaataatttggacaaaaaaagaattctctgatgcttaatttagcaaattaacctgttgaaatttctggctcttagtcattagaagagaaggagtaatagtcatcactttacataggccagagctgcttagaggctacctgccatcaagtaccctcctatatgagtacaggaatggtggcggacagttttatatgagaaattaaaaccattttccccccagagagaacaggtttgaccactagaaacctcttcccaattagccaatccatgtgaacatgttcccaaacagcagcttcaatttaaagtcatgagccctatttctaataacgatggaagacaagaaagaccaaattaatatccttccactggaggataaaagctcagccagatgcctactgctagcaactcttactgtgcccatagaggtacactggtctggctgagtcaggaggaggggcactgaggacacacaggtgggtggagcctgcagtaagtaccaacggtacattcagtcaccagaaaggtatctatctcatttttttggtttcttcccagttttcatccaactgaggttgacagtttcactccaattcctgcttgcttgtccacaccccttaaaaagtgtttccatggctgagctgacagtgagtcctgataggagctggttaaggatggtcagcttatgtaccatcccccgcatgccactgtttctaccaccagttttgcaggagaaaaggaatcctaggactaatacaagctacttggctccatgctttaaggtagagagatctgggaaaaagtcttcctcctttccctttgctgcctctgtagagaccaaccagacccataaatgggcatgtacagaaatggaaaaagtactagaagcagtcagaagcaaacaaagacattgacgactttggtacctcttaaaaagtaattttttttttttaaattaagaactaagtggtgggttggcagagaaagaatttttgatcttctgtctcctggaagctactggtatataaatgcaggggcttttagagcactgtaaacttaatcccaaatatgaaaacactagggtataggaagcagaaatgaaggccatacaaaggtaggaaaacaaagcactcccttctggggcctccagtggtcatgcagatcatgaccaattactgtcacttcgctttcccttccccaagtggacctcctcatctgcccactttccccacaagtgtacactgtcaatcttgctgtaatcaactgtacagttgcctgttgttttcccaaggtagctggctgacctactgcccccagagatgcctcttcccacccactgtgtgtcaagtctttctctgctcctcgggtctgctcctgaataggggctggccgcctcctgctgacttctttttctctgggcctctgggttttctcttcacatccccagacctaccttcttcccactgccattccttcccacgcccttcccttggaacaggcaagcttatctttccatcttgcaaggctgagtttctctccagagtttctctccactgtctgcttctgtccctctgcctgtgtttctggcttcccccatatgggcctcccactccgtctgatgctggtctcttcactgcaggtgcacctatctaagagtagctattggcacatgcagttttctatttcttgtatctctcccagccattcttgagattttctctcgagatttcactgtatgtaggacggtacctttctccctgtgcatgcactcctccctgacgccccctcaccccaccacacaaagtctgtgagtccttttcaccatatgcttctctggttagtaacacaagtgtcctagcacgtacattcatgtgtccacccaattctgtgagtaccttcctaacaatacactcacctctgagcctccactgctgtttacaaataccctatcatgtgagttcattttctatccaaagcgtgcacaactaatgccttcctctgtgtgcacacttatggggtgggggggctctctgaatacactcccagtaaaccagggttcacacctctcctgccgctctgcctcagactctgccttcgctctatgtatttaaagtgcctggcactagtgggagctcaacagatgtcaattcttttccccacttttagctgaataactatgtgaatctgtgtctcggtgtccttctgcccctctgtctgttgtacgagaccggttggagtgtgttcctcagtaccgaacgggctatttgtaagatgccccgtgggttctatctcccttccgactctctcctctcctgtaaaacgttacaggttcccccatatggcatatccctccctcacgcgatgtatccactccggtctcccacagtactgcatgtccataaactgtttccccatgcaccctggttaccgcgtcccttctcggtgcttccctgtctctcccattttttttccaacatgaaagcgtctggatttgtagtccaattacagtgtatgtgcgcctatctgagcctctctctgtactggaggggtgtgtgtgtatatgtgtgtgtgtgtgtccatgggcttctctcgaaaacgaggggtgagaggcccgagtctctgcccgggatgcattgtatcctccccacaccttctggctctggctcgttccccgtttacacttcccagagtcagcccaagacgccgggagctttttcgggtacgttgagcgtccgtgaacctctctctccagaacccgatgtcttgctcccggggagcgctaagtgtgcgtgagtcctcaggtctctccccagggcactgtgttggtttgtgtccgtcctggacgcggcgcgtctccagtaacgcgatgcgccggtgtcccggagtccctgggaatgcaggtgtgtcccctccccccccgtacgcgaagcgccagtgtccccgccgttccagtgtgcgccgcccccttacacggactgcctaagtccctatctctatgagtacaccgtgtgcccctcaccatgcgcccgagtccccatcccttcgagcacacagtgtgtcccctgatacgtggagcgcctgtgtccccaagtccctgggaatacaaggtcccacccccacacgcggagcgcctgtgtcctgtctctgaggatccaccgtgcctatgtaactggaaaacgcgggcagctggtgcccgcgagtcgtccctggttccttgcccatacgctgctcgctaccctccttccccgccgagggtagcgtggtcatctcacttctcttatcggggcctctctccctccttgggacccaacaagccaggaaatcctcgggggccgtcggaaagtcccgcagcggcagcgcagccgacccagggctgcggctgcctcggccccgccgccaggggccgcccgactgcccgcttccccaacgcccaggctagcccgggaccgcggcgtcagccaccctgcccggccctgccctgcctggccgctgcgggcgctgacggtagcagctgccagccacggctccgccggccccgcacccgggcgcggccaggccgtgaggggtgcgctctgcctctctgagcccagcctgccggccggcccgctcaccttgtggctctggtaagtctcgagcgcccggatcgccgtctcggtgagcttcacatgcagtacggtgatgttgtcctgccccagccgtccgcacgacagcccatagcgctgctcctcccgcaggccccctgtcccccccgccgccatcttaaactccccggggtgccgccgccgccgccgctccggctctagcctccactgcggccgcggctgcttgggcttctgcagccgccgccactgctagggccatcccgctgctgacgtactgtcatatactgcgcggagccagacctcggactgccaccgccgccacccgccccaccctccggccccgcgccccgccccgggctcgtctcattggtcttgttcccttcagaaccgccctcatcggccgccctccactctcacgggggcgggcccaaagtcactagagttttgctcctgggacgggacgtccgagaggtaagaggctgacgtctaggtgacgcgccaacttaatcatgtctgacgtcacgtctggtcgtcttggctagccggccgagattggccaggctggcttggggactcccctgctaattggaagtccaggttgcctggtctggttacctggagttggagccccgcccctgtgggggatagtagtgaaaagtcagaattggggaatctcgccctacgcgggtggtccttggagaggaggatctccacctccactatgtaaggggatggccgtgaccaaataaggactttgttccccgacggctgcggaagctgtggaacttggtgcgtgcgtgtgggggaggacgcagcaggaggactcgctagagagctgctcctcaaaactcctagtactgtagttgagcaaacggcattgggaggaaactgctcactctaaacttgaagttatcgggtgccacacgcagagcttataaaaacaaaaacaaaaacaaaaacccttgaaattagtgagtcgactcttagatgtaggagttgtgttagatcttgtggagcatcttaaggacaaaatcacgcgggaggttaaatgcctttcgtatggtgggcatggtataatagagaattgagcttcgaggtctttcctacgccatgccctgttgtgattctctgggatcacaactggtggggatgatatctccttaaaaaggactctagaagaagagtaaaactggcattgatctaaattaaaagaaacctcgacaattctcattctctaattcagtttgagtattgtcctttttatttgatagggctgtgtgaaaacctagctagggtttaaaggtaagaggctgtcgaggttaagcgaaggagatgggggcgtgaggggcgtgcaaaggcctggcatactttccattccatccacaggatgcttcctgtgtaggcgtggctaaaagagggagcctaatctggagtccctttcagattgtgtgtggatagactgacagatgggttcctgtcagaggatggattaattggttgatcagaaacaccagataaaacaaaccattgaaagctttcaaactgttgaaaggcagtttaaaaaagttcttttaataaaaaaactgagacgcttgtttttaccctcagcttataaaaccatgttctgttctactgggattccccgggaaagtttatagatatttaatcagtatttttcattattttaaatggattagggccatgattccatgtcctcccctcccaataaatgccttccccaccgtacgggtacactcctttttgattcagaccttcaaacatagtaggtgtataatgtgaattacagaatgaattggattaagtggaaacacctgtattaagtgttactccatcacaggaaaacagtttgtaaattgacttaatttcaatccactaagattggctagctgttaagacgtgattaacgcttgctaatttcatttactttagtgatacagtgttatcttaaattcatgtagtagagatattaaggtaatcatcaaattggattaaaaagtttactcttagaagggaaatagaggctttactacctagttttctccgctttccaaaagtagaaaccttattcaaatagttcatctctaagcggactataatctaaaaataattctgtacttgaacttttcttttctctctctctttttttttttttttttttgatagtaaaggactgagcacatagctaaagccttaattatttgggaggtgagggggaagggaggtttgaccggaacaagtaaaacctgtatcccactgcttttccggtgaatgtgggtaaatccccacccacatgatatcctaacttggcctactcttactcagaatttctgatgacatccaagcgggtgggggaggagtaaggatggttttcgttgtagttttcaaatatctgacctgtagcttcttactagtaattgactttttttaaaaattataataggaaaatttttctcatgccctattttagtgggtaacaaatctttcacggattaatatattattgtagtgagttaatggttgtttgtatttttccccttttgagcttttcaactgtggaaggaggaaatgatcaagtacaaagtaatatggtaatctagcagtgtcttttcattgatgtctcacaggcatagtacacattacgcctgcctgaatcagatggtcaagttatgatgctggttaggataatttattttgaggaggctgatgaaaggtgctttttgggaaggttgccattttatacatattttctgtatctttatctggtttaaataattaaataatcattgaataccagttaagtataacatgcggtagaggatttaaaaattaaactgtaaagtctctagaggaattttctgtttcagtgtggcaagtgaaccagtatagtcaaagcaaagcaattagaaaattagtaaatgctaatttggacggtgttggtgataagctcaaaaattcaaagaaaggagaagtctgaagaggtttaatggaggtgatagaacttgaacagctcttgagggttgagtagattctagataagttggaggtggtatagatggagacagcccaactaaaaatgatcttcatgatgattcca

SEQ ID NO: 44619 - DNA, 1724 bp, Homo sapiens
aagataagacctactaggtgagaagcactatgcagggactaattcagtgatggaggagttatggattgtgagaacatattcagctcagggtgttgggaaaagctccatggaagagttagcactggaatgtcaaagttttctatctgcgataatgggagtattaaaatattctaagtttaaggatcttatgagctatcatacggtgttttgggggaaagacagtaatctgttttcacaggaatatgtggtgctcgaaggtgattgtgacagatggagccaataaagatggattggggacagattgtgaggagagcttttagtattgggttaaggaatatggacttcgatctgtgagcaatggggaactgttggaggcttccgaacaggaagtagcatgatctaatctatatgttaggactgttcaggtgacaaaagtataagtaatggattggaatggattcactgttgtaggcagttattgggaagcctgaaggcactttgatttgggaaagtaaagggaacaaaagagattactatggggaaagtaagcggggagaccaatgatcagaggaggctctgtatcatttgggaatttgaaataaggtactacaagtggagggggagtgattatgacaaaaaagagcagagttaggaggcaaaaagtaatgaggccttgtactagggtattaatgatgggaatggagaaaaggagaagaatatcatggctctgtgaaggtagagttggctgatttggcagctttatttgagtatgagaggtgaatgagcatgaggaattaaaagtaactactagcttcaagtttggtttactagaagataatattatatgaaaagaaacaagggaatcaggagaaagaccttgtttaggttagcggtatcagtggattaaatgtctggcaggcatttgaaaatgtgagtcttaggcctcagagtcaacctattgagtaatagtagagattgtgaaattgagcaagttttctgagggaggttatgaagaaagaggatgagaaaaagaattggggaatattcctaaatttcatgcccactctaatggcaacacacttccttcttatttagaattatgactatggtgggccactcttactaacacaggtatcttatgcttgagggatgtttgcatgtatccctgtgtatatttccaagattttcctagtgataacatcactctaagtcacttgcttcacgcatgttttttgagtgaaggaaaaagctttggaattaataaccactccttaggcgttgcacttattcggtgcacacccatcgtgatgtgttgaccttgcttaccttactcattgggaatggcagaaaaggccattcactgttgtaggcagttattgggaagcctgaaggcactttgatctggaaagtaaagagaacaaaagagattactagggagaaagtaagcagagagatgaatgatcagaggaggctctgtgtcatttgggaattggaaatagggtactgccagtgtaaataatgaacaatgtgaagcttaaatgataatttgcaacaagcatttaatgaaagatcattgcttttggtagtagccacatattgaataaagtttgctgagtgtgcactgaatattatctgtcctaaatgactcaacatttcagtttgatcctagggaatgttatgcatctggaaaaggaaaggaatacatttatctctgagagccgata

SEQ ID NO: 44620 - DNA, 2078 bp, Homo sapiens
ggacccttggagtacatatggatatggtataaattcctctttttaactttttgtcagtattttcatcttctcttcttacttaatcactttcaaggcttttcagctgctgaaacaaaaaataagcctgtcctagaggctgatatcgtcttctggagccacctttctgagaaaagtgcaaaggttctgaagggatttttaaatttgatttcttaaagagttatttttcacagttagatatctgagctcacctagaagctgagtagcctcagtaatcttgagttcccaaatctacttttattcatttcacattcatgattgtaagcatctattatgtgccagggtagggttatatccattgtaagtaaccttggcagagtaaaaaatgctgcacagaggcctgtggaccactcctaaggacctttggagtggcagaaaggagatggagaggatgaagcagacaagcctggacagctgagtgttcccacctctagaaatagtgaagtactgcacagtcatagcctgtctgcccttgggcttctgattgctgcctgggactttaaatccctgagctgagctttcctgaccttcggacccttgctgcccccacagctccagaagctggagcatttatctataactcaacacctgggccccagtctcagctctaatacaaacaccagctctgtgacctcaccttagcttagagtagcctctcttggtttcatactttgatctgtaaaacaaaggagtgtgaccctttcttttttttctctctctctctttcagcactaacctgttaaccatgcttgagagaagaggtagaacctcatcacaactaccttttggaaatagttttcctgtactagaatagggggcgtcagtcaacctgatgatgttgtacagggaaatttcggagatatgcacgtgcctaggcgctgcctccaaccaattaaacaaaaatttctggggagtgggacctggggatgagtatttttgaagagcacaccaactagtacacagccagtgttgagaaccacaggttgtgtaaaagcatcaggccttgagagggacagatgtagatgtaatatccagaatttactacttattagttgtaaatctgtggacaagtcacttagtctctctgagccttagtttctctatctgtaaaattgggaccaaattgtatcttcctcaaaggtagccatgtggcacacagtagatactcaatgaattgtaattgagatgggtctattgctgtgctgtccaatatgatagccattagctatacgtgactatttaaaagttagataaaggtaaaaatttggttccccaattgcactagccacatttaaagtgctcagcagccatatgtgactagtggctaccatattggacagcagagatatcaaatgtttccttcattgcagaaagttctagagactagaaagtgctgatctacattctacaggatctactttactaagatccaagtttattaagggaaaatttatctttaactctgttctagaaaatccactacattagcttttgtcaggtaagtagcaagacttacggcttgggcagaaaagtaaaggaaatccaggaatcatcccttgtgtggagacatttttgcttgtttctatatacctataaatgagtttacctagaagtaaacaagcaagtgggaacatgtaatcgattctacaaataatgatcttttctcccttccctcccaccagttctggggctacacttaccatttaatccatttgttaaagtggaacattaacttctttctgccctatttgttcctaccacaggcagtatacaatgaagctgccggtatgtgtgtgtgtgtgcgtgagtgtgtgtgatcaagagaaaggggtacaaggtgaaagaaggagctggcaatgataagggaagtccctaaataagtgtctgtaactgagaaaataaaagtcatacatagaacatgtttgatgattttattatctgtaatatttatttcagatattttgacagctcttttattcaaaaaaactccttagtattattttgatttacccatagtggag

SEQ ID NO: 44621 - DNA, 701 bp, Homo sapiens
cctcagtttgctcccagtgtaaagtggcagatcatttccaagacccttttcagactgaatgttctctttattcattaagtcaacatttattgagtactcactttgtgccagacactgtgaggcactcttaagcaaaggtaagaaaaagataccagatgcttttatagagagggatgtgaaaacaaatcattaaaagataatgttgcatattttgtgctagttatatgattcactgtgtctagaaacctacatttcttctgaccaagaagttaactggggaagaagaatcaagaaggaaaatgaccccaaagatcagcttaaggaatgtgcctgcaagagagaattcacatgtcagacatgggacagaggaatttcagcctgctagctacaaccaacctttggataatgagatttcttcacactgtggtacaaaggtgtatttacttccctaagagaaataaaagagaaaggcacataacacttgggactgtataaagaacttggctgatattgagtatccaattctctttattgtattcaaaatcataatgagtatttctcatatttcagattttccctaagagcaaacctacagtgtaagatattttgttaagaagtatgtttttatattaatagaacatgaatctcatataaattaacttcatgccccctactcaagacttttctttcaaattctgaat

SEQ ID NO: 44622 - DNA, 796 bp, Homo sapiens
ataaattgatactatcatactagcagacaggctgaagtttagtgggagatctgaggtttccggatctctcttgctttcagagtctctgaaacattgttttcttcttatggctacttcatgctaaaaacctgtgaaatgggacacagagataaagaacagtaatggaaagattgggtcctagagaggtgtaaaattattcactacgtaaaagcattgaagggataatccagaatatgggtcatggaaaaatttaaggacatagcaatgttatgagtcaagcttacagtcctattttgtgtaacagcccagttaaataagaggagtaggaattaaaaaaaaaaataagacatgcaacatgatagatgaaattttttgtttccaactttactttcagaggcctggatagttaataaaatcctatggaaattactttccttgtcttttcttaataaaatccaaacatatgcaacacacaatgcattactgaaaaaattaaaaagtaaacagagttttctttatttcagagtaagttcagccaagaaatgaatttgctaacaaaaaccacagttatcatcatccaatggaggcaaaatatttactaaaactgtaatccccatgaactgaaaatactacagaaaaattgagcagtgtttgccccaagtgactttttatcagtctccacctgtttgttcttcctctagaatagtagaaaagtttattttgttattttaaagaaagaatttactcgtattgtgtcaagatgagcacttagcaagttcagttattttttatttac

SEQ ID NO: 44623 - DNA, 1587 bp, Homo sapiens
tacctcctgaggtccaatctacatgtttaggtgccagggcactatcactgccctgaaggagtctctgtctctagactctctagtggccttgcttggtgaatatttaaaaacgtattatttttattgcttaggaaactttaattgataactgttttcaagctgaatctctagtgaataggtaagacttggttgcagattagcaatacctgtttgtatatacacaattaatatttaagaccatacaaatattttgatcttaactattttgaaataagcccttcttagtcttgtttgccctgttaatttgttaggccaatacttatgttcattatcccaagataaacttaaacccaagccaagtcaaataattgcaaattctagacaaaacaaatatgtattaatgaaatttaaatgtatttgtaaataaaatgtctgagagcaaactgttctcaatgatagggaggaaatatgaataaagagaggagagtcaggaataaaatggaaatctgatctaccttcccttgtggaaaaaatagatgtgacctagcctctttgaatctggtaatctagtcttgacactaataatcttatctcttctggagccatattttggcttctttccccacaatccccaccacattaactcccggaaatgtacagtgcatgtagaaaagcaatgacttcttccctgtggtagaatggagacctgtgttccccaatcccatgtaaaggtgccaatagaagtttagattggctcagatgtagaaatacatttcctaccatgacgctgggaaacatttcaggtttctgtgttcttaaagactctgctgcctgaaaattctgttcaaaagtctactttgctatgactaattgttaggcaagcagcagagttactcaagacaaatattactggtattgaactgacattaatatctttagaaagcctaactatctgtgtggggcaacatttttaatcagaatgtcacctgaaggcctccagaagttaaataactttattatgtgagaagaaaaagattcattaacattttgccatgtatgtgtggataaatgattctttctgggcaatgaaacaagaatgccaacactatatatgtttaataaaacttgtgctaggttggcagttaatattatatctagtagatttttgcatctgtttcagttgtcttctgtgacatcacaaaaaccccaacatttagtggcttaaaacaattcactgctgttgctcatggctctgtaggttgaccaggctcaactcagcttggagttcttgtttgggaactctcatatggtggtggtttgatggtggctggggctagagtaatctgaaggcttgcctggggtggatatctaagatggcttcctgatgcacatctttggctcatcttctggaatgactggaagagccagaggttggtatctttctctgtccacatggccttttcacatgactatcttcagattcatcgcaatgttacagtgtaactgtggagtagttagagtttttatgagagcagtttcctccagagtgagaattcaagagaccttggcagaagctgcaagactttc

SEQ ID NO: 44624 - DNA, 4348 bp, Homo sapiens
accacaagcagatgctggtgccatgcttcctgtacagcctgcagaaccataagccaaataaaccccttttctttataaattatccagcctcaacataagatgaactaacttgtttaatctgttttactatttctgtaaggaacagtacactttgactactggatagctggattacctatgctatagtaatcttcagaccaggaacattagaacatttttttcttaggtgagatttatctgaaaccatctcactacattttacatttagcagatgtaactattaaattggtataataaagaaattatcctgcttcttgctgtgccctcacatggcagagggagagagagcacaagctctcttgtctcttatgataaaggtactaattccatcgtgacagcccgaccctcatgtccttatctaaacctaaataccttccagaggccccatctctagacaccatgacattggggtttcaacatatgaattttgggagagacacaaacatttagttcttaacactccccttctccctcaggccacttcagtctacccaagtacacagcctcctaattaaggggtacttggtgattcttaaagacaggggtaaattttcatgaacatctgatcaagctttttttttttttagacggagttttgcttttgttgcccagcctggagtgcaatggtgcaatctcagctcactgcaacctccgcctcccaggttcaagcaattctcctgactcagcctcccaagtagctgggattacaggaatgtgccaccacgcccggctaattttttcatattttagtagagatggggtttcaccatcttgatcaagcttttaaaaattgaattaataggtatagaacacaatgaaacaaaccaagaaagaacaagtggaaagaaagtagttagagcacttaatgtcaagttaaatcaatcactaagcataatttgtcttgtgggtattgatgatggcatgtggtatgtgttgagatttaagaatgtatttcacagtgacatggatggagctggaaaccattatccttaacaaactaacacaggaacagaaaaccaagtattgcatgttctcacttataagtgggagctgaatgatgagaacatagggacacatagagggaaacaacacatactggggccttttggagggtgctgggtgggaggcaggagaggatcaggaagtataattaatgggttctagacttaatacctgggtgatgaaataatctgtacaacaaaaccccatgatacaagtttacctatgtaacaaacctgtatatgtacccatgcacttaaagttaaaaaaaaacctatttaaatgataggaaggctgttctttacatcttacaactcacacattaaccaaagaggaaggtcccattactgcagggatcttagcagtactgggacctacctctttggtactttcccctgggcccccttcatttcactccctacccacactctttgtcctgagctcccacttaccaaatggcatcaggcttgttactcatttggctattttctcttgtgagtcaggaatgattcaatatcctggcaagggttaggaaggctagtctttttaaagagctctcttataggtaaatacaaacatgataacttgggtgtttgaaaccacttttaagtatgttttttactaattcttaaggttgaagagatatcttgggataaaaaattgcattagttgacaatttaaaaaatgtagtttgtaaagtctgaataactcttatttgtatatggtaaaaagtgtaaattacaaaaaagatatacaatgaaaaatgaatttccttctcatttcacatccctagttctctctgtctccccttcagaggcaaccactactaattacttgctagcacccttccacaaacattctctacgtaatcaaacttcaatattgtttatatagcaacctttaagaatcaattaggaacatactatatacatcttggttattattatttttaacttaaccatgttttgtttcttagaaatttttctatatcagcacaaatagctttatcctattcttttaaatggccctatgatgaggatatgccttaatttattaaagtagtcctctaataataggtatttaggttatttctagtcttttaaaaagcaaaccccactgcctgaaaagccttatatatacatattcgtgcatttgtgtggttttgtaagtatatttgtagtatatctataggttgaataacagcatgaagagaaatatgatcttgtagtggttaaaagcataattattatgggtttgactgcctgctactggcctacgacttattagccatataacctaggacaagttactcaactttctgtacctcagttttcttatctgcaaaatgggtataaataatagtatataccttgaagaggtgttatgggcattaaaggacctaacagaagtacatcatgctgatatccacatataatacattctacataaattatctcactaggatactttcctggaaaacaggactttctcttttaaaaatattaatgctatcattggatgataactgtttttcttcttgaaacttgacaaaatctcactactaagcttattacaaatactgatataattcatgctcattttggcttgaaggagatagtttggcagggcaaattgagagtaaagttcctgaccataggtataagtgaaagtctgaatttagtcttaatttgtttttgaacattagattaaagttcatcattttggacctcagtgtccttatctgttacatgcagggattagattagatgatccctaaagtatcttccagttccaacaattatgtctgtgcttattccattctcaaaatgagacctgatttatgtggcttagacaattgtgggagataagtttaaatcctgactcatctaactgtgactttgcacatgttgttccctgtgtgtggaatgaccttcccccttgtctgagtgttgagctgagctctgattcaccctaggagactcaactctggctgggccctctctttaaaaccttccccaagtgccccagctgagctaggcacaatttccctttgagctctcttagcccctgtgttatgtggtaggataagagtgtgaagccttaactgataacttttatatgttatcagctttggtattgtattttcaatgcacaaagaagagatggcactttcttttcttggattgtaagtttcaaaagtctgggtcctataaggaatcaaaaggcctatgtgcctagataaaatgatgactgggataaatcacccccaagcttccatgctccagaggacagaaagttcttcagacagaagtaagcaaaggttgagttgacactgtggattcctgacaaaggagtgagactctctgccttgtcctttcccctagctcagcacagggagaaggagagtgacagagtttgccaagaggtatgtgaaatctgaacacagagggaatccaggttctctttcctgtgtagggcccagggaggtaagagcccagagtagaaatggctgcacagggcatccaggtggagagacctgagggaacttgtgaagtcccatagagctcagcatggcattggatcagagaacgatattcttgtggtcaggaggagcacggaagtgggaaagggaagaggataatcttgctgagtttcctgaggcccagtgtggtgtgagagaacagaatgatcccatgtaccttaaaggggcaagggagtttgttaatagagagctgggccattctgttcagggaacatgaacagaatcagcagtaacttgcctagactgactactgaagaccagatggaggacaactcagcaaataaacagatgctcacccactcccagcctgcttcagagagatagagggatcccagatcagcagatgaagtctttacagcctggagaaatggaactctttctacagcctggagaaatggacctccattgttaaagttaagatactttattagaattcttaaaaatttaagtaaagatgtctagcccttctaaaacttctccattgtaaatgatttcttgtttaagtctctggattgcaagctctttgaggaaaggcacaaagtctttatttatttatttatttttgaggcagagtctcgctctgtcgcccaggctggagtgtagcggcgtgatctcggctcactgcaacctctgcctcctgggttcaggcgattctcctgcctcagcctcccaagtagctggaactacaggcgcacgctaccacacctggctaatttttgtatttttagtagagacggggtttcacca

SEQ ID NO: 44625 - DNA, 2041 bp, Homo sapiens
tgattgctggtgaaccagaggtaaaacaactggccaggagtgagctaatgacatatggctgacttggaaatcttataataataataataataaagttccaatattgttatggcacagtgggtgggtggttacaagagaaaaaggaaggttagggctgaacactgcagggatcttgaaacctgtgggttgctttagtaggcaaggtatgttggggctggccagagggatgaatgtggtaaactgggtaattttaggaaaaggatgaatattcaaagagggattgggattcttcagattgcttacctagattgtggagtgggttagtagagataaaaggagcctggggaatagattggagatatccagagttactccttcttgttaggcttttggataaatcagatcgtattttaatcttcaattcactgattctatcagttaccatttgttggtcgcaggcaccagaatccacttctggctaattggatcagagaaataatttactggaagtggggaaacttaaccaaaagaaaggcaaggaaagagacttagactgggaagtaaaggccactgggaggctgggaagcagggactgctgaatggtcacttcagggccagttagccctgtccctctgctcaatgttcatattccagggagaggaatctgaatgacctagcttgggtcagatctccagcccttggctagaggagggcagggtaaacctgaatgtacctgaagtgggtggtcctccaaagcaaaatcagagtgctattcccagaagaaggaagaaaggaagcagagaggacaaaaacaacaaatgcccatgctcactactgtatatggcttcaagcaaccagtgaggaagacaaaggtataaagcgataggaaggccctgaattctttgacttttaatctttctaccccattccagctatcttcttctctaaccttgaagctagacacctgagcctgtacttaaccaggaagtatcctacagctctgatgaagtcatctcctgattctaacacagtctgattgaaagaaaacaacttaaaacaccatagatttttatcaaaatgatatttatctttcattaggtacttattgaatgtctactgtctatcaattaaaaaaaaataaaacttattctcttcctgtcagaaattctaccagccagggaagcaagactgacacataagcaaataaattacatgattacaacacagtgtgaataatactataatagaggaacgaaaatgaactgcctgaggactcagtggaggtggcatttgaactagttcttgagaaacaaatgagcacttataattttaaattgagacatttattataaaagcaaatttgtgaccccaaattataaacattatttgcactgctgtcagcagcaatgatttcatccactggcagcatacatattgttcagtcttagagggctaagaactgaggttgtaaataataccttgaaagtcaaaaagtgaggaacaaataaactgtcacattcctaaattacaacaatttttaaacaatgccctgtttgcaatactcatagtttcatgagcttaactagacgtgaaatgtgctaggtccctccaggacttctcaagcccatcagcagctgtcactcatgggcttgggcagcttgaaggtcagagatgctgctggatagggcaggggtcttggatcagctaccgactttttagtgtagtggctacttacataattaacatccatatcttgtccagaactcatttacagtatgtctttgtgttggcaatgtctctggatttcaaacttttctagaaatcataaaatgagagtaaggaatatagtggtatcatcatccctctgtatctgcaagggattgcttccaggacctcccctgaaagattccaaaatccatgaatgctcaagtctctaatacaaaacagcatagtatttatatatgacctatgtacatttttgctgtatattttaaataatctgtagattgcttataatatctaatacaatgtaaatactatt

SEQ ID NO: 44626 - DNA, 3546 bp, Homo sapiens
cctaagtgcccagcacatgacctaagcacttgatgaataaatgagtgatgaatgaatgaatgaaatccccaaagcagaatcacactgtgactaattttgtgacacacttaccattctcatttgactgacatcctttgaagacacccctttgacatcatttccttcttgtctactcctctcccttagaaaactctcctgcatatatgtattgctttataaattatctttcacaggtaccttattataacttgctttctgttttttattctttcaaagcgatgctcttatcctcaagaccactggaaaataaaaagaaataaaaaaattctcaggaatttatggcagattttgttagtatttcttactgcttaaaatatacatttgactagaaagcaggaaaaacatttgctctttcaggatttatgtataaaattctcttgggtctctaacatggcattcaatatacatcctcaactcttccccttccaaacttgagttaggcttaggttttcatgtagcttcatcgtgtagcttcatgacacccaaatttaagatgggccattactgagttggtttaaaatatacatgataactttcaaagagtgaaaattaacccattgtctcttttgtatttgacctagaagattactataacatactatctcataaaggggaataatttgaggccaactttcctaactaatattgtgattataaagggaagaccctgaagcttttctatttccggaagaaaaacctcttaaattctacttttcagacatgatcaaaccaggctctaatgccacattggcagctttagaatcatagaaagagctgaaagagaccatagtgtcacccagtccaaccccttcattttggagagacaccgtgtagcttaactaggatcacagagctatttagcggcagagtggggcctagaatccagatctccttaatcattgttcggcgatttttccaattcacccaatgccttttctcctacagtcaagatttagaggttttattgacacatattcagatattgttattcttaatttaaaaaatttaaagattgatgtgtgaagattgatatcattgagaaaattctataggcagtgctgggggttgtgttacatttctcaaattaaaataaaaaaaatgagggaccaaactagatgtgtttgggatcatatttggcatgaggatcagcattcggtgacccaattctttatttagttatggagacaagtctagggcatatatgaaacaggtgaacaatatacagctgttttgttaagtgatacagtacatggtacagagaaaatgtttattgagcagtgcaggaggaagaaaaggttaaatctaggtcctgaagaatgagtatggctttgtgtgcatttggagaagcagggcattccactaagagccagcagcagctgttaagtagtgaagggacaatgggcagggtggagcatgtcttgcgtgttcatgggtgcctggcgaggaagccagtctgactggaaaataagcccagctggtagggtgctgtaagattatgcaggaccttagaagtgtgataaaagaggtcagacttagagaccacagggagctgcaccttgcattttgagctacagcgtatcttaacagaggcctgtttgatactgtcacttggacagtgtttggcagtatgggtttgaagggtctggaaaactacttatgaggcccatgggtatctaggcaggagatggtaaaatgagagagataagtacagatagaaaagaagaagaaactatgaatatatttcaaagggaaaatcactagggtaattgtttagatttggtagattgagagaagaaactattcaaagtcctaggctttttgcctggctgaccaagctcaaagaagtttgtgtcctgaactccattccctgcaaagattagagtttgagctgattgctctactagaacctattcctggttggcaatcttcctgtcctcatgtttcagattacagagcccttgtcttaaaggcatgccttatttccctcaaggaaaaactatttgtaaggaagttagttggttacttgcacctactgtctgattattgactttgccacttagttatcttgttgttaaatacacagaaaaagatccctggagcccattagtctccacaggtggaaacgtatttaatctttgggagaaaaccaaattacttacctagaatgtttgttctctgactaataatgtagtcatgttgatccaccccttatgcccagtgaatttccaaagatttggcattgagagagtggcattagaaattgtttaactcatatatatgactaagggagccagtaatactcactaggagactgatgaaatttaagaagattctagggcacaaaggactgcaaatcttttacagtagggtgacctttttttttttttcctttctggtccaagggacatttgattccattactgccatatctccttctcctgatataggctgaaaataagatacacttagaagagagctgtgctgcgagtctttctaatgccagcaaacatttatgtagtgaaatatttaatactttcagtgatcttatgaggtagatagaattatcattcccattttactgataaagatatggagaaaagttgagagaggtgaagtgagctgggtgttgaacgctagctgtttgactttaaatcatgacttttcctcactctactgtgaagagcttgggcaagaagtcaggctcagcaaacctgccaacttgtttacatgttttatttttaaattacgtgacattggttctctacggtttggacttgtgtattacaacaagcaatacagaggcttgcatattactctccattggctgttagctcttgtgaagtaattaggctacaaaagtcttccttatagttatttaaatcatccagcaaacccaaattcttgttttgcttcttacaatggcctgcttgccttgaaaaaaatgagtattccatttctcttactatatttagctgcctggaatggtaacttcttcttgctttttgggactttggctcagagccaaggtcattgtgcaagaaaagggtgaaatggttggatttaggctgtatcttgtgtcagtcatttttgcaaatgcagcattttgaccaaaatgcagccacatggctctaggaaatgctggtttgcaaacacacttggtgtggtttgctgttttgttttttctcccccaattaaggtttcttgatcagcttgtctttagaacacttgtaaaagtgttctaaggtagaattctggccaggtgtagtggctcacctataatcccagcactttaggaggcccaggtgagaggatcgctggaggccagcctgggtgacatagagacacccctgtttctataagaaaaaaaaaacaattagccaggtgcctgtattcccagctacttgggaggctgaggcaagaggatcatttgcactcaagagttccaggctgcagtgagctattattgtgccattgcactccagcctg

SEQ ID NO: 44627 - DNA, 1310 bp, Homo sapiens
actggatgatttcctcacatttatataacttcagtctcctgttctttttactctggctgaggtacaaggaatcaggaaagagagggcaactgtgaggaaggagcattctccaggtgggaaggttagtaaaattaaccatacaattacagaatggggaaaatgaggcctgcctaggtgattagggaaggagatggttacaaacttggagatgtctaatctcagtaagcaggtcaaagaggtcagctttcacttagcagctccagagcacaatcagatgagtatagctaaatgttttcaattctaaaaaatcaagtcagggagaaattttgtttgggcctaatgggaaacagtttctctgctcacaacatttctgacaccaagtatatggattttctagaccaagaaattctcgagttctcttcagagaccaactggggatcaacaattcaatttaattctgacacccaaggtgagtgcagaccctacaggttaagggttcagtcccacaagactgctccccacttctgatgccaatcacaagtagtgagtccccaggttacctatacttctgacctggctacgtggacccctcctcaagtctgataatttgctataaccactcacagaactcagaggaacacttcgtattactggtttattataaaggatattctaaaggatacaaatgaacagtatgacagtcagatgaataggttcataggacaaagtccagccaatggtcctaggtacaggaacttctgtatccgtggaattttggatgcatcaccttcctggcaagtggacacattcaccaacctggacactttcccaatacctttgcttaggggttttatgaaggctctattatgtaggcatgattgattaaatcattggcctttggtgattagctcaatctccagctcctcttccctccccagatggggctgaaggtttcaatcctctaaacacacagttggttcctctggtaaccagcctccatccttcaagactcacctcattagcataaactcaggtgtggttggaagtggcttattatgaacaatgaaagatgctgctttcacttctattactcaggaagttgctagtgttttagaagctttgtgccaggaactggggacaaagaccaaatatttatttattattatatcacaacatcacagtacctaagaagcaaagctacattcagcaagtactgatgggagtcaaggttatatgttggagggcaccaatttatttgtatggatttgctttatttatttatttttgtaagtaaataaatttgtcttgct

SEQ ID NO: 44628 - DNA, 2411 bp, Homo sapiens
gttagtagacacacattaggaaatgcactgcaaaatataaagtgggagtcttgcacctttgcaaggattaatgctttgaaaatatgatagctcagagaaaaaagaaagttttaggaacttagtgccattaggaacttaaggccattttctaaagcagccattctcacccagagggcaaaagacgcctttcagctggagtggcttttgccattgcctggtgccagggagctgaagccttggcagctggttgtacacagctctttccttgcaggagtgccagtaaggagaggcttccagagcatgtctgcacaggagaccagagagctcaggtttttaagttctaaataaggagatttattctgactaagactcctccttagtcaatccttgatgactccagagatggcagggctgttagtttcgttatgttatttaaaagagtgtgttgaagaaaatgttaattgatccagatgactatgtgcattatatcacaaaagaaagttcatttttcacacttttgtcatcatcagtccctctattttttatactactagcctgacctcttaggctcttctagaatttcagagagccaagaaacatgttttttaaagtaccatttttcaacaataagtgtatgaaaataaaaacagtttgatcatcttctctcagcaaaggtaaaacatttttaggcagtaagtaaatagaaggttgttttaaggtgcactaaacctgggcaaggaaaagtattctggagacaaacaagagcaggagagatagtagaagcagagaagaaatctgggtgggatattctacaaccctgtgacccctagagtggtctgtggaccagcaatgtctacaacacctggcagaattcagtcctcttatccctccaacccactgaatcagaatctgattcttaaaaggattcccaggggatttgtatgtacattgaagtttgagagctcagctcttggagcccagagaggaagagttctgagtaaatctgccaccactgaggctctcaaactttggtgaatataggaaactcgtgaaaaggttactaaaaaggagtgtttacgggtcaaagaggttctgattctatagacttgtgtggtaccttgaaaatctgtatttctaacaaattttccagggcttctgacacatatgatcattgaaccacatgttaagaaacctctactgctgatttcatgatttaatgaaggaagactatgcttactaaataatacccactgaagcagcaggccataagaggctttctgcctgggagaagcgtaatggagttgcctgtctaagatatagttactggttgcagggcccctaagacctcatctttctagactgatctgtgttctaatcacattgagctctccagtttcccaaaactagccacatgctttgcaatgctgttttctctgctcaagtttctgagtcagtttggattcttgtttaaggtatgtactagtggtgtgacctcaagcaagtgactcacaatgtgttacactcagtttgctcatatgtaaaatgggttctgtagtatctgtctcatggggttatcgcaacaattacaagagaaatggcccatgtaaaatatatagatagcagagtgtatagcatttaacagatatttagtacatgatcataactattgcttgcattctttcttgtctgaagaactcccgtttttcctccaaaacttagttgctctttgtaagtccttgacaagctccccactaccactatgaagttgctcacacatctgtgctctcaacagtacttaaacatttctctctgtgtcccttgtgatatgttgttattcgttctctttctttctgctgaactgtgagctcatcaaaacaaacaataaaaacaaaccctgtcttatctgtctgtatagtgttagcaccacacacctaatgataaaggcaaggtgattgtttatgggctaggccctgttctaagcacttttaatgaattaactcattgattcctcagaacaaccctattaggtaggcatggctgttacctccattttatagatggggaagctgaagcacagataagtaacttgtccaaggtgatactattcagtggtagacctgtaattagaatcaatttaatagcagtctggttccagagttcaaggcagcagacactcactcaataaaggcttgttgaattgcattacactgtgagtataccagctttagatgtggtcttcctgctttaagaaatggtgttctgaaggtgactaaggagaaagtcaaatcattgttacagttttctggtgtgtcttattgacctaaaacaatatcaaaacatatcacagatgtacaatgtttaatgggttcattctgaaaggacacctcgaatctgttacgaaattgtgaagt

SEQ ID NO: 44629 - DNA, 1980 bp, Homo sapiens
atgtccgtgtagaaactagtataaaatagtgtgtgtgtgtgagactcagggaaaccttttaaagctggtagctgttcagttctcaagttcgacaataaatggtattgtttaaattaggcttgtgattttttccgcgtgtcagatgtgcagaaagaacgtgtgggaaataacttatggtagatatgaacttcaggtaattttttaaagtcattaaactctgggcagatatgtttgaagcaaagttaactggatagaataaggaatgactgtagtgcccatttatgcctccaagttttgttaagtcttaaatattagaccaaacgatattgttttgcttagtttttacttctctgcccatttccaggaagcaccaactctttatttgaaaaggacaaactattttcttatttctgcaaatctgtttgaaaaagggaagaaccaatcttgggaaaaaaattcagcctgatgttctttttcctagcatgccttttgcccgttaccacttccacatcccctgtttctaagatagtctgaaatttcaaaatgcctacaaaaagttctctgtctttaggttgtttggaattgttaattattggtggcaatggatgagtgttcagcaccttggaacttttgcaaaagaaacttaataaggatacgtttgctgtagttggaaaagtatttgatgaacagctgacctttcaaatgtttacatgagttgaatctctgaactgctaatgtttggaaggtccaagttccaattcagacttagacactgaatccctttgtagagaaagctttgaaatctcttcagctgtagttttctctctctttttttttttaaggccaacttcacctaccagttaattggttaatgtttgtgaatgctttgagtaggcaaaaagcactttctcagggcagtgccccattgttccctctcccaattgtggtttgccattcacctgagtaagtggataagccatgggccaagtttgcattgtagaaaggaaatgattctacagatacttagccatgggatggaaaaatatgtttctttcacgtagagtttgtgaataaagcttccactgtgctgagcaaaaaatgcaaaaggaagccttgttgtctggattaggtcacttataaataccttaaaaatatttacataaatgtctactgactaaccaattctctgagcacattccataaaaatttcttctcaactgcatttggaaatttgcttttttttttttttttggtccattgtgttcgtggactggtgttcatggtgctcagttgacttaaagaagccaatccatctaaaagaactaggaaggtgggctgaggaagaaggttggggctggggaaattaacaagagccttctttctaattgtggctttttcccctgaggtactgtttcagcatactttttttttttttcttagcgtcagttacttcattgcttaagtgactcttttagctaagttcatgtgtttctcatgggctactccaatcagcagggcagtctcaccctaactagtttcaccacactccctttgtggtactggacattatacagagagcagcaagccagggtacttccgtatcttcattggaaaatgtcgtttttaaattgctctaaatgcatgcatcattttgtgcttgcagttggactataatgggaattatcagagaatcacatgtctttgccatagacttaatctggttcccatgaggggaaaaaaggattgtgttgttattattggaaatagacaaaagaagtcaagggatctctattgaggtctgatcacaccttgaaggtatttggaatggagaccagagaggtcacacttaggtgttttatttgacctatatagagttgaaaaaaatttttaaaagttttcagcatggtgttcaaaaattaaaacagaagtaaaaacaaaaacaacccaaaccccaaagtttccagcatttaaaatctagag

SEQ ID NO: 44630 - DNA, 3458 bp, Homo sapiens
ctttaagagaaacactcatatccattattttatcatgttcttaccacatctctgtgaaattaggaggtatggaaaccaaaagtttaagtgatcatttttcatcattatttacttggacacctaggccagttctccattttttactaaccatgtggtgggcataatgaacacattattaatgtctaataaaaaattgtcttcctgaaggcttgttgattgacagggttaaaacaaaatcatgatgtggaactcagaaataaagctctgacacctttacattattggcatgcattttaaggctttattttaagtagctattttcaaaattgaaggttggcctgatggaaaagtcaactcagggctatctacttgaggattgtttgcttgatagattagcaaaacagttgctggttcattccaagtttggctttttactgggtacaactgaaggttggtatgtacccacattgcaaaatagttttaacagtaaattcaacaagatggaaatgccttctcaattatactaatgcacctatggttcaactcccgagtgggagaattgagaactgattttaaatgaaaaactttacattaaaacacttatttaaggtctgcaaacatattagaaagaaatggcctatcgttccttaaaattgcttagattttttttccccctgctttgcctatcttatggtctttctcattctctttttagcgtcacaaggcctgaggttctattcagttacctcttgtttccatacacaatttttgcagttggttctgtcaaaaagatggtcaatatttaattgactgatgtttcagattttagatctggaaaagtcctgttttttcaccaaaatttaatcatcccaatcattaaggctgtccttatgtttgctcagatcaaactttcatttcctaaattttattgcagagatagagcttggctttttgtttgttttattttatcttctttcagtgatggggtctggctatgttgcacaggctggagcacagcggctatctgtaggtgagatcatggtacactgcagccccaaactcctgggctcaaggaatcctcctgcctcagcctcctgaatagctgagactgcaggtccatgccaccatgcccaactctaagacagagtttattaatgccctcagaaacttttattaagacagttgaattctattatgcttatttttctctaaatgatctaacctaaaaatttcaagcatttttattcttctttttaaactctgtgattttaaaaatcttgaaacacatccaactatatggttgactcagatttacttgtaattcattataacttccaatttttttcatcttaatgtatcaaccctttatggacagggaccttactttgttccattttcctttcgttaattcctatcctgtaggatgtgcctgttatagtcataggatgagcttcttacatagttatttacttaataagcaaattgatagtagtctgtacctgtatttcttaatagtgatgaccaacactttaaacattgttctcatataaatgttagataagttagtaagagtggtaacaaaacaatgaaatttttttacagaactgagggttatagcaactattgcacaataatttgtgttgaagataatgagaaagttatctcagtaccattttatgtccaccttgtttaccctgtcttttgatatttgaataggacagcagtagactttaaagactagccttctgtggttatcttcttttctcccttgattaaatttttaaaagagtagcccgattcttagaacaaaattttaccacttggttggggcaaagatatcttaacccacaagaacagtttatgtatatcgtaactgcccataccttaccaaatgagactctgattctatgtagattattctaagcctgttatttagaaagattctgcagcctttgagagcaaagcagtcatgggatgtattccttaagttggtgataggtttttgcttaacattttaaatggtgtctaaagtccctgtaaatttaaagagtgactgttgggttgctagcccagtgattaagaactccgtaaatgtcatatttcatgggtagatatgaataactgtaacttcttatctacagtgacctcaataatttttctcagtgatggagcaggcatctaaaggttagctctttaaagttcaaagctaactcggatagtgaggcattggatcagatgtgcaagtggatttttcatctaatgtgcagcaatgtcaaagggctttggagtttgcctgcctgactttgaatcctggctctagtatttgcaagccctgtggaaatgctagtaaatgatttaacatttttgtgtttgttttcctatttgcataaaggatataattatagtactatcctcgtaaggttgttgtaaacttaaaatggtacactcagcttaaagtgctcagcgctcaataacagtcagatattatcattcttccttttctatgaggtatttctgtatctttttttagccatctgctcaacttttccaggacatatctggcacagggactacttcagtctgctcccacagacttcccctctcttccctttcttcctttccaaaccggcagtggtgtggaatgcagtctttctaatttgttgtccctttcattttcagggttttgacattgcttactaggagaaaacagactttaacaagcatgaggaggtgttaaagcttaaattctacagagtacttacagttatgatctctggtatgattcttgctttctttgcagaaatgttctttattcattcaaaaattacctgctttctcctttctccatgaagaccctcttttagaagaatcagtacagagtgtgtgtgcttgtttgatagggtaacaattatagatttttgctccatgaaggaaaggttcctttgggaattcctttgcaaactcagcacaaagtctgttatattaataatttctcaaactcaaaaagtgcttgtggttgctccgtatgggacttctgaaaaaaaatgtatagctgcaatttgtggggaagctatactgagaaatagattgtgaaatttatcttttataagggtattgttgatgtttttgttccattcgttgtcctcttttgaataactcttgggaaaaatttctatcttgctttagtatcagttgattattgatttattttcctaagtcattgttccatcttaggactcatactatatataactgataaagctcatcttttctgatattttgccttttttaaaacctcatcttttttttccctttttctttttagtgtttacattttgacttagtgactttatattttaaatatctttgtaagctatcttaaatagttcctaaaaccaaggtagctgttgtatttgtaagtattcaaactagggcatcctaaaatccataatttcttc

SEQ ID NO: 44631 - DNA, 1934 bp, Homo sapiens
tccaggggtcagtaaactacatttttatgacttgaatttgtttttcaggatattacatcatggtttccccaaagcacaattgtgtgctgtcatgtccatttttcatgttccatatcattcctagacttaaaatagtaagctctgagcatcatgtcttactggtcttatgacttaaacacagaagaggtgaaggtttaaagaaaaaccagacatactccatgagccaaagggactggttttctataatctctttgataaaaaccctttgacattattctcatgggttatgtgactataggctggtcaacttgattattttcccttgagtataataaaagtgtgtaggagagattctctttaaatttgagatttaagtatgatttctctctcacaagatagaagatggatatatctcatcattttatttttgagaaagaaaggctttggtgttcattgtttaagttaaagcagtcctgttcttgggccaagaacaagaaaaaagaacaaaggaaaggactggaaacatttacttctcaaaaaaggatgagaaatattactttctgtcttctagtaaaaatctgttcttcagaaagattcaaatattccttcacactaaagtgaaagtgaccgaacacagcttaaatatgatttctcccaaaggaagttgtaggtttacatagaccaaatctttacagaggactctcccaattcttgatgtacctatttttttggtctgtttgcttctatttaaaatacataatgaattttgttccagaaaaaaaaatttaaggccacatattacacaataagaaaataaatttaaaaataagtaattgagaacattaggatgactttgaatattcagagttttggttttcagagaaaagaggaaataactgtattttgttgttgttagaaaactcttattttaccttgaaatcttagcagagcagggatgggatggggtcactaactccacctacagcagaccaacctttcaacatatgtcaataattttatggtgaaaatatttttctctctcagcttgtttgagcatttagtacagtttactattccagctttagttctccggtagccttctctttggttacttattaacctccctttaaagtacaacttagtctagaaaggtacaaagttcagttactgttactattgttcttgaatatgataataaataaggccactctataactggaaatgccttctaaaacatatttgtagataaaacagctagtctgggggcatcggcgctgaacaccagctttctcagaggtaaccctgcagtaacaggacaaagctgcccgtgtgaatgggaagtttgcatgatacctgtaccccaaatcacccatgtgcttcactcccatcttccaccttctcctttctctattattatccttataaggataggatgtcaaaggagatcaaatattgccccaggggaatccagaaggaagaaagcagtagatgtcctcctctctatagatatgtctattttgaaattcatttaagatgatgattgctcagaatccagaattcaaaccgaaaaagggctagtcagttttcccccatttggagtagtggaaaaagttgccctagaacactagagtaagtttctagatgctatatctgccaaccggaaagagactgtgtcccttacttgccttcccagaacctagaacagtacctggaacatcatatgtgttcaataaacagataatgagtgtaatgggagctctaaggtactttttagatacaggatatcctttaattcttacctgttaattgaacacaaataagctcctgcttcttcttatactgtgttgatcaaggatgctcaactctggaatctaattgcctgcattcaaaacatgtcttcctcacttactagctgtataatatggggaaattgc

SEQ ID NO: 44632 - DNA, 1281 bp, Homo sapiens
tcttacagaagattaaatctaaaaatctgcatgagttgaaacatttaaggagcagaatggagattgtaacttataatgaaatatgtaaattggtaaatatttagagcatgaataagaaataattttgaagaaacatgatggcaatctatttataagccatacatttccggagagttgtgaagttacttaccagcaactgcctatatggctaacaataatggagtaagaccaagaaaagaaaaggcaatattttaagtcaaaatttagctctggaaactttgtgaaatacttcatgtcagtattaccttattattgttactacccaaatggaggaaagcctaatactccatgaaataaaacaaaattctagatcttagaacttttctaagttctgaatgaattgcaaaataaagactgggcgattcatctatttaaacaaagacatgttagctacttactgtgtttgagacacagttctagtcaaagaataagatagacaaggtctctgcaatcttggagcttacattctggggaaggcagtgagaggagagaaaattaaaacgtaaaaacaacacaaaacaaaaaagccaggtggtggtatgcactgtgatgagaacaaagcagggttatgttttaccaagacacaagaagattgttttatagtatttggtgttagaagatgatgttacactgagaagctcaggaaaccatatccataatccaagaaaaagtcttttgcttacatttctgaagtttgctctgtcctcctctgacctctttctggccaaattcttaaagccatagtgtaattccacattcttggtaaagccttctaaaatattcctgccaggaagaagagagtgcacctgatgtagtagccactgtaagaactgtgttggagaatgatccgattggccagtgcaagagggattgcagagaagaagaaaccacaagcagaaaaaccagatgaggaaattaagctaaatattaactatctcaagaatattcccagaagtgactgctaaatttaaatccctgctcacaatgaaatactgtacagcaggggttctcaaactttttggtcttaggacccttacagccttaaaaattattgagaactccaaagaactttcaattatgtgggtcataactactgatacttactgtattataacttgaaactgaaaaaatttttaaatatttataaacatttaaaaataataaacccattgtaagctaatgtaaatagcatgtttttattaaaaatcactttgttttcca

SEQ ID NO: 44633 - DNA, 1532 bp, Homo sapiens
tgttctacccaacagccctcttggccgctcctccctggaatcatttcctgtcatgacatttttagaaaccaaaataacagcatttacaatgtaacagctaaatattcccatagaatatcttggtaaaacaagcacttttgcatggtagtttttaacacactattggctatgtattcagactgaacctcttctgagtgtccacggtttctagctaaccaatgggctgattgcagcattgttcgctgtcgctctgtaatcacatctggcatacaaagctggcggcatcctggcttccaggatcttcttgtgtagtgtcttggtttaatgtcagaacacacagtttattcagagagtgagggggagggtgcttttaataataagaggcagctgtgtaattctctgtaaaaaatgaagcagaagaagtacattgcaatattacatggggttatgagataccacaaatggaatgttagttggacaaattcaatacattttgaattctttggatttttttaaaagaagataatcacttgtgcttttttcaatagaattatttacttagccttttacatcttgaattttccagtttaaatttagtacagcataaactcagagaggtgctgggaaaaatttccaaagtgtctgtagacagtgttcttaaaccacgatggcaaaacctcaaaaataggtgcagctccatcaaagttaaattgaatgactcaatgtctggaccgctcaggtttttttctagttagggaaggggagagactgttcactgtagaaattcagaatcctggatggaggaagtttgttttgtttttgtttttagagagggggaaaaagtgccatcatgggaaattagaataaaaacagaagtctctttaaaagtgtaaaataagagtcagcttccttgttttttgttactttttattttcaaaaattacatggtagcctggagctctatcttagatatcagtttacccaacttccacaatttctagataaagccttgaggctcccttttccctcgtgtgtcttcctttgcagtcactttcccacactcgcttgtgtatcagacaaggggtggcaacgcgactaagttttggccaacaatgtgtaagggcaagtatggtggattttgtcactgttaaaaataaaaagtgccttgataaaaatgattttcagcttcaccgatttcacattttttgtagtctccctctttctctctctgtgtgtgtgtgtgtgtgtgtgtgcacgcacatgtgtatgtgtgtgtctgtgattacaaaggctagaaatggctgcatgtttttgaatgggaatgtgatgcttagagcttagcggccatcttggacctatgaggtggcaagactaagactaatgatggagagagagcagagtaggaggatggaaagagctcgattcagctagccactgtaccaaatctggaacatcctacctctggatttctttctgtgtgagacaattaattgtctttatttcataggtcacttgtagctttcagtcagttt

SEQ ID NO: 44634 - DNA, 1030 bp, Homo sapiens
ttctaaattctagagaattttagttcattaaattttaggtttatgctatgcagcaaaagtgtaaaagttttttctttgctgaagaaaaactggatagagtcccgaatatatcaatactggcagtaaggttttagacacacttgtgcagagccagagataaataaccacaatactagcctccaaggagctagaaagtaatggttgtgtggaaacttttagagcatctatagtcaaagctggcaaccactttatctttaactgttctaacactcataacagggatctcataggagtgtacagaaaactgtaaatttttatctttttccttcccttagtttcacactatatactctccctgttaagcaatagaagggaagaggttaacaatttgccccactgacaacagagtttacttagtttacacagaagaaattttctgtgtgttcagggctatcagtgtttgctctctgtgtaatggaaaaaaaaaaaaaaaacaaatagtgagtagacactggcaggctgaaataccaaagaagcataactaggctttggttctacacatgcaggaaggttctgcatattcaaatccattactgatgattagttttagtttaaagacttggtctatgtgagattgtatttggaaaatccatgcagctggggggacttacggcaaatgttattgtttcttgttctgtcttaatgtctttgaacttcttagggtgctagctatgaggctgactggtcttatatgggagaatgaactctgtgtgttcacagcgcaggacccggctgaatctaagtgtatcccagaagcagcaccaactaccatttggattgaggaggcaggtgattgtaaatcctgaaggtagaggtagttgaactgagaagcccaggcactcagagaacctctcaaaaccatagcatccctggtcagaggttccaaacttggcagagatttaaaaaacacagactccagcatcccaaccaaaccttccaaactagcatatccaagggtggatcctggaaa

SEQ ID NO: 44635 - DNA, 602 bp, Homo sapiens
tattacagcctattctcacttttattctcctttgtcgggcatatttgctcatgtctaagtcttttcagttattcttaatcctacttaaaatctttgggtggattaaaagttgcatttccttgtagcttatgttgcaagcatcaaatgattaaaaaacgaagataatttattttcctaccataagcttaatgactcatattctggagcggatgggggttggcagggggaagaagggaggcaaagaaaagtaaaaagtaaatagcaggcatgtttcaggagaaactccagccagggctgttgggttgaactttatcgatgctgcttcatgatatgtgtcaaaataaatgcaggaaacagcttttgcctcaaagcttggaatgttgtggttaactgatatttaggtaaaggaatgttacaattggaatagctggcctaaaactcttcccaaaaccatcaattttatttattaaacttgctgaaaagacgaaaagtgacaaggaaaggcacagatcatttatttatttgacaagtttctcagagttcttttccttgataaagcagcaatgacgatgaattttattatgcttagtgtatgtgtttgc

SEQ ID NO: 44636 - DNA, 2866 bp, Homo sapiens
tgttctttattgattcattggtaactgctgaccccagaactaagtgataacactgctttccctttggtcagttctttgttcatgtattctttacagttctccgagggcttactcactatgggtaaggcactatgcatggcatccaggaaaacacagcggcgcacaaggcgcactctttttgccatccacagtcgtgtacacactaaacatactaaaaactctgtgtgataaatttcatacaaagtcatgcaaaggaagtggttaacaggtttgtagaatgtgatcatgagtaggcagattccagccactaaaggctcagcatggaccaccttgtaagtatgctgcataaggattcatggtgagtaacagcttagccacctcatttttttgaaaaaaaaagaaaaaggaaactcacattactgtattctttcagggcttcattttgcaactttcatgcactcttgaagtaaaggccatgacatcgtaactttggtttcttttcaatagttcactttctgagagtgtaagtgggtacttggtgtatcataggccattatcagacctggacatgatcgtgggtttggtctgttgctcactgtttcagaggcaggtctaagctatgcctcctctgtttcagaaaaattgttctgtgatttatgataatattttcattaatgaggtttctaccttttattactattaccttcattttgaaaaaatcatagtcattgatcacatttcaaccattttaagataaatgctttttcacattttaacatctttgaaatcaaatgtgtcttgtaatcaatggcatgtcatagtttagttggcagcgttcctcctcaccctttcaaaatttttctttagaggcacatgcctctacctgtgaagcattggagacccaccccccaccatgtttctggtacatgacacattaaaggaattcagggatgcatgacatttgggtcctacagttgtgagaaaaccaggtcactttatctgatatcttgacatattactttgtcctctcctaatagcatagatatgataaaattggcttatgaagttatactgtttcataatgaattcatctaacatttagtgaatgctataaagcatatgtgtttttcccctatgcactatacaccatggccacatttgaagagtataacaggtgaaaaatacaatcttatatgatgagttaatcttataaaatgactaagggaggtgtcataatacaatatacaaataagtactaaatgagaaggtcagacaagataaatcccaagtgggaagaggttactttgggctgggaaaagttaatggaagatatgagaggtgaactgggctttgaaagctataaaaatatgtatgagtaaaaacagaggaaggggaaagtatgtttttattcccaatttttttagcatctatctttggtcgacacagctgtacatgaatgcaaagtggaagtgtatttttagattcagagcatgtatttgaaaatacagcatacatttatgagattggctcttttactaagaaccagttagaatgtctgcttttctgggaattctgaacacttcttgctaaattagggtggcaaaagaagacagcaaagcactgactcacatttgagatggcacaggaaggattggcagggaagatttaattccagggaggtttcaaggggacttgctgtcttagatctgaatgtgaatttagtataaaccatgactcagagaacactcttgaactgagtaacatgactaagcagttatcacctaaaacaagctagcataggtcacatttgtttatttagcaggtaattttgaggtcttctaaataatgaagccatagtttttggaagatagccttagattcccctgtggtcatgccacttatacctccgatcacagtgagccctgttcttcctgagatagggctgtgggatgctgctacatacagcacttagctgaggggtgaatttctgttcttaaatgggcctagcttcctctttctcttctccttcgtttcctttctcacttcctctaacattttagaggtcagtttgagcattccagagcagtttatcaataaagattgatgctatttctttaccttttgtggtgcagttctaaacttttcaattgagcgatgaagacccactccacaattgtgaatactagattacattgcttttttttttttttaaattatgttttccattatcttttggtcttaatgactgaaagccctgcgtgaatacttttaagaagctttcttctatttaacaatttactccaggcttaggacatcagagtcccattttccatccttttcttttttttccatacgccagaggagcagttctcaaccccgcagacattagacactttcacaaaatactgtttcctgggctccacccacagagatcctgatttattagtgtgaactagggtttaaaaccagattaaaaaaacaacaacaaaactccccagatgaatagagagccaggcttgagaaccattgtgttggtattggaatctggtcagaactagcgaaaatctctaaaaccggagagcaaggctgatccggtctagagaatcatgaggcagaatttctctagcagctgttggaacaaagacttctgtggatacacagaacattcttggaccccaatgctgaaattcccctagtttaaagatttcaacatctttgtctgttttctgtcctttagcttcagagtgaaccactcactcacccctgcagctaatgtagaaagtacctttgtgaaagctaaggaaagccatccatttcttaatacattattgttattttctgggaaattgtcagaataatatatgca

SEQ ID NO: 44637 - DNA, 846 bp, Homo sapiens
gttttaatgtggttattccaataatatatagacaaatttcttatcctactttttcacttagcaattttcattagttaaaaaaaaactgatacgatgtcatggaagaatcaaattcccatcacttagactaacctaatacagtgattttctcaaaatattcagtctcctgagagtaaaggagtgggggtcttctggttccacaatggctttgtaaaagcaagctggcttcacttcttcccatataaaacaaatatacattactgagattataaccagcaatatcccagaactaaaatatgaggatgagacagttcccagggccacaaataagtgaaaaagccctgagcagatggtaagagaatctgactttcatatttgtaatgcctcctcctaatctggcaacaagagtgattaaaaatttcccccaacccatggtttccacactagtaaaagtgagatcataggggataaccagcttcctcatcaccttgggttccatgccaggagaactttccctgcttgaacccacaggaagcatcaggagtaactgaataaagaaatatccctaaagagagataaaggcaaaggggaggggggcactagtaaccccagccctggaaactctgctctgtacctggaccaaaggagacaccaaatcagagtgactgttcagcagcactacactgtagaaagttcattctacaggtcccctggctggcactctgtttactagaactgaagcaaacctgggcttgaggcactatctagtgcggaaaaggaggcagaaacctaaagaaaaaaagagaaagataatcaacaggtaaattacaaagaatctctaagcaa

SEQ ID NO: 44638 - DNA, 1961 bp, Homo sapiens
tgatcaatagaagactgattcccagtctgcgtgtgtgtgtgtgtgtgtgtgtgtgtgtgtgtgtgtgtgtgtggtggggaaggtgtgccgatgacagatacagaatctttctttcctgtttcttccaaatattttgtctctactctggctattttctacttaagttcttaggcatttgaaagccaaacctagaacaattcagacttttgtgctttctgccttttttcacccttctccttaggattactctctgtttgaatgagaaggaaagaggcaaacactggaagaaaaaagacgcatatgttaatatctcaaagatgatatcactacaaacagaggcttcaagctttaccctgattttgtcctaaaattatatgtgaatagatgctatccaaaggtcagagtaggcatcaagaatgaaatttaaacagagcttcgagacttctgtagatcctaggtattttggaaaacccgtaacatccatccttaggactccgtttccaataagagcttctcagttgtataacgtaaatatgttttaatgtcataataactactgaattgttttaaacctttcacaaatgtagacaaattagttctcaacgttatctgttgaatgcacaggccactggtcttatcacctggagagttgttaaaattgctggtgcccaagctctacccccaacaagcccaattcagactgaattgcctctgttttatctaaggttgtgactttgagattattccttaagacttattcacctactaaataatgggttaatgttctcacaaggtgattatgttgattttggaattaatactaaagttaggagaatgggatgattattaactgggagaattttgtcttttagtagctcatacagtgctaaataatttacaaagttctatcagataatgagactgacgcgctgcccactgcgtcacaaggatgacccaaacactgtcacagaattagagtcaacacagaggaagtggagtgaagggatagggagcgacacttaattctgatgacagcagctattcacttaaagcctgtatacatgaaacaataaattccctttttgattaagccagctggagtttggttttctgacgtcttcattaaagagtcccgactgatatagttctccacaaatagttgttgaataaatgtttgaatggaaaatcaaagtacgaataggggtggaggagtgcaaacagcagccaactcctcctaatattcttctctggccgggattcaaccctgtcatgttgcacaattccagtggcctccattcacatgatctagaatatgaatggtgccagctcctcccccagaggtgtacaaggcagccctgaggggaggttagggtggaatggcagaaaatctgtggttcttagttcttgagcctttagatcatggagtcccatttcccagaagcagaaaggctggtctctagattttgtttgtttgtttgttttgagacagagtttcactctttttgcccagactggagtgcagtggcacgatctcagctcactgcaacctccaccttccgtttcaagtgattctcctgtctcagcctcccgagtagctgggattacaggcacccaccaccacgccccggctaatttttgtatttttagtagagatgggctttaccatgtttgtcaggctggtcttgaactcctgaccttgtgatctgcctgcctcagccttccaaagtgctgggattacaggcatgagccaccgcgcctggcctctagattcttttgtgttgtgagttcattaatctttaggggttcctctttcttctccttccagagaactctagaagcactcaatttgactatactaagatagtatttagaatatgtgtattgtttataaaagcttaggcctcatcgtcatatagtgatgcataatataagtaaatgccagattattattattattattt

SEQ ID NO: 44639 - DNA, 1995 bp, Homo sapiens
ttaattacattctcttagaaagattttaatgcacaagatagaaattagttcattttttacatatttagacagctttctgttccagtaggttattttgtcactgatgtgtagcatttgataaagagtcagaattagctggaaagttttgagcagggaattaatatgactgagtggttgtcctttccaggagaatgtttttgaaagggaaattcaaggaacaacaactgctttattcaaacgaataatttgaggaaaaacttgggggtagagaaggaagcaacctaatagacaatttcttatttctactctgagtaaggttttcctccatatccaaccagatgtagcagtgtgtgtgtctggtggctttgctgttgctgtggcaagctgctgctggtgagggagagaactggggtgatgtcatcccttccctcatcccaacctagatgcttgacatgaaacagctcttgggatgagatttttgcagcaactctatcaacccatggcacatttttttatgctctcctcatgtcttgctgttaactaagcaggaagataaacctgagccagtgggaattagaaatatatcctttgctagtgacagaggaggcaaagatgaactaggctcaagtaatctgaaatagctatcattttttgtttgcttttattctttttttttctttatcttaagtagtggtatggctatgcctggcttccacgtttttaaatcctagtagaaccaacaaaatttttcttcatagtttatggtgtctttcctataagacccgggagcactatatgcagaacaatttctaaatagaatgcttgtaagcaagttagaaatgactagagttcatctcctatggtcttttttgtggtgaatgtgcgggtgctctcagagaatagagaaatgtagaagcatctgattcacattcatttcactccagccaaactccagtcttaccacatatacagatctgttgccacatggtatttgcttaatgctaaatagaaatcttgctaaactttaaacatgtgcgtgtagcctgatgaccctaggcccacaggaatcttacacaattcatcctggacttgttggaaaagaagcttctctgtagcaatggtgcaaaacctgtaagccaccgttacaaaacaggatgtaaacaatccagaggcctgggctcagaatattctctttctcctcttttgactttaaatctatttcttttagtttctgcttagtaagaagtgctcatagctgagtaatacagaccacccttgctagacaatccaataaattaatctttgtttcaaattgctatttggcagtcattaacacgggataagagtaattggtcaactagatggcagagacagaattctggatgcagaaagggtatttgacttcatttctcactgttgaagtaattgtacttatttctgtgtattgctgtgaagtccaaataagttattaaaagtaaagtgcttgggacagggcctggcaaatgggaagtttagcaattattattaattctaaatatattctattgggaatattagtgtcatttttttagtgcctgagaacaaatttgaactacacttgacaaatacataggcttttgaaaaccactaactatgggttaagaaactttagtctgtatgtaggcttttatatccttttccatcgaaattgaaacaaataacagtttaagcccaaaatacttgaataaggggtccacatattagctactttaagcaatttcagttagggagaagatttatgaaaaatgctaagctctcaggaccctaaattaggagagtgtgtgtgtgtgtgtgtgccttaaaaattaaagacagaattctctatttctaaaaaggcctagtaaatttttaactgggccaggagcagtggctcacacctgtaatcccagcactttgggaggccgaggcggatggatcacctgaggtcaagagttcaagattagcttggccaacatg

SEQ ID NO: 44640 - DNA, 918 bp, Homo sapiens
taaacttctccatttgcttgtttgccaagaaaatcttgcttagaaagaaatcttacctagaatgcaatatataatagagctcaaagtcaagctgcctgagctgaagcatagctaggagtccagagtcacatcttctctgtcctcttgtcctaaactccccagatgccaggagatgttctgtagcccagctgagaaagattgtgaggtatgtctgagacctaatctaagaggcaggggaaccacaataagatgtgcaaacctgggactagatgcagagaatgttaccatgggaagcacggcaaaactgtcagcatcagataaagccctgcttaaatgtgcagaggagatcaaaaagtcaggttgaaagcaccaacagctgaacatgttgtaacaaagaaactttctaaaggtagaggggaaccgtgagagaatgcagccagaatctgagaacccccacagagagtgtcatcaggaatcccaaaggataatgatgcaagaagaggactctgacctaagccacccagggccaaaagactatactaattcctttgagaggaaagatgaaataagaccacacctgggttatatatgctgtaattactgatatttatctaacttaattgccaagtaaatctgtttctagttttactctggctcttctcaaattaagtcttttgttttccgaatattacacataagatctctgtgtagataatgttgaatggaatgttgaactgggaatggttggccttaaaagattatctagttatgttcttggtacctaaagagagactaggtttgagtgagcaaggcctctgtataaaagatactagttagataacatacaccgaaggagatacttgtccagcttgaacattaccacacacatttgacatttcagaaaactactggtttatt

SEQ ID NO: 44641 - DNA, 2388 bp, Homo sapiens
taaaaacatgctttttaaatatgtttttatttattttctgcaagtaactagctgaatcaaaggtcagagtttaaggagattattttgttgacaacattacatatttactgaatctcatctttatcctggcactatccctgcctggtgggtttatagacagaaatgtcacagatttggaaggcttttcaatgcagagattactatggattaaatccttgtctaactggttttgctttttcagccttagatgatagtgatatggagaggaaagatggggatataatcattcatgggccaaagtttgtttcttatcacacagtcaacatgtcattggcagaaggtggaacagtcactcctgacacttttctgcttcttctataagagaactttgttaggagccagaagcccctcatggctcacctaatcactggctctgtaagtgatctgggataaaggaggcctcagagtcccccagttgtaaaagaggaaaatcaaatatgcccatctggaaagtttatacaagagatcaataaaagccttcttctcccaaaacaaacaaaacaaaacaaacctcaggggtagccacggagggtaggagaattcacaccatttattataagaccatgtttcagccttgtatttttccttcaggctcatggtgagacacagctcattctgcagccaatgttgccccttgtttgggagtaccttgagcagcgtttcccagacttatggctgttgtgtatcaccttcattaattttgctggaatacttttctttctttaaattgatttcggctttttttttttactttagtaaatttttaaatgataaataaaattaatattgcttatcctaagtagtgggtgatgataaaaatatattaaaataaaaatggttgtgtacgtctaaaatcatgttgcatgcagaatattgtgccttcctttgagatacctgttcttacaagtcccagaaactgagatgtgagtccaaacttgaggacagagcgacgacatggacgtctacaaatgtgacatgatggggtagttttatctctaggtgcaagtcagggggaggataatgaagaaaactgtccggctaacacttcaaactgctgacactgcataggttccttagcagctccacaaggacctgccgagctgtcccacgccttcacatacaccccattgaggcttgagtttgctgtaaaggtatcctaacagccttttctggctctgcccagccctgtttttccctcctccacacaaattggtctcctggcttgggttccatctgtacctttgactccagccaggtggtttccttttggccactatcgctcagcgtgctgattgctgccttggtccttgttgtttgtcctttctctctttaaggacctggggcttgagctgccaattttataagggaagaagttcttgtctttttatagcgtctctccttgccattccctgattccattaatatcccatcaacgaagtgcaaattgttgcctttcccctcccacttctcggtgtgaagcggtgacccagttaacaggggcaggggcttggggctcctctggctctgtctgcacttccaggactcagtgtgtgcccgagttagagtgacctgtacagtgtgttcctggtgggactttaatacagggaggcttttgctgttttctgcacggtcagatgaggagctctatgtttggaaaagaggcttggaaaaagaaaaaccagaatgagcagccttttcctgttgacttagacgccctaggtggccgggcaagtctctgacctgctgggaggcctcagtttcctcctgtgtgagtgaagtgaatggaaaggaatggggccccatgagccttctcaccttttttttcttgcttggtcttcccgactgaaaccagcatcctccctgttctgatctgggcagcctcctggagtcaggtggggccagggaccaggtccaaagctgaagctccttcttcctgctgttggaggtcagctgtgggtagggaactggactgctcaagcttctgtggtgagacctggagttggggaggcctctgtgcggagcaatactggtgggcgaggggtgtactcagcacagtgattgctcagggaggctctggaaagggtgtctgttccaactgaaggcaaaatgagagagaacaggctgaagctctgctaagctgtgtggcgttacatgcaacccttagcctctctgagcttcatttattctgattttaaaaatacatgcaaaaggagtacagtgcagcttcaactggagcaagcagcaggtcccttccaacatcaacattctttgagttcgtaagtccaagactctatattttaaaaatatttttatgggtctcagaccctc

SEQ ID NO: 44642 - DNA, 6164 bp, Homo sapiens
ccacttcatgtgccattcactctgcatcccctgcaatctggcttctgcttttggtaaggccacccatattgtagctggaaaattcagtggacattttccaatctttgtctcactgtatgtttctggggcatttggccatgttgcttgtgtgcaccactcactctctatgatagtcatattatattctctcagcttgcctcatttgtttctgttctttcccaaccatggtctcctctccctccatctaccacccacatgctggggttacctacctttctgttttagcctaccgctcttctcattactgatactcttcttgggtggatttttctacactcaggatttcagctaccatctgtatagtaatgactgtctagttcaatctccatctccaatttctcccccaagctttaggctcaccaattccatcacctgctaggcagcttttcttgggcactcttcagacatttcggattcaattgctcaaaagctacatgtatcacttccctccaacctaaacctctatttgttctgttaccttctctttacccagtgacaaaagttataaaatgtctgccttgacttttttcttctcctcactccctttatccaactgatcattacatcctgatgttttcccctcctatgcatttctcaaacccatcctctcaactccactcctaccaccactaccctatctcaaatgcaccttcttttaactggaccaatataacagtctctcaattggcttcctggtttctagacctggcccactccattctctctccagagctacctgaatgattcatatacaaaacagtaatctgacccagtccttctcttgctaaagtcattctgaatctacacaaggaaattcaacctcctttcctggggctgtcccttgtctatctcttaaaccttagctcctaccacccgctgccccctattttgactccaactctcaaccggcagtagttctctgcaagtcttctgttctctttctgttctttacttgcacatttaccaataaatatgttttactccagtgtattaggttagtattataagggaagtttcaagttcatttcatattaaacattagagccttcatgcttagggagagagggaaaaagagaaaaaacccatagctaaatacatagttaagtcgcgttcttctccaacgcagccaaaaattggactgggcctgagatatttgtgtgccctgtttgattgaaagctgttagaaagtatgccaaacattttagatttttcgctcccagagttcttgtaaacccggcagaacttgtctgttatgaagagtggactgccctctagaggttcccattggaaggagcacatcaaacccacagtgttaaggcattctgcagtttcttgtgaggttttgctgtagacatttactattactgttctttgtccccaaaatgcttttccagatgtctaattctgagtcacacatttttaatttactttgggaatagagatttggggtaaagcatgtgatggacctcaaaacactcaatttggagtcaggagatgtgacttttagtcccggttcttcctttaatatctgaggacttagatttcatgtctgttaatcaagtagtagaagatcacacttcaaaactgtgaatcaccagaaagtatgttttaggagtaaaactgggaagagtttcattaattcagtaaatatttaatatggaagaccctggggtaagagctgttttgcagaagctaggagtttacgtttgatctttacaatgttagatgaaacatatttgaaaaaaagacacttggaaaacatttgggcttgcaatttaaatggatgaatttaaccctgatatcatagaaccctgaaagcgaaactgagctaaaacaaagtaaaacttactctgattccaagggtctcttctgacatgagagtggaaatgaatcacacaaccacacacacacacccatagacaccctaatatgccattaagctctgacccaaaccccttttagcctggtttccccttttctattttcaatcaagagagaaaaaaaaggaagtctttcatttaatggtaagaaccaactatggtctctgtatgctcatataatactaaagaattataggtaaaattatattttatgtactttattatggtactatgtcaattgacattgaacttcatagtacactgaagaaagggaaaaaatattaggacaccatttatgtccgtagtaacactggaagtaagatgccgcaaagctcaggacacagtagctaggaaacaagacgtctgaattcctgtgattccacacatgtttggagggatctggggacaccagctggatcttctgtaatgcaggtagccacatctgtgcaccatggttatgatgctcacttctgtggagttcaatgttaatgtcctctttggcatctacctcctccaagttcaaagctggactgctgtgctgggaatccagcaacctgaacctttttcttcattacaaatctggacatctttggacttgatttctgacatcaaatcaatggttttacttctctcttcattagtttactgtctgtctttacaaagtcctctgggcattagcaaagacatgaacctaacagaatacctctaacattttgaacacatataaaacattagtacttgaaatttttccttatgtttctatagctaaggaaaacttttaattttttttttctgtcttagcctactctatccagcattccttgctggaggcacagctaggatgaaagctttggaatgagaaatgaaaggagtaaatagacttgactttactaacagtgtccatgtttttattcctgaaagttatgacacaacaattgttagaccataatcattaagaagttctgtcatcatcttctgttaggttgaaacgttcaacaaacaaaacaacaaacctatttttattctgctttcatatttcaaatgcatttatgcacttcaaatttcagtttcaaatattcttgagagtttcaaaaactctgcatcgttttttgacttatgacttaatgctatatgctgccttatgctgttttacttctgctttcttcatactttgcttcatttattatcctattctttccttccttcttcctttgtaatccttgtttatggtattattagaacttgtaaatttctgtaggtagtggttacaatataggtaactcacaaggcctaaacaggtatatttagataatagaaagtattgaactctgagtctggagtgggaaaagttgatcacatcacttctccccccaaacaactttgctctgagatttagtctaaagagattcacttttcaataagtagaaatgtgatttggtggatagcttgctgctcattccaaagtatattatatttctctttctggaagcgaacccctgggaagagggtgcttggtgagctctggatgccgtgcccagaggccaggggtttttggaaatgccgcagaacatcctgttcctgggagcccttctgcctggttgtttgtgctctagagacttggctcctggtgttcttgctcagacctttggactttggcaaggctacttctcatgtttctgtcttcctctgtgtgccattctggctctgtagatggtttggttttttgtgttgtgacagtggaggctgcttggagtgcactgccaggcattggctcatgggcactctgctccatttcagtaacagcaacagaacttggatttgactgggaaataataaccattactggaagaaaaaagtagcaaaacatatttcctaatatgtgctaacataatgaggggccaggtctccagctttacgggtgattattatagtttttgattgttgccagttaccaacactaagtactttagctgtgcaacttgatttgaacagcattgccagaagagcaccatcaaaggcttttgataacatgctaccaagaaaatatgtgacaccaagataacatacgaccccaagaaacttatttaatcttcttggtgcatctataaaaatagaaccaagtagaaaaacagtataaaaagcaaaacgtttctcactggggttttgtgaaggataccaactagccctcatgaagtattgtgagtttcctggaaggaaggccttttgtaagttcaagttattgccattcactaattattggtcataacattgcacatgatagatgggaaatggaagagtgggagaattaagtgattaagctaaaatcacacagtgagctgggggaaaacccaaaagtgcaaagagatctaaatttgtttcattggaagaacacagttatatctggacaaagccccagagtttaagtgacaaggacacctaacataaaacttgaagtcataggcatgtagccaaataatacaaatatccttgttaaatgcaagtgtatccataccagttatggatacacttgtccttggaggagagctaaggtgagtcctgctgaggacaggaactcttctgtgtttgatttgcaggtagagcgagtagttgaccctctgagcccaaagctgcagagaacacagtaaacctagtaaactgagtgtggctatctccccagggtggccctctgagaatccctcctaggttcctgagagagacaggtagacaggctataggtggaaagagacaaagtgccttgagctctgtgggttaggatcctatcttcaacccctagacacttaaaagtcttgcctgaactcatggcctttcaatgaggaaagcatcacagaaagactttatggtaatcggacaggaaacaatgactgggcaaaattttttaagcagtcagtattaagagaaagaaggaaagccatgtctttgctatttacctcaaggttatattttgcagcatctaatgccaactattaaacaaggatacactcttatctaatttgcgctgttgtcttcccaggatctggaacattttctgcgggagtccacctttatctctagaagcctctggcaaactgtttcatttcagctcaggtccttttgtagaaagaacttgatgctgaaagcagctcgccccttctgccctcaacccccactctccccctaccctccccaccatggttaacttgtttttcatctttgttctgagttgctttggctgattcaatttttatttccgtttttaatgagttagtaattcagtgatcttggctttgaatctttggaactgtgggtttttagtaaggattgaatcagcttgttggctcctaatagactctgaaatccagtaatattcgtgatgtgtttgttcactccgttgactgccaggtcccggtaggagcaatggccaacagagaagaatcgaggtaaatcctcctttgttgcctaagagctgttgttgtttaccccagtttataacctcttcacactgaagcatcacccttcaaaggaggatgttgcttcccactttgattatcatttacttgactttacaagaaactttcacatcttccaaaacagtaagctgtaagatttgctccaagctctacgcagtatatactatgactattttccatttagaaattaacttacattacagctgtaagtctatatactgaacttatgatgctcgttactaaatgaatgataatggacatgaaatagtctgtaattcatagtcaaaatctaccattgctatgtttgtctaaggaagcttcagtgagtatacttcagatgcatatgaagttagaaaaacagttaacagaaatagttcagtagagaaatcctgatcctaggactaataaaactagattttcttaaatccaaatgcctgtgagattctatgcagaaggataatttgtatccagcatgtaaataatcatgattctcagaaggaattatttgcactttaattgctcttagtaatggagagttgtgtcttcttatttgtccccttgtcattagaaagtatcacttaccatacatttaattcaagttttcatcttaaaaaatgttactctagaaatcttgatcacaatctcctttcattcctgcccactcccatccccccaccctccaccccacccctccaccctgcttggttttggtttgttgttttgttttttacaaatcagtgtataactcactaaggct

SEQ ID NO: 44643 - DNA, 619 bp, Homo sapiens
tctgaagggtcattgggagcaaaagtgaactaaaaccagggaagaggcacagagactggtaaagatgatttgaagagagctgtgcagccactaaccgtgtctactatgaagccatcagggtggatgatgtggagagagggtgaagtgagaagaacacagtagttcagagagagccctccctacaaaacccccaaaccccaatagttaatgattaatagagaaagtattgcctacaaataagacagaaatcgagtttcaaaagatgatgccagacaatgttttaagtaaaggattatttcattgaattggcagatgctgagtcattaagtaagctgaaaagttcaaatgcattcatcggatgtagtatcatggaggtcaatgatgaccttgtcaagggcagtatcagtggcatggtgggcccaggagccagatttagagtaagagttggaggaaagtaaataaagccaagtaaagaaaggtaacagaagaaggaagggaagaaataggatgatggatggaaaggactataggattaagggaatattttattctactctttgttttgtttttaaatttggagagacatgaataatgctagtttgaaggaggcctgggagag

SEQ ID NO: 44644 - DNA, 2321 bp, Homo sapiens
tgtgacaacgcgcctgtagtcccaagtacttaggagactgaggcaggagaatcgcttgaacctgggaggcggagattgcagcgagcagagatcgcgccactgcactccagacagagcgaaactgcctctccagaaaaaaaaaaaaaaaaaaaaaaaaggctctgccttctctctcttcaactgtctaaaccccaacgctgcagaaagcggtgaccccaagtcccagaatgatgatgctactgcagggtaacaaacaggttttctgtcaggcctgattgtgaaccagcagcaactgcaggctgacagtttctcacataagcacgtagggcttgttaaatttcacttccagccccaaaccaggaagcgctgtttaagatgagcccaagaagaaagcaatctagcttcagaaacaaaactcgccagactctagaaagactataagggtttaaatttgggactgttctccgttttgcattggaacctatgttctcctccccataaaagtttattaaaattcgaaactgccaaaaaacaaagtaaaatcatataaaacatacacaggcgcgtgcacgcacgcacacacacacagaccaatttgtttttgtgatccgcttccttatctagactgtccaggcttgggccagatttgagttggtaaactctcgcagctaaagcggagcagaatgtagaaagagtatctacttctccggattgttgggaggagggtcgaagcgtagactggccacgcccgggtcccgctctctcgttgcacaactgcaagctagatctgggcatcgaaggaggaacgctgcaacctccaaccccttctttctgaccaaccgggaccagagcagtgctggggccggggcgggtcaccgggtgaggaccggggcggagggtgttaagttacagggcaggagcccgggtccctccgcgggcaggaaggggagggcccatcggggctaggggaaccccggcgcagacctggggtggggtcggaaaagctgtttcatcgcccgctcccgggccctccgctccctccctccctccctctctccctggcaggactccccgccaggcctccccgccactctccgcggcgcattccgggaggcagcggccgcagcggcctcgccatgtcccagcccggccagaagcccgccgcctccccgcggccccggcgagcagccgccgcccgccgcacccatgaggtgagtggcgctcctgtcggcgtcgcggggctgggcgatggggtaccgggtcccggagctgtggccgccctccctgggcgttgccaggctggcgggtctgcagtccccggcgcccccgcggggcagggagagggctaggggcttggccgctgccaggcaggtggctgcaggtggcttcggttccccggccgggtccagtgcgctgggcgtggcgttggccgggtagagtggagggggggacgcgtcaagaaaagttggctggtaagacgtgggtgaatgaggatgaggatgaacggggaatgaggttcactcaggacccccgagtgagtggggtggtttcactggacagcgggatgtagtcttccgcgctaaggccgggccgcagggcgtggctgcctggagacgcagagcctcttccctaaccagcctcgagccaaattgggcgggcgaggaggggcggggcctgcgccgggccccacccccagggttctgcccacctggcagccgccttgggatgtgcggagctcagtgccagcccggtcccggccaagcggagtgtgagcccggcgcctccaacgcaacaccccgcgccctcgccggctcccccgccgtgcggatcggagccagccggttgttgccatggcattcgccagctggtggtacaagacggtaaataggagcggttgtgcctgggcaggacccggaagggagtgtgttggaagggagtgtgtttgctttgcccttctgggcgtgcggatgaagcgttgtccggggtttggcggggaaggggtgcggaccgggtgcgacctcctcgcagaccttcaggttaggctcggggagaggcaggggactcaccctcttgtggtatgtatgagcgcgcccgagcgtgcgcggcgcatgcacctctctcgccccgatgtcaagcactatgctctgctggcgctcacaagtgggatggaactggaattgttgctggaggaattctgtctaggaggtggattcctgaatgcactaggacgcagctcgcaagagctttgatctagagttcttttttaacccctaagtaaagttcaaaacttttagagggcgattgttggacgtacattcgcc

SEQ ID NO: 44645 - DNA, 442 bp, Homo sapiens
tgtaaaatagaaattatatgcactacataagtattggtgaggactaattagatttaaaagtcaaaatgtcatacacatatacttttaagaatttggaattccaatttcccttgagatacttcttcatgaatgttttccagtacatttcctgggcttttacatgtagcatttgattgatgtggtaagaacaaaccacatcaatttgctttgagtcattattggcctaaggttcttatcaaaatgtaccatgtaccttatctgcaaatatggatagcagtagttcagagttgacatcaaaattctccttccagactcatgattctctcaaggaaactctgctgggttacttggatgaaagtagtttgaatctatgcttttaaccctgttttgtttagtcacagtctgatgtttttgctaaaacctctcttagaatcccattttg

SEQ ID NO: 44646 - DNA, 640 bp, Homo sapiens
ctgggatagataccattagccctattttacaaaaagaaactgaaaaattaaattatctgcccaaggtcacggtcatatagccttacaaatctaggctgtttctgccctatcagagtttattgcagtcaactaacagacagaaatgactctgagtatttaaaacaaagggagtgtaacatagggaattggttacccaggtaaaaaaaaaaaaggctgggaagccgtcaggggagggtgaggcaacccagagattagaaattgcaggaagctgctaccatccctagtctagagggacacagggaggacaagggtcaccttgcagaagctggaaccacagccaacccatcctgcaggaggtgctactggaggagggggtggggcaaagggaataccacccacccaccacctctagtctcctggcagcgcctgctgttggctaaacccaacttgaggccatccatcaagagaattgcagccagcaaagttccactacaatttgaacacagcagaagtggaacaaggaatccacctgaaggcagacagttctaggatctgcacccagggagactgttctgaagcaaaaccagctttacagaagctttggtccatctgcttgtttgctgaataattttgctttagc

SEQ ID NO: 44647 - DNA, 953 bp, Homo sapiens
agcctcatactttaaaaaataataataataaagcaaaggcatttcagaagcacactagcatttcatactcttttcacagctggacttaatgctggcaagggctgcttttctgtcttcttgcttcttttatatgtgaagaagtttctttgatttttttttcttttttttgtgatggagttttgctcgttactcaggctggagtgcaatggcacgatctcagctcgctgcaacctccacctcctgggttcaagtaattctcctgcctcagcctccggagtagctgggactacaggtgtgcaccaccatgcccagctaatttttgtatttttagtagagacagggttttaccatattggccaggctggtctcgaactcctgatctcctgatctgcccacctcggcctcccaaagtgttgggattacaggcgtgagccactgtgcccggcctagtttctttgatttttatcttgttttgtgtgacatgttcccttggctgtctatgtatctgtgtgtatctgggtaacaacagggcaggtgcccaaatgtggcagagttgaaccttgccctggcagaagcccttagctgggtgagagctcaggctctgagccttattgcacttagctcttattgatttttttcagatttatgggtttgctatggcagattttaaacgtatagaggctgtcacctagaatgaggacaaacgacagttgtagttgccaactatgtgataaagggggtgaaaacagtttggaaaattattccttcttgagttaagatagcaaagcccttgatctgatttttttctctggctctgagcttctggagcacataccaccttcatcttagcccccatctagtctcctgtcttctatggccttgtccttccagtgaaattctttactatggcatcctgtcctgctcttcctgtctttggcctcctctctagctgc

SEQ ID NO: 44648 - DNA, 2031 bp, Homo sapiens
ttctgtatatgctccattataatcttatgggaccactgttccatatacagaaaatgcagtctgttgttgagtgaaacgcccttattcagcacatgactacatagatttcttattatatcacaatatcgcatactctaaaagctgatctggtccaacctaacaaagcttgaaagcaaatctcaaaaaaatcaaactgtttccaagtaacttaacagtatcccattattagaatcatgagctagttctaaggaaaaaattacatttttctatcccataaaaggttattattttttataattgtatacataataaaactcatagaaaattttcagcagccactaagtcttctcatgtgtaccaaccagacccactggggttgccctgcagaggtcagtctgttccattgctacctgggcaaggactttgggcctctccctttagagccaggattttcaacctgtgggtcacagtcctcaggatatgttgtaactcatttaaccctcaaaatcaccttccgaggtatgagcagagttattcaccctgctcagaaaactggtgttgagaaatgttcagaaacttgcctaagatctcatagctggcatttggtggaacaggactcttgctatataaatcataagatagaaccattatcctagagaatgtggtgcctttcttcacagagtcatgaagtctcagggtaaaacatgtggcttcactcagggagccttttctaagattttaagtgacagtgacacagcaactctttgcctggctcttggaacttcattgttattttgaaaattttaaagactcgagttctgattgactcagtaaaaaattttttctctgaactacaatagatatacaaaaaagtatgcaactaattcttttcatgccttcttgcaacagatggtgcaatatcatataaaaatgagcttgttttgagagtttctacttactgtgagtagatgaattctttcctcagggtggatccagccctatcactagttagtgagtatgcagatctagtgagctaagagatctgttcagggcagggtagaatttctaaggactgatgctgatgttaaggagtataagtgtgaagagataccaacaaaactaagcacaaggtgacatgaagccagaggacgttgaaaaccttgcacctggaggcaagggaggactcagggggtcaggtagtaacctgagaagactaggaagcaaaccagatcctggaagaaactgatgatcccaaactcatgtgactatagggctattctgatcccacatcacttcagaataaatatttgatcctgcattttgtttcatctcataccatacatgcctgtacccagcatgctttggctgcactggcttctttctgctcctcctgcttaccaagcccattcttacctcagggcccttgcacgtgctgccctgtctacctagaatgcctcctttccctcatcccatatatacacgattggtttccacacagcagtcaggtgttagtcaaatgtcacttcctcatccatcctgtctgaagcaaccctgagccaatcactctctgttacctcatcccatctcacagtctgttcaggactcaccattctctgaagtcatcttgtttttttgttgacttacttaaaggctgagtctttctactggaatgtaagtgccacgagggcaggagctttttctgtttaattggtcattatatccccattgcctagaataggaccaggctcatagttttcccaatgaatgaatgaacaaatgaatatgtgaagtcagacacaaatgaagaaagggggccaaaacaacatgtaattaaactctgattaccaatctgaaagtaaggagtctgctctgtatatgggtgcatttcaaggcttttgcattgtattttcagtgccagatgtcaacaaagggcttaataaatacttgttagataaaaatttaatgaaagatgattttacatattccagtctcacttcagctgaactacattggtcctttgtggactaagta

SEQ ID NO: 44649 - DNA, 4283 bp, Homo sapiens
gtttttattttaataattatgcttatattttaatgtgctataaaaagtaaactagcacatcaactcctaatcccatggctattttcatttatagtgaggctgaatttaaggttaaagtaaatctacttcttttaaattaagtaaacataatatatctatggcaggttaaaaaatattatataagtaatgtacaaataataaccagggcttgagaaataagatccagagcagtaattctcaccttttaatgtacataatgagtcagtgtgggttttattaaaatgaagattctggtttaggaagtccaggatgaggctgagattctgcttttctaacaagcttccagtggatgtgctgctgctgctttggcaaccacattttgagtagccaggagactgaatagtgcagaatgtgggtagtttaggctacccataacctaaacatcaactagagaatctgattaaaatgcagattctcaggtttgaagccaagaaattctgattcgccggggtgggggaagagcccaggatttcatatatttaataggcattcccaggagtttcagatgcagatgatttgagaaccacactggcaggaaggacaccctcagggattgtgatggccacagcacagcagtggaactacattgtttgccttcactctaaggaaaggagcctttttccacctgacttacagcagaagaatcttgcgaaaaaaatttttttttttttttgagacagggtctcactattgcccaggcaggagtgcagtggtgtgatctcagctcactgcaacctccaccttccaggttcaagcgataatcctgcctgaagcctcccgagtagctgggattacaggcaagcaccaccgcacacagctaatgtttgtatttttagtagagacagggtttcaccatgttgcccaggctggtctggaactcctgagctcaggtgatccacttgcctcggcctcccaaagtggtgggattacaggcatgagccaccatgcctggccagaaaatttgttttataaccatgtgattactcatctgtactcatcaggagcacagaaatacattcagagataggcatcattgagctgcctaactctggaagctgtggggcccagggcccatccctatggggtgtggcccaaattagtcaccctgtgctgtttttgtcacaggagaaattaatgtcagtgaaacctagatgagcttttagtctatttttaaaaaggaatgacaatactaatgatcaacaacaacaacaaaaagggatatataagctatatatcaagaagaattctaagtccgggtgcatggctcatgcctgtaatcccagcactttgggaggctgaggtgggtggatcacttcaggtcaggagttcgagaccagcctggccaacatggtgaaaccctgtctctactaaaaatacaaaaattagctaggtgtggtggtgcatgcctgtaatcgcagctactcgggaagctgaggcaggagtattgcttgaacctgggaggtggaggttgcagtgagctgagatcacgtgactgcactccagcctgggccacatagcgagaatcccacctcaaaaaaaaaaaaaaattataaggacagggtcttctgctctggaaatgttagaatcttaaagttggaagggctcttatttcactagatttttgacagaaataaaagacaaaaaaaataaggtagctgtgaggagtaccttgaaaggtacatcagagggccctaactgccttggctgcctggtggggtacaaagctgtatggatgagttcacctttttcatgccactggccatcatttgtcatgactcgacacagcactgtccaacctgtcctgaggtctgtgttcctcaaacagtgaccaacactacctccttcactcacaccccaagttcagggttcagagcctttaatgtggttggtgtacggcttttcatttattttaaaattttttataattattttctctaactcttatcattcaatatttattagttggccttctatatgaaagagtggcttaacccctctatttattcattcatttatttacagcagtatagactcatgaatttatattgtattcaatagcttcaaatctattctaattttgaagtttgtaatatactataatataaagtaatcgggtagaattcttactgttaaactactctttaaagaaatccattacacagttttaactgcatttgcaaatccctggttgtagtcattactaatccactttatagtttcaaaagaggtcttcgggggagcatatttgcgaagtgcacccaccgtcgttgccttattctggtagtcacagggtgacagccgagggagcggtaacctgtaatcagccggcggtgcgcagcccacacagcacgtggtccgcatcacaggctgcgttattgagtgagccagtctccagatgccaggcgcatgacgagtccacggagcgggacctccctccccacgcatcccgggctcccggggcggggccgccgggcaggggggcggggagcatcctgcgtcgccttcccgggaccgccccgccccgtcgcactcagagagctgggctggagctccaagcggaaaccgcgggagccgagcccagctaggaatgcagacctcctgaaaaccaagccgaggactgcggggtccggtgtccacgcagagtgagtactgtcttccgccgctttgctccaggccgcgcgtgctcccgggtctagggcctgtgcccccggctacctgccctgcgtgtccggggcctggtccctgcagcggactccccaggctcgggacgtgcgcttttcctactatcgcgaccctggcgataccgtgcgttctgagtttaactgtgtttcttggcgactcctcctccttgtcggtaacactgttactgccccttccgccgggaaatgtatctggtgaccggacgcgtagggttacaaaacaagggatttgtgtggcccggtacaagtggcccgagacaagtggcccgagacaagtggcccaaaagaaggaaagcagcagctatgtcagtttggtttggcacctttatctctagggttggagatagatctcctcctccccagccgtgccgccaccctgtgatgacctccgttttagagcgtgagctcactctgacctttctgcgtacctgatacatgctgggtgtggcgtggcaagtgttgtaacctgtttcggttccatttcctttacacaacctgagacggttgtagaataacatcactgagggttactttgtgtctatcttttaagaatacaaagtgttttcacagagatttaactttctcttctgtatggttagggacccggcattctccacttacacacaggcagggggaagttctttattcccattgtacagcttcagaaaatgaggcagagagtttagacagcttccctaaggatcgggactttggggcctctctagttttctaggaaaccacctatgcatcagaatgacagaaatgcttaatcagcagctctggaaagttcctgctgtttcacatgtttttcagaggaaaaacctctgcattgcagggaagctcaacaaggagtggcatctactgttcaaaaggggaaagtctatttcctaatcagcactagagtttatattaatatagattgcttctttctgatgaatgtattcgacttttgtgcactgatttttcagtatctaaaaggaatattgagttgttgggaatatgctggggagggtgtgctgcttgggttctaggaggcagtataggattaaaatgaagtagtgaaatttagcaaaatcttgctgaacaaggaaaggccacacctgtagactgatggagaaggaataagccacctatagcaatgaggctgactagggatcccgtgtgtgtgcagcaaggactcctggtgtctattacgaatcagcatgctttgtagactgtgaaacagtgtttatgaagcagcacattcaagtataaatattggctgtggttcagttcagatgctttgaaagaagagtccgaatgccagagagtagttgattatatagaattagtggggagttttggttccttgattattctctggcagaattgactaagtataacatctgtactgcaatgaaaacataaaagctagtacgtaaagtaacagtttgaaagaatgaaaccagaaagaaaaagaaagcattttcttttcatttgaataacttctgaaaatcagctgagtatttatgtttctattcattg

SEQ ID NO: 44650 - DNA, 1001 bp, Homo sapiens
acttccctgttttgctttatcttaggcagccagagattagacatatttggaattatttcatgcatcaagagaagcaactggaatccctagagacatgaatacaacttcaggaaagaaatctgcttttctattctttgatgactgacctaggctgtgtggctagctcttctccttacttacaaaattattatcccataaaaaagcactggaaaactagagtttggaaagcaatgaaaatgaagcagttgcctcgtagaactggaagctcaacttcatgccttaaatgtggatttttttttctaagttcttggggtggtccggtatcagagctcataatcagaccctcagagaatatggccagtatccttctagcttggatttagatcacagatcagctgtgactattgtcacagttgctaggcaacgtttgtatgtttatttcgaggcctacccacatgttgcatcagaggccaaagctcatgtgctctgcactcctcagaacaagtagagctctttatttttaactaaactgtttccttgtaatgtattttatgaatgtacagcctactctgccaagctgtagttatcttcagtttctccctagtagtcccaattctctaaatttttgcattcaacttcatctaacctgttgcattctggactgaatatctctggtactttcctacccctaagtcttgtgcaagctgttttgctcacctagaatgcctgcctgatccagcctctatctacacattttgtaaaatcaagatattttgttttaatatttgatatgagggcagtcaacttgttacagcaaaaagttcatggacattattgtcatatctgtgttcaaattcaggctctgccccttcttaactgtgtaatcttagataagttatttaacttctctaagcatcacttttctcattgataaaatgcagataatgtttacctatcaagatttatgaagatatattgaaatgagatacatagagcacctg

SEQ ID NO: 44651 - DNA, 873 bp, Homo sapiens
ccagggtcaatcaagttgcagcatcttgtttctaataatattcttctatagcattaagctgacaaacaggttccaaatctaactcagaagaagacaactgagtctctcatcattctcggaaatcacctaaattcttttgtcctcagctccaaccaaatgctaggcactattgtaatctagtagcagttgcttaggttggagttgatttcaagccagtaaccagaaattaccatcatatcaaattacaaaatatgagaatgttaaagtaattacatcgtcacctttactgagaataaccaaggtttaaagcctccttaatcctactgggaagatgggggcagggagtataagtcaacttcataggatacacagatgcagctgaaatattttagcaatagtggtaagggcattatttcaaaagcaaggttccatcctacaaggcagatgttacctagacaacaaaacaaattttactctaggagcattacccagtgtccggggcgccgtcagagcccttcatgtagtgctcttgcttcatgtgtacattcctccccctcactgtgatggttattaggggaaaacccttctgcagtgtccaagtgttcatcatggttttcacatccaccccttcctgatgccaatgctggtgtgtacacaaaaaggcagacacatcacccatttaacccaactctaagaaaagagagaacaccagcttatgctcaaacagccgctaccagttgccaacctcccctcttaggagcactttctgatccctttctcagtgtgatgtccccagccatcacacctccattagagcaccagctgtttgcttgtcattttcctccactacacatacgtgtctggaggacaggt

SEQ ID NO: 44652 - DNA, 458 bp, Homo sapiens
aaaattagctgggtgtggtggtgcgcgtctgtaatcccagctactcaggaggctgaggcaggagaattgcttgaacccgggaggcggaggttgcggtgagccgagttcgcgccactgcactccagcctgggtgacagagcaagactccgtctcgacaaaaaaaaaaaaaaaaaaaaaaaaaaaatccccaacaaccaagggaatctcaggcaaagtcaaaggtcattaacaggcaattcataaaagaagaacctataaatcattaacaaacatatcaaaagctgctcaacttccttaatcaaagttacgtaaattaaaaagagatcatttatttggggaccttttttgctctaaaaagactgccaatatacactattggtgaggggtaagaaaaaatgacaaagtttatcaaaaatttataggctctttggcttaccaattttacttctaggcattta

SEQ ID NO: 44653 - DNA, 2074 bp, Homo sapiens
gcactatagtatatgaaatagatcatcaagaagtaattgaggttcttccagaatttcctgaacaatgaaattaacaagcactgttggtaaataataaaaatgctggattaatttgaaaaaaaaaaaagtactagaatgtttctattcaggccgcacctgaaaatgtgctacttatactaattaaaaatcctcaggcaagagacaactgtgcccaattttcaagttttttgttttgttttgttttgttttgttgttttgttaattgttgaccacgtcctgagttcagagcgaatcctctgggtgtttaataggaaacagataatttctttctgaacctagcctacacaaagaaatccaaaagcgtgaggaagtgtgtgctctcccccttcccctcatggaattaactttgtaggaccacctggccagtgaggcacccagataggaaacttttaatttgcgtcaacagaggtgctttatctgaataaaacccagccagagccagagcgaaggggagagagagaattgctgaccagaagaacaggagaagcagggagggaagtgaccttaagaacacacacggcccgcgcatcccaccccaccagagtctttaacccaaagcctctgggtttctctagcagctatgggcaggtgccctcctcagcccgagccagctgcccgccccaccccgccttttggcctcgcgcgggcgtcggtggcctgcaggactggcaggcatccaggcgccaggcggagcgctgagggaggctcccgccggccgaacagcggggagacccgtgaagcaggcgcaccggccacgcgcccggagggacagggacagggaccggcaggggtgggcccgccgccaacccgccgggcaccccgcggactcgggcctagccagcgactccccccgcccttcccgcgccctgtctcgcgccccgtcgccttcctcccgcgccccgtcgccttcctcccgcgccccgtctccctcctcccgtgccccgtctccctcctcccgtgccccaggccctcagccccccacttgacgggcgcagggaaggggcgggtgccgcgctctcctcccggcccgcagtcccctacccgcggctcgagcgcgctgtacctggggttctggggccgccctcacccttgcgccgccgccaccaccactgccgccggcctagctcccccaggaccgaaagtgaaagtggagcccggggagcggcaggctggcgctgagcggcgcttcggcccgagccctagcggcaggcggggaagcccctggctaaggcgggagctggggaaagggtaaacgggagtggggccgagcgagggaagccgcaactcccaggaagggaattggtaaatgagcgctgcacgccggggaagctgcgaggttgcgatgcgggggatcaggcgtaggaagtgcacgcctttctgaacgcggatccgtgtgtgtgtgtgtgtgtgtgtgtgtgtgtgtgtgtgtgtgtgtgtgtgtgtgtgtgtgtgtgtgtgtgtgtgttgagatgctttttgtttttgtctttttttttttttcactgtttagcgttgcgagggttaggggcatgcaggaaagggccggtgctcaagttggggaccgaagccaggcaggcgctgacaagtccaccaagcctagacgcgttcgacgcccattggactcgctgggtgtccgtcatctcgccactgccagtgggctgagagctcttggcccgcctcggaaagaaacatgaacccagtactctgtcgtggcaaagtgccgcaccttctggggcttcggtagagaatgactacagtgggagatgctgtagaggaggaaggtgggttagaggtggcccccaggactttcctgcactaccaagggccactgtaccccaaggattagctgcttcccgcatcaacacgttccctctgatttttcaaagtaaatgaccatttcttcactccccttagaacaattaaagctgaataaaatggccaaaaagaccatctttaaacagttgaggctaaatgaggtaacaagtcaagaaaacacaaacattaaaacaccaaa

SEQ ID NO: 44654 - DNA, 805 bp, Homo sapiens
aaacattagcatgttgggggaaattgcataaacccacataacttccactgacctcagcctcctctttaccagtcatggtagagataattaacattaaagaaacacattatgggagaacagactatgattgcatcattattataatgacaacaaatgtaacccttatttcctattaaaaaacactttcgattaatgataaggaatgttctaaaagactagattgttgcagagttgaataaatatccatgaaattgagctctaagaatgtaaacagagattctgttgaaactactttcacaggatacattgtctatatctcacactggagacaattttgtagcagaaaaactttggagaaaagaaaaaaaacccaggtgggtgggcagcagtggaaccagatgaacattctctgtggagcttcaccagcgattgcatagaactctgtgattttacagtgaagactgtctgttcctttccatgacttacagaaaccaggaactttgctccaaagaaaagggcgatggcattttgaaaactagctaaccgtcagaggcaattgcagcggaactttggccaccgttggatcatttccacttctctcccacttacttgacagcctgagtcatttttagatctgatttcacagtcaagagtgaatctgagtcccaagacatctccctgttggtcttgtaggtaaaagggaatagaaagatgtaggagaagggaattttcagttctcaaataatttatgcaagtatatacacacatacacatgcacacacatatgtgtatgtgtgagccttgt

SEQ ID NO: 44655 - DNA, 1586 bp, Homo sapiens
gacatccatgtactgttggtccatcaggctgttggaattacagcagcagaacccttgaaggagggatcacaatgggagcaatgtgggatgaatggggataaatgctaaatctgggtactggaaaggataaagagagggcagagcaaaggccagaggtttcatctttgtggaaggtctgtattcagagcagagaggaagttgaagcccaactcaaacaggcagataaagagagatcaaagagatgagcatgagatacagtcccctcgtgcccaaggagacagggtggttacagacatggaaaatctgagaataatcacctctgataaagatcacagaagctgcccgggaggtgtttggtaagcttggagttacgtttgtggggtggatgggcagaagtcagatttcatagcactgaggatgcagcacaaggagaagttcaagatcaattcctaagacaacaacttggcactaaaaaacataaactatgttctgaaggctttaccctggggacaagggaagggaggtgataacagcagaagtggcagccactggcgatcctttctttccatggtttggcttctactccaaagccacttatttgtgcattctacaaaaagtttcttgtcctttttgaaataaagctcttatcctaagctccattcacacctgcgtgataatgaaccagctagtacttactgtactcaggaagcatgcaaagttctgaatcttagaacagaaagtgaaagcaaaagtaaattccccttcagtcaaatctgcagcagcatgatttaaggtaacgtatcaacatttctcttgggtttgtcttaaaattagattttttcaataagaataatgaactgaaggtatagaactgctgtgttgagaaggttttgtaatctaaggcaaggttctgggggactggggtgaattgggcgcggctgtattagaaagtgtatgcagttgaggctgggacttgatctaagacgctgctgcactgactctctttcagagatctttttgtcttttctaagcgtttgtgacaattcttgcctcttcaatcccaggatgttttgttcactgcattgctatttaaggtacagtgcagtataatagaaagcccaccagaccaaagggcaaagagctatgttttagtcctgattctgtttcagacttcctgtgtggattttgagaagtcaccatcctgttccttcatctgtttatttaatttaatttatgtatttatttatttatttattttgagagagagcctcgctctgtcgcccaggctggagtgcagcagcacgatctcggctcactgcaacttccacctccctggttcaagcgattctcgtgcctcagcctcccgagtagctaggactacgggcatgtgccaccatgcccggctaatttttgtatttttagtagaggtagggtttcaccatgttggtgaggctggtctcgaattcctgacctcaggtgatctgcccaccttggcctcccaaaatgctggcattacagacctgagtcactgtgcccggtcctgtttctttatctgaacactaaggacttgtactagctggccttta

SEQ ID NO: 44656 - DNA, 3401 bp, Homo sapiens
aaaatgtcagtactaggggccagcctaacggttctgattacctttcacacattagggagatagcagctctgaggtatcatatgatacagacaccttctctgtactgatcaaacacatcattcagtatggagtcattaactggaagggtttgcagcagtggaagtgaactctaaacaccactatgtccttcacttattcatgcaaaaattatttattgtatacttacccaggcattggggatacagccttaaaaaagattacgactctgccctcacaaagcttgcattcttgagaagggagactgataataagcaacaaatccaaaacattgtttcagacagtgatgagtgctgagaaggaaataaagcaaggccaagtctttatagagtgtttgtggctattttagatgtatggtcagacaagggttctttgcagaggtgacatttgagccgagacttaaatgacaagatggaatcagtaggcaaagcactaagcagaagaaacagttcttgtgcgaggagcgagcaaaaggaattattaacaatgatggatggaacttggcgacttccgggaacagcatgaaggcctttgttaccaaaatatggtgagtatgtgctgatgaggtcccagagttaggcaaggagtttcattttttattctaagtgcagttggtatccactggaagtttcaagtagagcgtgcgttgtgagggatgtaataacaacaggcagtttaaaatacaatattgtacttcgatttgacttcttcgaaacctagtttccaattccagtgctggtcaaacaacaccctggccgtccctgtttgagcaggctgtttgcgcttgccgcggcttgtttgtccctggcgccccgctgttgaaagcctcagagcgtgtgacagttggcaggcgcagtgaggcgcagcccgagccaagtcaatgcaggggccggggctgagggaggggaagaggcagaggaggcggtgatggcgcgctgggagggcggcggcctctgcagcgagggtggtggcgatgcgcataccgagaggataaggaagcggttcccgacgagcctcctcggggcttatggggcccctggcggttcggcctcggaggctagcggggctgcccgatttggcactggaaacaatggtggctcggggctggaggcaatggcgcgagtgctggggggcaggggcgactaggggagtttcggtttctcgggcctagcgccgcggagccttgctgcgggccccagtggtagcacccccgggaaccgcaggtgttgatttaaggctcggaacaggcgggccttctgcccacatcctgcggcgcccgcgacccgggccgggcgatccggcgccgggttttgttatccgcccgcacctagaggccgcaaggcagccgccagccccgggactggaccccagggcgccctcggccctgcgaggtccccgccctctcttccgtctcctcctcaccgccctcctgaggcactctgatgcgggcgggcatctctgccgaaaacacctacagcgcccgctccctcggtccttcgagcagtgatccctccgcggccaacctccccagggaaaccagcgattcgcggttcagatagcgaccttcgcccgcaggttcctgctctgccttcagacttcggcttcagtggcacctgctcagcgaggcctcgtctaaccaagccatccgaattaactacccactcactcgccatcacatcaccccgatttaattcgcagcggggcactgactttacactcgtgtgtcttctgtgtttatttatggtctgtttctggaatgtccgctcctgggactgggaccatgattttctggcgcagtgcgggtgtctcggcgtccgggatcgggcgggtcgcagtagggctccacatttgttgagtgactgaacaccgttcccggccggggagagcgccgcagccgggtccacttcaggtaggggctgggctttcccggccccgcctaggccccgcccccagcgcgaacccgctcccacctcgcctgtccacggagcagcagggggtttgactgtgcttttccctcttgcttccctcgctctttctgcagctgccacgaaaacccggaacggcggagcggcgccgcccctcgcggcacctccctggcagcccttggaggccgcgctgggcatgctcagtcagctgggccgcctcagctctcggagtaggaagctcgggcgctccggctgtaaggagccgcggcggggggaaaatggagcccttcaccaatggtgagtgggctgccgaggcgccgggacccgggctctccggagccctgagggtcgtgggcagtcgtgacacgcggggtcgggctgcagccgtctcccccaacaccgcgggcttcccacgagggctgagggaggcagggagaggggatctgggggaggcagggaggttcggggggcgggcggcggccagtgcgggacccggggctggcttgaaggtcagcgccgccgccgctcgcccggggtgcggccggtgggcaaacagcaaagtttgggctgctgtgcgcagaggagtgggcagtgggaaagttggcagctcaggtttgcccccggaggaggcggtgtcggcccgactctcctgtaggagcgttaagttgtggcagctgccgagcccaacttttgtggggcgccaggagctgtccccctgcccttcagtgagctgccggcgtgacttttcctaatagggcggggtgggggtgggaggcttggcaggttaatgttgtggaaggaagggaaacttcaggaaaggcttgctcacctcgctcggtgccgcggaggtgcctggccacagtgccaccctcctgaccctgccgaggtactcggcagggccaccacgcatcccctcactggctgcagatcacatcagtttttcagtcaaagacttgttaatgtcaagggtccgtcacggtggtgataccactgtgtgacaggaagcgagagtcaacgcagggagcctgcaccctgcaaacagccacagcccttcactgaacggggagcataaatcccaccctagttagaaccatggcttttgtgcggaccagaagtgccagagccacaatataggggtgagatgtcttaccgttttgcggtgttgagtgtgtggattcccttttaagatagaaagtaggaaaactgccagtaagggagacgactcactaaaagaggattcagtctctggttgacatgttttgctgagtgtggttggttacttcaggtacagtatcacattaataggggccacagtctatatccctgtttagtttgttagttaccactcaagagcagacagatattgtccactttatcccaaatcccagccagactttgttgtatgctgtgcttcattca

SEQ ID NO: 44657 - DNA, 718 bp, Homo sapiens
tgttcccatttcaaagatgccacagaatcataaaactagtatgtagcatataatttcaattttgtcttaggggataaattagtctaagaatagtataccaaaacattaattgtgataatagtgtagtgatcaatttatgaatgaaatgatcctctattactgcatggcacatcataaaacttaatggcttaaggcaacaaccattttctttgctcatgattttttaggtcaacagtttggattatattctgccgggtgtttcctctgctgatcttgcatgaggtcactcttgtagcagtcatcatctggcagcttgacttggagccggatggtctaagatagtttcactcatatctgccagttgatgatggcttttgactgggtttggctttccatgtggttcctcgtccccagggagcctagcttagatttcttctcatggggctctccagtagtaaaagataaatgttgaaagctacaaggcctcttaaagcctaggattggacattccacagtgtcatttctgctgcattccattgattaaagcaagttacaaggctggattcagtggcgatagaaacttcacctaataattggagattaatagcaaattcctttttaaaaaagaatgttttgtttattaattttttaaattgacacattataattgtacatatttatggggtataattccatgttttgatacatatctgtgcta

SEQ ID NO: 44658 - DNA, 2210 bp, Homo sapiens
agtgtgcatctcactttgctccagccacattacattggcctttcctctcttcaaagacttttctgtctcaaggcctttgcacttactactgctgtttcctctgcctccaactctttccaaggacttcactgggctgtctctttctcacacagctcctattattcccccattcattctttcatttagtgaatatttattgattgtctaccaaaggccaataacttgtgcccctcctctccaccagatacatatactttctatgccattatcctttatcattttcatagcatttatccattatcctatttttcgtttacttgatgatctgtgtctctctctccacttgtctgtttgaacaagtgaacctcctaatgttgctactaaaaaaccgacaaatatgtgttgactgaatgaatcagaaagactgctatgcgactgagtctgttagtagggaagtcaatattatcaaatctcgggggggggggggggcttaaacctttcacagctggtcggaagctcaggatcagagaagtttccaggccacagagatgcaagcgtttctcttcagcgcaaagcgaatagcagcagaaaagaaaacaattattagaagacgggacctttgctctatctgggggaaggtaagctcccaaacaaaacctttttaaaaatccgactttctgaatgctctcttctccattcccagcttctgccacgtcccgggtcccagagtgtgcctgctcagatcccagaaaacttgcaggaacaggaagaggtcacacagtgttaaggggaagggagaacaggaacggcgggtttcttaccgcggtcaagaccctgaagtcatctcggctcatgtaacgcaacttggccacattcactttccccatggcggccccagtccgaacccagatgcctctccgacgacagccgcaaagcgtaaggcaggtcgttattccagcctctaagcgctttacagcgccagatggctcgcgcacgcgctgcgtcttagtataggtccttgttaatagttagaagtgctgttctcattgatataggaaaataaaactacttgtatgtcttatgaaacacatagtatgtaacaagtgaacgttttatttttgtgtaatttttgcgttgtgactgagttggcggagtgtagatattctctacaatgtgcctttttttttccatatctgtcaggacttgctgcctcaatgacacgttccgcctcagagagcaaagtggttacttaatgggaggagcaaatttttcccgcaaacaacttctactctaggcaaagtgacttccaacaagacaggggtaaaagaacctgagctagagtccagacaaccaaatctgttaaaggtaaagtggactgtaatcacacaagcacgccctctactcctaattgcgcctgctccggcagctccggagggcgtggttaatggaactcatgcgcttgctcagtacttctcttaggttggtctaggaggcttcgaagtgcgcctgcgctggttggggtgggagtttaaggtgacacgtggagagcgcggcggacgtccttacctccagaggaagtggggattttgatagttcgggctgacctacgcgggtaggacttcgagggcccaggagcgatttaaggattttagaatagttacccatactggctctgcaactcctcgatattcaagcctttgtctgctttttacttgaatgcagcatgtctttgattaaccatcttcaaccaatgaacatctccatttaaacggaatttttctttctgtacttacataagaaggcatagaaatgaattttttttttatttttgagacagagcccggctctgtcacccagactgaagtacaggggcgcgatcttggctcactgcaacctctgccctctaggttcaagggattcttctccctcagcctcctaagtagctgggattataggctcacaccaccacgccctgctaatatttttatttttagtagagatggggtttcgccctgttgaccagactggtttcaaactcctggcctcaggtgatccgcccccctcagtctcccaaagtgctgggattacaggcataagccaccgcgcctgggcgaaaagtttttaaaaaaaccaagtgactaactttatttgtacaaatttatggggtacgtgagaaattttgttacaagtatttagggtgtctgtcatcc

SEQ ID NO: 44659 - DNA, 2162 bp, Homo sapiens
gcgggcagctagagaacgtggcggggggcagcgcatctggcgccttggccggggcgcggagtgggaacagcccgcacgcgtccgctgccgccctgcctggcgacgagtggcacaatcgcccaccaggaatcggctggtgccgcgggtgggcgaaggcagcgccgccggcccggagggcggcgcggagggtggcgctggcggcgtgaaaggcgtctttgtgcaagattgagtgtggtggggggaaggcgaagagagaactgatccaggacctggacgcgggggtctgcggcgcccctacgcccccacgcccccagccgtccgcagtgccggaatgagccggatagcgccggcagggggcagtgtggcgatataggggttgccggggggagaggagggtctctgttcacctctatttgaggctgactggggagaaagctgcctggaggaagctgctggggtgcggggggctgagggatttggctccccgccctctcccctagatggcggagaaatcgggctagctggaagggcgcagctcctctcccagagctcattctggagtcggagaactgggagagcggcccccgaggcggagcctccctcccgccccgagtcgcgctgccccccacctgggggagaggggcgggcgccgcgctgccttccctccgcgcctcggccgcgtggcttgcggcttattttcccagctggcaagcgtcgcgctgcagacaagggaatgcctgtggtgagttgtttattttgttgaagtttgcggtgggcccgggggacgtggggggcgagcggcaggcagcggccgggactgttttgtttaggtctccatccacctgtggggtataaatctgccagcctcaaggcggcgggggaccggagtgagaaagctctgacgctcccaaaagccccttttcgcaacttacagatctaggaccacatttgattctccacgcctggaaccggctagatcctagtttacgctcaccccgccctccagcctcccatcaacgcttcccgcacccgctgtgtgcagggctggcgctccgcagagcaaacagcgcccacgacccagggacagctggccaccgaagtccctccccggcgcccttccccgttccttgaggataggggagctgaggttttcatgtgaagggcgcccatgaaattcgtgggaacttgttctggcgtcttctggagtggagttctttcaggggtttcgggtctgcccgggactacaaaatgggatcctgggttggctggagtttcccagactaggctggagagaggtcggctgttggctcgcgggagagcccagaggaaccccttgggcgatggcagtcaagaccggcggctgcgtttgcctggaagaaaagcctaaatacattagcgagctggtaaagcttttaaggccttcttgggagcgagtggctggctaatgagaggttaattttgtttcgaagggaaggctgcactggtttcctgagataaatggacaggaagcgcattacctccgcgcgctggcaagcggctcccaaatgctttttgcacctgccgttttgagcggtgagagcagcggcggagcccgcagggattgcgggggcccgttgtctacgagcgggtgatgagccccccgcaagccccgggctctctccctccgcgagtgcattgctcacgccaagctttgggactcttctctcacacccaggtcctgcgtgttccgaagttcaggggccccctgatcccgctgagccccctccaggagcgaaagggttaagaatgatgtaagtacaggcacttgatttctcaagtcgcccgcttggccctcttccaagttgtactttccttattttctctcctttcctttccttactgttctaacgctttttaataaactttcactcttgctctgaaaaaaaaaatgatgtaagtacaaaccacgagctgcttgacgctgagctgttggactccgggctatttcagccgctgctttgggtacacagtggccggggagcagccggggagcccttactctagaaaggattgcacaaatcgcaagcttaggtgatctgttaagcagtcagagattctcctgttagatttctggaaatggagacatattaactggagaacagttaaaaacatcacgtataggc

SEQ ID NO: 44660 - DNA, 1977 bp, Homo sapiens
ttcaggaagggaaatgtcaaactagaacacctgagcctcgcacagctgccagcgaattccggcggcagttcgcgggtaccttcccagcccatcctatctgctccggaccgcgggtgacattcagatttccaacaccgccccgagcttgctttaccagacaccctcaaacgactcggaacgcggttccgcagatgtgattggctgaaaggggacctgccgcgcggcgctctgtaaaagcgcctgcttcctccaaggaggtggagctgaagctggcagggccagggcagggaggggtaattaaattaaaaaaaaaacttggagggaagatgaatcggatcacattaattcaaggagaggtcaaaggccggtacctttgtaacgccggcgagagtaagacttgcggtcgcccatttctgttgggcgcgaggaaacagtaaatcgcggaagggggtagagggggaaggaaagggagcgcgaggcagcatgcggcgcaggagagaggacttggagtcgatggacagggaactcgaattacactgagcgggcgggggagagggccctctgggtcctgcgattggcaggctgagtcgggctgacgtgcggtcacaaccaatggggaggaagggagggacacggcgggggattatggcgtcgtggattggcgggcacagggcggggcgggacggcagtgcgggactgagattgatcgaccgcgggggctgccgcgcagagatatccgggccgccggtgggtggtcgctagggctgggccagcctcttggaggtccacgcccgccgagcccacgctggctggggccggggtgccggcgcgctcgggactcgtctcagcagtcgctcacggtctttgtgtcttctcttccgcccctttccctgcctgccgcctccggccgccacgatgcccctgcgccccgctgctgccgccgcggactggctgcgccggctgcgcgctgcttgctgcggcggtggtggcgccccatctgctacacgggcctgaagaaggaagaagaggaagcgaagcgcgccccccggcccatgccgcagccacgggcccagacccgccacggcgcccgcgccgccgccctcgccggagcccacgagacctgcatggacgggcatgggcttgagagcagcaccttccagcgccgccgctgccgccgccgaggttgagcagcgccgcagccccgggctctgccccccgccgctggagctgctgctgctgctgctgttcagcctcgggctgctccacgcaggtaggacgggagcgcgcgaggggagccagccccggggcctagggctttgttcccaaatagccccaggtctcgaaggcgctcgccggggcggaagggcggcgtggcgcaacgggaaaggcctcccgagcccctgacacgcacctctgtcgggctccgggccacagtaacgcagccacccaccgggcggccgccgggcgcagagacgagccttctctccaccctccccgccttcggctcggaccgctgacaaatctcccctccgacagccgcttatcaaacatttagcgggcgggggccgcgcgcccgagacaaatgttccggatgctttattgctctctgcgctggtgtttactgaaagtcaggctcggatcaggtttccgccgtcgcagccgcctcggagggagacaaggagccttgtgctgcttttctggagttgggggtggcggcgaggcgaaggaagtacaccagatggaaagatttttaccagattttgcaaacctgggagttaatctcgaagtaacgtcaacttttttgagcagggatttctttcgttttggcaaaagctgcgtttgttcagcgatcagcctcccgggaaaagctcgtgttttgtgactagccgggtgtcttcgggctccgtgaggggttgacagataaccatgctgccttctggaggtcggcgcttccccagccttgaggcgtatgttcca

SEQ ID NO: 44661 - DNA, 689 bp, Homo sapiens
gcagtttttcttccagtggcttagtttgagaaagacacaggaacacaatgaaaccctgtatctgaaggcttcttaaaataggagtacagtgtataaaatagaacaaacaattcccaaagaacaatgtgattttctcatgtagctcaggaagttatgaagagtttacaaatgtttggtcttatcttctttcccataggtgactgccaacagccagcccaatgtcgaatccagaaatgcaccacggacttcgtgtccctgacttctcacctgaactctgccgttgacggctttgactctgagttttgcaaggccttgcgtgcctatgctggctgcacccagcgaacttcaaaagcctgccgtggcaacctggtataccattctgccgtgttgggtatcagtgacctcatgagccagaggaattgttccaaggatggacccacatcctctaccaaccccgaagtgacccatgatccttgcaactatcacagccacgctggagccagggaacacaggagaggggaccagaaccctcccagttaccttttttgtggcttgtttggagatcctcacctcagaactttcaaggataacttccaaacatgcaaagtagaaggggcctggccactcatagataataattatctttcagttcaagtgacaaacgtacctgtggtccctggatccagtgc

SEQ ID NO: 44662 - DNA, 616 bp, Homo sapiens
gtataaaacataattctacaaaacaccaagcaactgatgctattacttatgttatttaacaataagtattccttatttatattattaagagattactggaaaaccttgaacttcattacatatgaacaagtgataataatcttgcagatgcaaattcacgaaaagtatttctctaagtgttttaccaattacataagatggatcaatctactaataccgtcagcctctaaataaagaattataggatgatgactcagggttcactctgtcgcccaggctggaagtgcagtggtgcaatcattgctcactgcagtcttgacctcctgggctcaagcaaccctcccacctcaattcacaagtaactgagactacaagcacgcacaatcacaccctgctaatttttatgttttcatttttcttagagacagggtctcacaatgttgcccaggctggtctcaaactcctgggttcaagctaaactcccatctcagcctccaaaagtgctaggattacaggtgtgagccactatgcctggtctgcttattaaattttatctaaataatttttattcaggtaaatgaacagcaaaataagcataataataaaataattatgt

SEQ ID NO: 44663 - DNA, 2584 bp, Homo sapiens
ccgaataagtcctctgagacccttttcacaaccctgagttctgaagctccaagcgcacacagcgctgtgtcctctcaagcgtctccacaatgactaccctaagttattaaacctcttcaatcctctgtcttttagcagttgctttgctcctgctaagtttttaaagcggcactcgaaagaggtttggaaaccatcctcactcatccatccagcgcgctccaatcagcctccctcgcggacctgcccccctctcccagggcctccatcccggtccaggagtccctcttcccgcctcaaacttcccgcagacccgccccgcgccctcccaggctcgcccgagccgccgccccctccccctcccgccgctccccacgtgctgggagcccgggtcgcggcaggacccacgcaccggctaagtgctagccattcgcgggtctcctctcgcggcccggtcggcaccaagccgaagaggccggggcagggccgccgggccggcgcaaggatgcgttctgcggccccggcctgtactcgccgctcacacgccccctgcgcgccaggcccgtacaccgccaccggcactcacagagccacccggccttcacccggccgctgggccgccgcctgggcaccgcgccgcgcccgccctccgcccggccggttcctgtcctctccgccacatcctgacccgcccgccgccccctttcttaccggcgggcttggcggggcggagggagccgactcgggtggacggcctcccccgcgcccaggcccgggatctccgccgcccagtcctagggctccggcgtctcggggtaagcaagagtccgtgcgggggagggggaaggggacagacgcggaggggaaggggaagccccggtccgcagcaccaacgcgcgatcccctgcggagtggagctaacaattcattattgaagcaccaagggcgagggcagcaagagctataagtaaccagtcgtcgccgccgccgccgccgccgtcgcgcgcgcgctcccgctccctccgcttatctgcccccggcagccgccatgacgccgagaaagcaagcgagcgcaaccgtctccgtcgtagccgccgccgccaccgaggtcgccgtcgcctccgcctcccgcgcgacgtaagcgcctctgctcactccccttcccgacagagcgcgaggcgggcgggcgcgcgcacgccgaagcctttctgctcgcgcgcgggaggcgggagggactacgttgaagggtcgtgggcgtaggaaaaaagcgattggtgctggggcggggcggggggggcgagtgcgcgcacgcgcacgaatgggagtgcgcacggcggatgcgcagaggctgtcggactctgactgcgcggagaccgctggactctggtcgcggccttagtccgctgatcctcgcttgggtgcccgcccttagcggcccggcgttgaattccgggaagtgggagcttcaggctcgctccgtgcgggtatgggcgctaatgtcacttgggatggttgcgcaaggacatcgcggcggacactgacaaggaaccggggaggaacgggggtggggagagactgcgatgggactcgggaagccgggaagggccgcgctgaataagcctaaggggccgggtcgcaaggagtgtcgggtagcacaggcctcggctcagtcggagcgccaggcctcagggtccgggcgggggctgctgcgtcacaccaggcagcctgggaacgcaactgttgggcaaccgtggtggcctctcgccacctcttacgcttgggcgatctgcgattgacgcatcctgggagctgatgtcccgcacgggcggggcgccggaggaggagagaaaatagagacccggttgttgacagcctgtgatgccgcttgattcatgtgtgggtggcctggtttagaaatgtaccacccttcctttctaggttcctccccggagggcggggtgacgggtgcggcgccgaatcgcaacaaaaaacgctgctcgagggatgttagtaactgtctcagcttaagttgctgccttttagcttacagtttgtatcgtaactgtaattgtggatcttagttaaatcccttcagtgtgttggaaacatatttttaagtgtatttttgaaacatacttagagcattttgaaatgcttttttgaaagcgttttttaaatcaaaattctgttacactttatttttttcagtctgcagatgaacttgactcactcaaggttaatgatttttgttttttatttatgtttgtagaggcggggttttgtcatgttgctaggttggtgttgaactcctgagctcgagcgatccacctgccactgccttccaaagtgctggaattacaggcgtgagccacggcgcccggtggccgaggttaataataattaaaagtttctaatcccattgttcagttatttgatttggtgtaaaggcgcactttccaagtcagatgagtttgtggtaacatacattccccaaataattatttttcccttgtgggaaatattccagttttaggctaccagctgtttaaacagtttggttcaaatccttcaaaaaaatctcaaaaca

SEQ ID NO: 44664 - DNA, 1147 bp, Homo sapiens
cctacttggtagaattattgtgagacttaaaaatacatacatacatatatgtgtatatatttatatatgtatatataaagtctcacaataattaagtgccttaaaatattaagtgtcttaaaaaacgtatccagtccagagcttatacatgcaaatgagcaatgagcaataatagttaatttattctcaaagagatcaatacagttaattcactctcagaggcttaagcagtcacctatcaaaattgtttggattcttccatcacagtagagcataaataattaataatagtacaaagagcatttttattttagcagaagttaaagcattagggtcaaaggaataaagctcaaatgaacagagtttaaatattaactaaaagaatttgtttgttttggggggtggagcagttcaagagcggcttggccagggacttggaaacaggaagtagctcaggaattcccttagttgtagcactatgagtctgtttaagttaaatattgttaattaacgccttgcaccccaagggagaaaagacaatatggattacaagtggatgtgtgttagcaaaactacctcttgagaatttccaaattctctgaggatttcagaatctatcctgaggatagaatcttgagaatttcgttattttgggaaatctcccttgccgcctctgctgactaccagctgctatcattttatatttatttattactgactgattgactgagacaggatctcactctgttgcccaggctagagtgagtggtgcaaacacagcagcctctaccccatgggctcaggtgatccttccacctcagcctcccgagtagctgggaccacaggcttatgccaccactcttggctaatttttaaaattgttacagagatggggtcttatcatgttgtccaggctggtcttaaactcctgaactcaggtgatcctctccccttggcctcccaaagtgctggaattataagtgtgagccactgcacccatcctgctatcttatttatttatttattttgagacagagtcttcctttgttacccaggctgcagggcagtggcgcaatctcggctctctgaaacctcctcctcccgggttcaagcgattcttgtgccacagcctcccaagtagctgtga

SEQ ID NO: 44665 - DNA, 2076 bp, Homo sapiens
tgcaacagatcattgttcatcatcagcagtatgggtggcactaagcaacaggcagaattatttttaaacccgcgaggtaaagtagattaaaggtattattaataggctaggcctaaaggaacagtgtcttaattatggactctttttcctatcctttcttaaagatattatatttctacaactgatgaaggactagattaggcttaggctagcagtagagggaacactcattgctgcattaagatcaaagaaccttccgaaattttggttgctccaagtaccagaatcagctgtcattctgttggaagcaatagggaaagggtagctcacaacatttttttaaaaaagtatttctcaatcagtccaccatttactggactaggctacagtgaactgcataattttatggaatctcgtttttcagggtatcttgttaaccaatgggctgacattctctttgcaggagctccaccaagtggtcatccagcttgtgggcgaaagtcagaaaaacaaattaggaatcctaagaaagactgactgatagccgagtagagcagtctgaaggtagataaacgtgaaccctccatccatagggagattcagatacaggcttcatgtttagacaagacatctgcttttcctcaccatttgtttttggtaactttctggtccttatatgaactatgcctgccctttgacctcatgaccccatatgctttgagccctccattttctcctaatcaattagtctccttctgtcttcccattttccctgttcagctccacacactggtgtccactacttaaattatgctttcaatattactttcaactcttaatccagccatcctgtttctctgactctggaactgagcagctgagagttcttggagaaaaatcacacagccataccaattgatgtcactgtatgttgttgctttctgaccaaggctgagtcctcagttatggtgaaggtgcttctgatcaactgacagtgggtattccaaacatttacttcccttactgtcaaaaccaccaactcttcttacactcagcaaatgatgattctgtccttttcattgtgaaaaggcaagggcagaaagtgaaaacggcaccttcctctccctcttacttattcgcttatttattggcatttttacttctccttcctgttggaaaaggtgcccatctaactcgaggctcatttctcaacctgtagattggattccatcctcttctgtgtactcaatgactttattatatcaatcatcgccctctttcctgttttacttcagaaaataaacagaacagtggtttgtcttattgaaaatgaaagcaaaagtaaaattaccttggcagttttgggtctctaattataagccaaagaaacaaattgagaacaacttatggaaaaaatgatattcattggaaatatactggtataatgcagaacagaagaaaatactaaacagtcaagcttcctgagggcagaaagtacaggaccactgaaatgaaaccgtggacatgcataatcatgtatgtttactaaggttcaactacctttcctccttgtgtcaccacttaagatttagctcctaggaaggaaacatttgattggccaagcccaccagaaacatgtgcagaggagatgctcctgatacctgcaccattgaattccataaggcacagttcagggaactttgctttgtccttattttgtttgatttatcggtagcagttctccttctggagtccttctcctttgttttctgtggcattattctttccttaaaaagaaaaaagataattctttttagtctccattgtaggttccctttttttctgcttaaacagtaagtgttatcttcctcatgggttcaacttcgatcactgttatattacaaacttcctcctgccaaatcttcgttttgagtttgcgatggaacctacgattgaatttccaataaaattcagtatatctaaaagtgaacttatgtatttcaaacctgcgctttacttgaatgccacattttcataaatggcatatctcttatccagtcacccaatccacttccc

SEQ ID NO: 44666 - DNA, 564 bp, Homo sapiens
acaagcggcgcaggatgtctgggctggaggggacaaaagccaagttctcaatacctttggcgctcttcatgtctggatgggttctcccgactccggtgcttcagagcagcagagccaggtccctctctggctcctcccacaggcaggtgacagcgcccccgtgcgggaagcttcccgcctcctggccctccagcctccagcgcactctccgccaccgcctgaaccttcctactccagctcgcagctgtctggagcgcagagcgctgagcgggggcgttagcgccccagcctgtggctttggcgctcagctgtgcctcacccgtcgcctcaaggaccaaccggaaggcgcggcgtgggcgtgccacccggcggcggccgagtagagggggcgagagttctcaccccacagccttcgaccggagtccgcctccgcccaagcccctgcggttctgacctgagccttcagcccgcagcgcgcctcccttgagcccaagcactgggaacacacagagactgtgggagtctctggccataagctccccttgggtgctgacatgaaacctg

SEQ ID NO: 44667 - DNA, 1810 bp, Homo sapiens
gtttagcagaaagggatgcagatggaggcgggaagccaggctaagaaagggataccgacctccctcctcgggtcggaggtgtgaactgggaagcactgcgcagacctgagcgaggtggcctgaatccaggggccgggcaagggggtggtgtgaatagaaatagcacatttcccaggctttcagccccggtactctgccatccttccagttccatgcactcagccaggtctccaggctggagcaagggctgggggtcaatgggtccttccttctctcgggaaacgttcttctggcgcgaagctgggcggagggagagtcggacattttcctctgcttctctcagggcagctggcgtggccacctcgcaaggctgcttctagggacacgagactcgggagggtcagagactttcaggccgggccttcactcccttccccggggcacttgggcaagagttccagctcttggctacctctggcccgcgcgtgagttcagacacccagcacacgcgacccccgcagggaaaccccgggaagctgcgcgcaatcgctggggactcgccagggctccacttcccaagctccgcgccccctgcgcccaaagaggcagggcggagcagaggccgccggcgtggaggaggcgagcgcggggctggcccgggagccgcccccggggagggactgagacctgccccaggagtcgagggcgagcggcggacccggctgggcccggcgcacgccgaggagagggagcccccgccaccgccgctgcctccgcgtgctcagcctgtccccgcccagggagccggagcctccaactaactccgcccgccgctccgccgcccgcaggctccggcttccgtcccggacagagcccgtggtcgcgcaggttggtgttgttgccgctgctgccgccactgcgaggcggtcagggcaagggtgagggtgggggcgcggaagggggcctgggctcgggatcctgctgccaccaattcctggtgccccaggaggttgttgctttttctcccgggctgcccgggtcgggggtggggggatggggcggggatccagcgatgcggccagggaggattttggggactgagctattctcgcatttcccaaacctctctcacgacccttcatcaccattattaagtccctggccagtttgtgaggggtcgtcctcccctccggtccttctcacctccgcacttctccttgtgccctctccctagggggtacaatttgttcattcgccttttctgcccccaacttggagaactctccgtgacgcctagaaagcctcctcggttctccgcccgcccttcagtctagtttggggaagtagaggccgccgcggagtagcaacctggggtgtggagtgggggcgagtgccgggaagcagtggaaattccttcccctctttctttcccgtccttgcccagctttgctctcttcctgccgttttgccagcctccgaatgtaatacgcgggcgaagggcgatctccaaggcagaatgggaagtatccaccacttgggatactagttaagtctaggttcagtcaccttcccagctctgtggccttgggacccgccccatcggaacctgtatgttgtcatctgcaaaatatgcgtcagctctgcctgccgctgagggtagttgtggggctcccttgggatgacttagggtattacgtgattttgagcacggtctcttgtctcgtgcagctgcctgatggcaggtcctgtgttctgatcgtctgagttcaggtcctttggctgagatgtgattatctctctgggtgatttg

SEQ ID NO: 44668 - DNA, 716 bp, Homo sapiens
ttgatgatatgaagttaaatattatgctggaggagggtcatacttttacctgagacatattgctttgttcttattccatttggctggaattcttcctattaagtaactactattttaataacaaagttgtgagtgttgtggtggcattattaaaatacatatgtgtcatctgaaagtggagataaaatgtgttcattgtcaggggaacatgtcagatgcagtgacagaaatttggtggctcagtgctctgttggttgacactaacggtcagaggctaggtgtgaagaaactggaagagtatttatggatgacattaccaaagagagatggactttgatagagaaaagttagctaatactggcattattgggagttataccttacgtcataggtataaacagtacttttgttttttaatttgggttttaaaagcatgtggtgaaagataatgaaatagatccttggctgttaaaaattcagtatagagactgaatttgaggataattgattttttaaaaatcagaagacatgtttactggaagttggaattttaaaagcaaaacttatctagcaatttgatttctggatatgtacccaaaagaattgaatgcagagactcgaatagacatttgtatgccagtgtttattgtagcattattcgtaatagccaaaaggtggaaacaacctaagtggttgtcagcagatgaatggataaa

SEQ ID NO: 44669 - DNA, 1059 bp, Homo sapiens
cggaaaagggaatcttttccaacctcattatcagagagtttagtgcattttttcctgaaatgttttacaatttccattttgtcagacacattttgttggagttcatagtttattaaccatgagttattttttttagtttatacttgaagatttagaggcctgtgatattttgtttaaaggcttctaaatgatccaaacaaatcagaatatgcaccagcctcagcaaaaactcctgtgatctgttgacagatttttggatctgggcccttggaagaggcactggacatttgtaacaggaggtaatttgagatctgtacaaacaagtttttatttgttcaagttaatgagggcaacaccagtggagttggaccctctgtagctaatagtctgtgagctccatgggcccttcatgaagtcagtctccaaaggtcacctgcaatccatgttaggaaccaggtttgtcggtcaatagtctaggactcatagatcgatctgtgcctctgcaaccagggaatctgacatggtaccaaaatgtttatttatttcccagatgtcatcccagagtttgggcaatgagattggatatttgcagttccacacagtggaaattcaccttttaaataaggcaagaaaaattgatcttcctagtgtctggtaggagtctggtaggagtcatctttgctcttggtaagattataattctcttacctgtttattgtcatttttttgagcaccacagtcagccaaataagattagagaaaattgtgaaagagaaagcatttctttcaattcagtcctttcattcaactctctttgtactttgcctccttcattttctttcgtttgctcatcacattcagaagctcacattccctcatcttacatgagggaagctataaatttccctttttgaaatagtcatctgctatctgtgtaactatgagcaagctgcttaacctctttgtgccttggttttcttatttgtaaaatggtaatagatattacctgtgtcataaagtcgttacatggattgaatgcattaaggtgtgtctaacact

SEQ ID NO: 44670 - DNA, 2793 bp, Homo sapiens
atgaaaaaatattttaaaatctctttcctttcattaatggtgttaatgttttatagcaatgtttataaagcttcagtgctaagaagaaaataatcagaagactcacgaattgtatccttttataacgatataacagtctaatgcagttcacaaactgctggttctggaggtagagagacagatgacaaggagaaatagaaaatgcgtaagaaagaaaactcagttcacgaaaagcatagcctttgaagtagttaaaagttttactgctaataattggtattcatatacaaaagtaacgtaaatgaaagttgttttttttttttcaaagcccatacatatgagaaaatggcttgaaactgtaatattcgagacaaatataaatatcttcttatactctgattgctaagtaaaggtatcatttacaagggggattaagtggtttctactacataaagaaagactgtcctgggacttctttggatatgctcatattttcaagaatttctcttaaaatcattacttaatgtacttaaacatgtaggaataagaaaaaatgaaagtgattgattacaacttgtagttttgcaagaggaatgtcagggtcacatttggttaagctttatacactttgtcccctccataaaagcaaataaaatcaactcattgcttaattcctttaataattttgtgttcaataaagtaaggcagttaggtattatgtcaagattaggacttaactgtttcaccaagggttaaaaacaaagccaccaatttaagcccctaaaaggttataatacccgctggttccatcttaaaatctgcaattttcaatcaacatgttaacttggatcggaattctgacatttgaattattctattttaagctccaaaaaatggacacgcacaattttatgcaacgtcaaggacctgtaaatttaaatacacttctctgtaatctggttcacttcagagtacaaattcattgaacaaaaaaatgccttcatcgccatatgcattcacatgaagccacatgggataaatgcatttccactttaaaaagtatctactttggttcagaaatgcccatttaagaaaaacctacactgagataaagtggacatttttcttttaaaactacgtgacaggattccctcttgacctcacgtttctccccgccacgtatttaaatttggggcaaaatttctgattaaatgactgatcaaagtaatggggagaattcttcaacgccggccaaaagtgcttagtctcaaacgctgtgagggagcatttcctaagctttgggcgactcgttaacggaatcttaagggcaaggtccaaccacactcagaatcagcaggaaaatgaccgtttggtaaaactcaattacacccagtaggcacctccccaggcccgaaacagcactcgccctttctgctcagctagcgcgggacatcgcaacgcccaaggccctcctatctcaaaggcgcttgcgcaaaatctccccacagactcaattaaacccttccttaggccggtcgaggcgaatggttttgaaattactgtcgggttacgcctcactttaaaaaacagtaggtatgacacagcacaccagaacgaccactcaccgaggtggtcctaaattcaaacgacagatttaagcttcctctcgtgatttatctcgcgctgccggaagcggaactacccgggtcctttagagggcagtcctttggggaaccttggaaccacggtcagaaaggttaggactgatcatttggctcttgccggaaatcgttccgcccggtgaggtttcggcgtgagacccgaggagggcggggaagaggcgtgacggagattcctgaggtgtagtagcctgaggttcccttatgtggccctatagctgttactgaaggaagtagcctacgtccacgcctacaactgaagtctcttgacaaacacctcacccctgcctccgggatgaaagggggtaacctagacctgaatgggcttgaccatctcacaactgctcgcgtgacgaccgcattcgtggcaggtgagggcccaaaaccggaggagaaccggagatgcggaacctgatcatgccagggttgaggcggctgctgggcttctgctttgtctcctgtgctctgcagaccctaaacacatgctccaccgaggggcttgtgctggagagaatgacagcctgggcgtggagtgacagtacagctttgagggtcctttcgcgccttgatttctcctcctgctcccccatggcttccctttttcatttcttgggttcgagacgccagaaattgaagatcagctaaaagggaaccgctgagcttctaccccacgctgtgcctggctccactgaagtgattagcctcgagttatgggactgctgtgggtagaggtggctttttaaaaaattttctgccttagtctttatccctctctctgtcaaccccacacccactttaaaataacaaaagcctcatgtgttgcagcttttcatagtagggaccgaggctgcagggcactgccgcacctagtcatttggaggtcgttgcagccttctgcgccttgaagaagaaggggccagggtgatgatccctggatctcattcacgaggttcttgaccacttcctgggagattgcgactcttggtgtcctttggctagtagttgtcttgctggaaggcttaactgtggaagtgggaagcatagctgaccttagcacgtaaaatcctcgctctacactgggacaggattttgttttgctattgagaattcttaa

SEQ ID NO: 44671 - DNA, 662 bp, Homo sapiens
ttatagaacaacaataatgtcttttaagaaaactacaataatatattcattgtgaaatggagcaataaaacaataaggatgtttccctttttcttcaggagagaagtatatagtattcttcaagctgaaggtattttacttcctcgttatgctattttgaaccgtgacccaaataatcccaaaggtaagagtaagagattttaggtaagcttcctttgccacttgacatacttttgggccacattcttacaataattaactggaaggaatttaaagaattcatagtattctattccattttaaaaaataatctaaacagacaaacatattcaattaaaaggtgacactgagttaaaaggctacctaataatttaggaattatttatccttctcttctttggcctacttttgacatatctctaagaatcatgagttagaattttgaaattacatacaagtaaatgtgtattgattaaaggtgaacaagtgatttatctatgactattgaattaagtattagaaacttcatgctacaatgccaaaaactaaatactggccaagaatttggaaatacagttggccctggaacagcatgtgtttgaactgtgctggtctgcttattcatggaataaacatgaattgaaaatacggaattcgtgggt

SEQ ID NO: 44672 - DNA, 1402 bp, Homo sapiens
ttcatggccttctagttttctgtacttttgcttagtgctgagccctttaagcagagactcacaagtgacaaatatcagcacaccacttaactgaggaagccggagtgttcccaggtccgcaagttggagctctttagttggagtgctgggtttagactagagagcgggtgttgcgactcctcctccccaccaccagtcaacaaccccgcccacccccgccaacttcttctggcctcttagcgcctttctgcagccagccggcccgcccttcctccgggtgtctgagagctgggcgcaggaggcgggctcagcgctgacgggctgcgcctctgcagccagagggaggaggcgggaaggcgggcggaggaggaggcggaggaggaggcggaggagggggcggggactaagcagggcggtagctggcgccgagcgcggtgggagaggagagggtacccggctggctcggctggcggcctctgcctggatctcggcgccgcagtcctgcgcctctcccgcccctgtctcccgctccgcagccccgggcacggcggaggcagcggagccctgggccatcggtaggttgcacggggacgacggctccgtctgtaaccttttgtgctgcagaaaaggtggtggttatggggggcttgggggagtgggtttgccccaggctccgatccccagtgccagccctaatcgcggcgccgccccttcctctccgcctcgtgtctgggccgggcgcacgatgcccgcggtgctggggaaacccggccggaccagcttctgcgatgggcggcggggcggccccagcgtcccttggccttggtggaccggttcccaggcacccgaaggggactggggtctggtaaactgggtggggcccgcgcggggtgcggggagcttgcggttccctggcacaggggtggggccgcagacgccgtgagtgtgcagcgcgtgtgagtgtgcgggggcgtgcgcccccgtgtgcgcgcgtcgtgcgctcgctggggaggtgcggggactcggcgacccggagcgcctctcccgcggtgccgcggtgcggaagtcggggcgcgttggcgcgcacgctcgctcgctccctcccttggccgctgttcccgcaccgcggggcagcgggcctggaggcccctttgagaagtagctttccccggccggcggcacctttggctgcgtgcccggccgcgctcagggtgcgactgcccgggtcagatagcacctcagggcgagccccggcggtctgatctcgccgaccctcctcgtcctggttgcaacccgcgtgcgaggccgcccgcgccctccgagtgtctgccggtgcagtgggggtggactggccggctgtggccgtgtgtgcgcgtgtggattggggcccggtccgagccag

SEQ ID NO: 44673 - DNA, 414 bp, Homo sapiens
agcaactacttttttaacccaacaacgtatagcccttacctggcagaggaagaacttagtgtttagttattaaaggtttgactggtatctggtatctttcctttataacatgatggctgttacttcctgccacaccccccataccacacccaccttctcttgtttatctagttcagaggtcacagattgcttactttgtactgtgtctcccaaatctcatgatctgcagactcatacattaaagaatccaggtctcctgctatttggaagtcagaaggcctgtctgtactggacctgcgttttccttcccttaggacacactcgctagttcaccaacactccagacttgctcacatacagcctgctttactcatttacatcacctgcctggcccctgtagacagttcacattgt

SEQ ID NO: 44674 - DNA, 2016 bp, Homo sapiens
ttttgatttattctagaatttacttcgctgttcctttcatattgaaatttctacatacgttaaaaatactatgcataacaaaagctacaaattttcaggactttattttgaagcactgctgtacagctcctgtactgatctcccttccaaattgtctttctcttaagtttattttccaaaaacccatattatagttttttcagctaggtttagtttgaataatatttcactgtctcatgttctggggtcaccgtcactccctcacattctcacaggccgcgccaggtaactgcaaaattgtccttcaaaaatacagcgtcattcactacctccagggcaatgcttatgcatatgctattctgtggagatgggaagtggaaagtgtacacttttccctctagctttctcagcagaaaagccatctagaaatagtaccattattcattccagagaagcacataaagtctaacacccaattctactgtttgatttactttttcaattctcattgacaggttatagaaggtaaagatttgaaggcagaataaagtgctgcccttgttttccaagaagctcaaggactattccgagaaatcatttaaaagaatattagatgtaaagggacataaatttttaacaaaccaacatccacttttactgacatgtaacccggggcccatgacttccgcatgctcacacagaccgaatgggacaggacaggaccttaaatatcgctctgtcactgaaatcactgaccatcaattaacgaatttcatccactccctgggcactcaagaccaattaagtgccacccgtgcacggtctctgaaaatggtaaaatgccttaagatattttactttcttgccactactgtgagattccttctttcgaggtgaaatcacaccctaagtagcgcttccttttccccatctcagcttgggcaggaaactctacgacctcagtaccgccgcacctccgccctgtcgcgggagcccctgcaaatgcgtccgtggctcccgcgcctgcgcccaccaaaccactacgaggctccgccacacaactcagcagggccacgcagggcagcgcgggaaccaaagagcccagggaagtggtcaccgcccccagaggaggcaatgagacgactaactccccactgcttctactaacccaaaggtgaccacagtagaggcaaccaggatgcagtccaaagattgggatatcccactcgcttttcctggagccggatgcagtcttcccgacttccggtggagatccgggggtggggggggggcgggaggggggcccccgcggttttatgggagatgtagtttgaagcccacaggttgtgcgcaagggagaaggggtggagattgggggtggaagtgtttgggagccggcgcgggagagatcgcggtctaaaggattggagctgaatgaagggctgaaaatccttctcctgagactgtgatgtgtagatagaacgtggtgcaggcgatcggaaaactgtaggcctaaggaaacgattttaaattttccagcgtctcccacccaactcctagccctctctccaatacagtccaatgcaattgagtgctcaaagcattctttcctgttaaataatcctggactattgactagaccaagtcactcttaaacgagatattcggcctctgtaacaccttaatcattcaccccatgggaaaactggtatcatatactgacgcctaacttattcagtagtcctttaaaaagtatgtatcaagcgcgcaaaacacctccttgggttgtgaggtgtaaataggataatgtatccaaagctcttaggatgttgtgaagtgcagagtgggcacccacaacaaaattattgtcgttattttttatttcagttcctgtgcttttatgctccaaaacctacagaagttatgagtccgagattacaaaactaggtgttggcggtcttctaacttccagaccagggctttttcctttactaaactctctccttggtaatcagc

SEQ ID NO: 44675 - DNA, 1896 bp, Homo sapiens
ttttggtatgacaaaatgttttaggctaatcttgtaaatattttgctccagacctggagtcagccatttctccaaagagccttcgttccttttagtgagaaatggtatttagatatgacagtctttgtacttgtggtgctcattgctgatgagttactgagtatctccctggatgtaactttctcccagggaaattgaacagttacagatcttttccaataagatttcacattcgaaggacaatatggtctaatatccatagatgttaatgtaataaaataatgttttcattttattacatttccattcagaaacttaaggctcctgaatgtgtacaagaaaaagttaaaactctagctttggatattctccttaatatggacccaacatatatttttagcaatattttttcccagaatttcctatataaaacctttctgatccagacaaattggcctatacactgcactgacctagggtatctcttgccctttcctacctcactgcttgtgctcattccacttttcctaccttaaatgctttcctttttccaaatcctacccacttcttaaagcccaggtcaagtactgcttaattggatcttcattactgtccatagaattataggtttgccactagtatctccccgctcttaccacttcattgtgtgctggccctttttccaaatgccagcatctatatctctttgcctgagggtttttttcttttcacaaaaggactttgccctccagctcagcagatcagcaaagccaaataattaatacctcttggggcatgacaggaattgatatataaatacctcagcctttctcaccctcttactcagaggcacatgttctacaccagctgccagctttccccaaggggatcaagttctccttatctagcgtggacacttgattaaggaccacctctctttattggctgcctttccttccctgtttccctgccattcctcatttcttcacttctctaccatttttttcttcctagataaccaatttcatgtgaatccctttcccaggatctgcttcttggaaaacctaaactaaaacaaggaaattttccctcctttcaattcatactctcgattatgtggtgatttgcctcccctgcatagcttggggagaatcattaacccagtgattaagtaaatatatccctattatcagttattctagaacacacatccttttgtctttatcagaacagtgttgttacaaatcagtgcatgaaattttgattgtcctttagatgaataatttggagttcaaattttaaaccacttttttttttcttgcctatagtgtcagtttacaaaatggcttatccttcactattactagccctctaagaccacatggacctcttattatttagttttagctgctttggaaagttacttggtttcttttttgggtgccctgcaaaggaacgcatagactattaaggcagaagtatgttaaatgtattcttcaaatttagtaaaatccagtcatttttctctaaaccagtagaaacttgacattatgggcaacatataaatatgagtttacgtaattttacttagtaattaaccttatgctatctggagatgtcttattcttgccacacattgctttttattttttatattaatacttcatgtatttttgcctttttctctaatagcttgtagtttctttaaacataaagagtcttactttttaaaaaaaattctccagtaatagctgcatttgtctcattagctaaggcacttgataaaagttggtggatggtagtgatgagaactgtgctttatatttagaggtgaattcaataaaagtgaagatctcttcagttttacataagggccttgatattagatagtttcat

SEQ ID NO: 44676 - DNA, 853 bp, Homo sapiens
cactatcaccagcatctaaagaaatatataaattaaagtaagtccgtgattatatttgagtctcaaacatcttactgttaaaacctatgggaaacaacctggtattacctcatcaaagaaaaaaaaaaccctatttcttaacaaaacttccattccagcctggtttctctgcttctttttacagcaaaagtccatgaaagagttatctacacttccagtccccaaatcctctctttgtatctctcttatatgcactcttctcaggattttgccaccccacatcccaccaaagttgctcttatcaaggtcaacaaagaccctctggcgctaaattaaattctcagtactcatcttacttgacctattagcagcattttacacagttgataattcctatttcctgaaaatgctttcttcacttaactcccaggacaccacactttcctggatttctttctgtattacttcatgtcttgtctgtctccacttttttagtttgtcttacttatcctgtcctcttaatgttgctttggcaactcagactttggacagccctctctctatccttcctactttgctgatctcctgtgcctcatggcttaaatattatccagtggtgacaattgccaaatttgtatctttggctcagacctctcccatgatttcaggaccatatatccagctgactatttgaaaaatctattcagatgtccaatagatatttcaaaattaacatatccacaaatggattcttacttttgtcctccccacaaatttgcttcactcatagtcttccccatatcggtgaagggcaacttcaactttctacttgctcaggccaaaaatcttgggg

SEQ ID NO: 44677 - DNA, 1042 bp, Homo sapiens
ggggccattattaaataaaacaagggttacttaaatacaagcactgtggtaccgtgcaatccgataacctagaaagctgcaaagtgactattggggaggtggcatagaaaatacagacctgctgcacaaagggatgattcacctcctgggtgagactaagcaggacagtgagggatttaatcatgcaatttaaacttgtgaattgttgagttctagatttttctatttaagattctcaaactgctgttgaccatgagtaactgaaaccatggaaagtgaaactatggataaggggggagtactgttgccaagaaagattgccaaatcctctccttaaaaaaacaaacaactgtaaagctggatgaacttacaaaaacaaccctttccactctgaacattgagcaacagaatgcaacaatctgagaaacatttgtgcttgaaaaattgatgaaatatgggtaagaggtctcaaggtctattcacattatgacaaagggtgacagagttaatatagctctggggcaaaactataaatgaatatcattgtttgtcccgcatgaatgccatactgcctctgattttcttacatgtttagtataggaaaacaatgcatttatgaactcaataactgtatactagatatttgaggacccctaacttttgttgccaccctcatatcttatccttttgcatggcaccattacagcttggtaactaccagccagctttgctattcttgtgggcgttggcacctctcatcacttcctccccacccatctttcaaatgtctgaagtgttgcgttggaaagggctttgttctctgctgggacattttctcagataatcagcagcaaaatcttcaacaatttagcctccatcttgtgcaaggggctatccatgtgccgtattctactcaggatagggccttccttgccagcagggaggtgagtgagtcattctgcaaactattttttttttttttttacagggagtctcactctatcaccaggctggagtgtgaagtggcctcatcttggctcac

SEQ ID NO: 44678 - DNA, 894 bp, Homo sapiens
aagagggttttccaccccccaacacacaccaagagtaatggtcaggcgattaactgtctctctaaagtaataattggtcacagcagtgccaggaaaggcagtctcctaatagaaaaaaaaaaaaacacctaaaactggtgatcagcagcttcccagtaagatctcaggagttgggagagtggcaagcagtaacacaagaccctagaaatatgccaacatataaaaccccaagtcaaaagttcaagccgtgcacttgtctttcaagtcacctacttggccctcttccaagtgtactttcctttctttcatttctgttctaaagctttttagtaaattttcactcctgctctgatacttgcctcagtctctccattagccttttgcccttctgtcatattctttcttctgaggaggcaagaattgaggtcactgcagtcctctatggatacaaatttgccagcactaatattagtaaatgaggagtgtaaggaaaatagatgtgctgtagtcaaaaataggcggaggcagacatctggtgcagcatgactcagcgggtttggagtgcaggtgcacaactctacacattatgcaaccacgccacgtgaggcgcattaggtaatcacccatgtgagcttgtgcttggctcggaaccactgttgtctgtaaaagttataaataccccgctgacactgtacatatggcttgtgcccaggctcacttgtgcccagagagagagtaaagccatgttgaaattgtctactattccttaagtatttttctagctacccagcactcacccactgactcccctcagaccttagttagaacctgacaattagcatcacaaacaggatcctgagctgtgctgcttggatgggatccagtagaaacctg

SEQ ID NO: 44679 - DNA, 1491 bp, Homo sapiens
tctgaaaaatcaactttcccaaaacaaatcacgacattttgttaagatctgattatatttaactcttctatttcccatatgctgaaagagttcatatgagacaatggggccacactttcagggggaaaataatatgtcttcttaagtctttctaattttaaagttctcaggatcataatattgtttaaaaaaagtcaaaatcttgaaaaataagaaacaagagcctcctgcttcccaagctgtactgaaaggaaactgtcaaagaataaaaagtcaactctgctaagagttccatttctctggtcctataggcacagtgagaatttcctgtggaaaagacaagtacagctggtgtccaattagtaaaagatggtgatgaaaggatatagttattcagggtctgttctttgaaaatgataatgacctctgatttctaagttccataagtagagtctgccgcctgcatgcaggctgctcataaacttcccactttcctttttctgtctgtgttgttgtggtataaggggggggtgcggggagggggtaggtgctggaggtacagaaggtcatgccttctctgccggcaaatatgattaatgtgtgtacagggaggagaaaaacgccactcacctggctatcagccagcctgactcatgcctctgggcatcttagaacaccaaatatccagcaactctggctggggtctagagagatgtctattagctttcacaatgtctgggttaggaaggtgcttctaatcttgtttgtaataaatattagttcaattgttagaagtgtttttaatcacctaaaaggaagtaaacaggcttgcctcacaacctcgacaggcagtgtatgtgtgacttgttctttctatccggaatcactcggttcaaatgctcagagggaagaaagatggtcataaaataaaagtgttatattaaaaataaataaataaataaataaaaagtgttgacctcacccaggcccatttaccgcactatttacactattgccacacagcctggcagcaccaggaacctgtgttcccaagaaatggaagaggccagcagggaagcacccatgggtctgctccaagcccttcctgggcagggcttcccggcagagttacacaacagctgatacatctgtgcacactcccggagcctccactccgacaggagctaaattcatccatcagtgagaaaacaaagtagaagggaaaaaaagctggggactccaggttaaaaaacaaccacaaaagattttcaaagcaacttcttcaaaggcccttttatatttattttaaggagacatttcaatttaagtgacgttgtcaatcattttctttttcaaatatgacaatgctattttacccctacttctttctcatggctggatggaaatgaaggggaaagttatcttccttacccaaaaaatcacacaaagaacatcttggcaagggcaaataacttaaatgttttgttttca

SEQ ID NO: 44680 - DNA, 924 bp, Homo sapiens
actaatacatgccacaacatagatgaatctcaagaaacttactaagagaaagaaggtatatgcagaagaccacatcttgtttgattccctttatacaaaatgttcagaaaagactaatctatatagacagtgaattattagttgcctgaaattgaacaggaacggtgattaactgtaaacagagaagaggatcttaatggagtgaaagaaagttttaaaactgaattgtgatgatttcacaactctgcatatttactaaaataattgaaatgtacacttaaaatgcatgaattttataatgtataaagctgtttaaacaaatgaagtaaatgtaaaaagttaaggacccaaaaattaagtatgaatgccacagctaccttgaggaagcttgctaatatttgtggccttttgaatttaatggccatgtgtgataaggggaaaaaatatctcctctgagaatcaaagtcacaggccaatcacatgaatatggagtgtgagttacccttttttctgctcttagaaacccctgcccaagaactgaaactgaaagtagtccaaactgcccaagaaactgaaagtagtccaaactggtagtgtaccagagttcctggtggagcaaacacagatctttgaaagcacatccgttaacacaggtcacagtgggttcccatagataaagatcaagtagaagttcacaattaaaaacaaaacaaaacaaaaaacccaattcactatgaatgagagccagaaaaaagaagaaagaaaagaataaaaccctaaaggacttcagattttagattatcagacataaatgtagtaaaagtatatccaaactgtgaaatagaaagagaactgaaaacatgagcaagtaacatgttactataaaaaagacaaagcagatttatgaaaaagaatcataatttc

SEQ ID NO: 44681 - DNA, 3135 bp, Homo sapiens
tctcgaagcgttaactagataaatgggatattatatatataaagtctggcgcagtgcctgattatggtaaatgctcagtaagttaaccgtttgacattaactaccagccatcaaacatgaaagtaatgtttaaagactttcaaacaccaacatgcaaagcctttacccactaagtataaattcctcgattaaaaaatttttttttccacagaatacctgcgaagtttctaaaccactgggttgggattctaataatagctgaaccctgaatggtgggttatagagtcaagctattaaaagacattcagtagactccaagtgctcctacttcaaaaaataggccataggcagaggccccactggcttcccagtctccccttgggacgtccctaggctgccagggaacccccctcctccgcgcttagggggaggagagagaaagcctcggaggcgggggccgggggtgggggaaagcgagcatccctgcgcctctcgcccagacccaccttgagcaggatggacggcggcagctggttgatgtctggggtttcggggggcggctccctgtgacagtcgcaggggttttcgggggactcccgacagtccgcgtcgccacattcatgctgctgctgggcggacaagggggcggtgcccccggctcggacagcgtccccgccagcttcggtgggggcaccttcggaggtgggagaagagggcggagggcagagcggctgcgggggctgctccggggcctggcagcagccggcgtcggggggccggggcggcgaagcgcctccccccgcaggccctcccccgccaccgccgccgccgccgccgccgcagcccccgccgccgcagcggggctgcttgcagggggtgcaggcggggaccccggcccccttccgcttgcacaccatttcggggggcgtagggagctcggccggtgacggtgtcggcccccggaagagctgcacggcggcgggcggccccaggaagcgcaccggccccaagctggccaggaagagacttcggccctgctgctcccaggcggcggccgcagccagccccaactctttgcagcaggaggcgggcgacgaagccgaggcggcagcggcggcggcggcggcggccgaggatagcaggaagcggcgggcagcagcggcgcagtcctcggcggccagggccgcgtagcgccgcgccaggtgctgagaggaggaggcggcagcgtaggccccgtcccgcggcggcggcgagagcggcggctcctcctctgggccggcgggggcgggcgcgccgggactgtgcacgatgaagcagagcatgcagggcccgcggaagaagcagtcccggctccggggcgccgccggctgagggggcaccttggctggggtccggcggggcagcctgaggagagggcgccggcggcggcaccaactgcaacagcgaggcctcttctggctcgggcggttacgcggctccttcgagagaaggtggcccatatagaaggccccgaggagggggaccgggacgggagggagggagacccagagaggcgggctcccggcagcggggcaggccgctcgctggctcggcccccggaggggtcgcccttcctgcgcacacacacgcacacacgggcacacacgcgacggtggggggtgggcgtcagctgcgggccgccggagtgcccgacgggggctacatgctttgcccagggaagccgggagaacgatgggcgcgagctttggggacgcgagggagggagcgagcgagcctgccggctaggcgaccagtccgggcccggccagccggctcagtcagtcagcggagcggccggggaaaggccgggtcccgctcggaccattttaactgcggatccgccgccggcgcgcgcacccgcgactctgctcggagccgcaggagcgcgcggcccgttccggcagggggcggagccagttgcggtggcgcgctcgtggcggggacgccggcacccggctgctcacccgggacggccgtcacaccggcactacgggaagaagccggccggctagggcacggagctctgggcttgcggggtgcggcgcacgcccctccctcccaccgcctaaggtttttccgaagctgctgggcgtgcgccgcgtttctgaggcgggaggagacacttccgagccagctgtgtgacatccgtttacacagccgcgctgacgtctcgaggtgtaagttcaagagctgccattggccgggagccgctgggctcttcccctcaccttccacccctgtcaccacccctgactcggaaaccgaggccacttcgaagccgcgaggcgggttccgccggaagggccagtgtgggcgctgaccgcgcttcgggcagagtggcagatgcggcccctgggtgatgcgcaccgaagtcatgtgaggggttgattggttgtgcggcaccactgtttacccacttgtgttttcttaattgttgcgtactactgcctttccacaactttatttcagaatgaaagcatatatcaaattacctgtgcacagcagaaagataacagcttccccacccagtgagccattcaacacccaggctacaaactgtagatcactttattgtctacaccctcggaatcctgtctagccgtctgttgtatattttaaacatgacggtgcagtgcctgctatatgacaaacgttggtgatccagatgagaaagaggaaacagctatgcaggcagtcctttagaaggtttgactatatcgaggctaaagagctagggcagctgctagagcggtacctggtgcggagaggttagctttcacaagcgaaaaattagaggaggcaaataccatgggaatgagccactctagtgagagaaataagaggagaaggtggaatggagagtgctttaggaaggatactttcttcattgtgattacagagaatgaggaaaggtagataaaggacggatacagagaggtggatgtttctagcaggaaggtgaaagagttcctttctgttggtttctgttttgcttcagatagagcttggttacctgctgaagggtggaagagaagtggcaggtgtttaaaaaaaaatctgctaaggataacttgagagagctgactgaggaagaag

SEQ ID NO: 44682 - DNA, 887 bp, Homo sapiens
agattttttttctgctgcactataaagcagcccttcaagtatatgcagcctgtggcagcaagggggaaagggtctggatctcagtcctacaatgccttttaaattcaatgttgattccatgagttgtgtttatgtgatatcaaagtaactattttaactcgggggtaaaaagtgtgtctttggcatcacatagacaagagctcaagttgtttgatcgaatttttcatgtttaaccactcaggttggcatttatagaaagaacccctcttctgccagattaccttgtggttactttcctattccctagaggagctgtaaattactcagagaataaaccggcaggtgttacgtaaacactgaatacaactaaacattcctttcaaataatgtcacattaaaacttgaacaagactcaaagaattttgcaatattccaaagaagaaagcaatatatagcagcctcggaaatactgaaattgctagtaaaacaaatctacaaaattgactttggaaaaaacaacaccaaaacagcaataagagcaacaaaaacaataaagtttatgtacaaagagaagcaaccaatgttaaagtaaataaaatatcttcctataaccagacttactgctatgttccatgggttcaaatgaaagtgcttttattctgcaaaattatagtttacagcatcatatgtgattaaagaagtagcagtaaaaatgtctacctgtctactggaagaaatgaaagctaggtatgatatagaaaggataatcagctatttcctgttattttcctcagaaccttaagtcgactgaatccaacaagcattagcttcattttccttttctctgattcaattcacactagtttactgagcatctaatatggacc

SEQ ID NO: 44683 - DNA, 1304 bp, Homo sapiens
atgctgcaggcagagaccatgcacaacaatgtggattccacattgccacagtgggaccaggccagtgccaagtgcatgcataggaacaaatctttcatgaatcttgctattttgaaagggccgttcagctgtcagtccaagcccaaataaatacaactgtctcagtcagaagccctgaagaaagcccttctctttggcagtctgattacagctgccactgacattctacagaatgcaatgatttatgtatgcagcaggaagatgactggctgcagggcaacagggggattttcttctgcaagaatttctgtcatggccttttctgacccttcaccctagtgattgaaatttgaaagtaaaatgaatgacttctctatgagttattgagttttcctaccctgcatttagcataacttgctacttgggggaaaaaagggataaagggctctgttcagtcaaatgtctgaattaatgatgtccccaagcatcttggatttagatagtagatttgaggatgcagggaacatgagtgtttccaatgagagatgcagctttatcggagcttgttatagaaagagaaactaatcagcaaattggcagtgagactccattaaggagagtgaccccagttggagggtgatttttaagctgtttttgtggaccagacaaccttggtttccaagcctcctctgctcatattgagctagtttcaggaaatggattcacacaagcacacagccttgaccttaccaaagagttgatagggagaagacaagttgtatttaccttagatttgccaaaacaaatcgagtgattaatggaaaaggaatgagtgtcaattacatcatggggcagacaaggccaaaaggaaacctatgacagttctgtatttccttgaaatttgtttagagttaatatttatatttacactaaagtttccaagatcttttttatgatagtcatctaacactacaggaagggccacattggaaaatcagagagaatggatgcatcgtgtactataatagatcaaaagtctgtgcactctgtaccagcctgtggttagcattgttttttctagctggaagttttccctaaagctattagcatctgtgacaagacaacttaaagatagtgagggcctggcaaggtggctcacacctgtaatcctaggactttgggaggctgacgttggaggactgcttgaggctagtagtttgagaccagccggccaatatagggagaccctcgtctttacaaaaaatgaatgagccgggcatggtggcacatgcatgtcgtcccag

SEQ ID NO: 44684 - DNA, 1467 bp, Homo sapiens
aagctctcaaagttgtaattacatgtgtcttgtagttaactatttagagtctgtctccacgtccaggctccaaccaacctctcatcctcaaatgtcttcacaaggtcggtgatcttggcagttttactgaccaaagagtgggggctcatctccagcaccttgcagtattgacaggaaagtcactgagtagcaaatgaatgcatgaatgagctcgtgttgttaatattgccaggcccacaggaagcacccaacaaagagcaatgattggtgttcgcgttcattatctcatttaattcttacaaaaccacggcaaggattcaaccccacaactgctgtctagaaaaccgaggaaagtgacgcaacccgcgggaggtctgacggcccgagagccgcagcgccaggcccgggagccagccccgtccacttccccggtggattcttctccgttccccgccggccgccccaggtgaagctcctttccgccgtcagaaggaggctcccagcgggaagcagcatcgagggcgacccagggccagcacgggaaatgccagggaccgcgtcagccgagcctgctggaaccccgctcctcgctgcagacgccgttccgcctgaggacagtactcgggcatggggagtcaggtgcccgccacaggaacgcaagagaccgcgccggaccagcgaaaaagctccatgctctcctggttttccaacccgacgccgcggcctgcggccactctaggacgccggagggtcctcctctcagtggttggggctgggccgccctgcgccgggagccgcccaccttcgggctgggccgggcctggccagagtctgggctaagcgcagggcctgcatgaatcttcagcctgggaggtggggcaggagcacggagaagtctcgaagaagtggaggaagcacgcactggctgccgcgggaaaagctcagccagcaactgtatcagctttacattcgaccctcctttgctgcatggcaaaaagaaaataaactaccatttcttagttcgtgttttattttcagctatttcttgtttccttggtttcgattctaattattgctgtagacgccttcaggtggtggaagccaaggcaaggaacccctgaccgcaatttcctaacctttgggcagagtgtggggtgtggggactccccgcctgcctttccccgcccccccttcatagagacctaaaaacctttaaaaaggatctaacactagctctattatctaccctgtagcctactcaactaattaattcagacatttataattacacaccaaaaaaaaaagagagagagaaaaaaagttaaaccgttggaactacaaacattaaacatgagcagttcttagggccaaaatctctgaatgtgactgcgacagatcgcacttgaaacgcctgtatgaggtaaacggaaatggccagagaaaatgaactgacgggtatgtgtattt

SEQ ID NO: 44685 - DNA, 2346 bp, Homo sapiens
tcacagaaactgggagatagggaaggatgctactccgttgatatgtgcagcatttcaaaaaaaaaaaaaaaaaaaaggtccagagacattcctgactgagcatacagttgacaagacctatctagtcctcaagtggatttatacacatttcaaagagttgagaaagtacttaacaattaagaaagtacttaagttttctaagacaaatgctcggagagaaagggacgggaaatctcatcctccattttcaatagggagaattaagcctcttatttaaaatttttatgttggtttttgtttatttagctttaaaacagtagacttaaaaaaagtccaacttaagatttatgtttttttatgtgtagggctgttctctacggttaaataaataaccctgcttagagaaaatattcaccactcttctttggctcctatgtaactcagtttttgagagggaggggaaataccggattgacgctatgtggttcaaccaatgcaaaagataacaccgccttaaaaagtctactacaggaacatgggagggtcacaccctcgaataatgacgcatacctatcctactgttactgatcacctagtaataatcttgtagttcacattactcatttttcaccaaattcttttggtgaaggacgcttcagaaacggccatcactgaagagcagacccgtttgggttctccacgcattctagactcccgaagaggtaagaatttattatagggggccactcccaggacctgctgtatgcttttaaacatccattacaattccagcattgagtttctaacatttttaggcaggctcaggcactgggagtacaggattgaaagacagttcccgtccttaagggactcagagtaaactggagttgctgaaaaccattctaaagcaatccacgttaataacagatacaagtaaaacgtgggaacgtacaggaaaaagtgaccaattctgaggctgaaaagtgcctattttaggggtgggggcctcgcggccctaaagcagcttcccttcccggagatttcagctccagggatcgcccagcgccctccgggcacacttaacattttaatcacgcctccgcccccactctccgaattcctttccggctgccgacccgccgagtagtcccttccaggcggcctcagcttatcatcgccggtccggccacttcccggccgcggccaggcgagcctcccaaagtttcctgtgaggccttcgtccgtctccggccccatctcaccacggcagcccaggacacccgctagggaggagcaggttaccgaggcggggagagcggcacaaacgcgcagacctcgggactccacccgggctggtgagcgagcccagaaagcggcgaccgcagctccgcgtctccactcccagggcccgcagcttgggctaagcgtgcgcccacccagcctagggcccaagtcctgccccttcggggaccgggccaatcggccgctccccgcctcctgggaggtagtggaggagggggctgagggccgggcggctgcgcccgccttccgctcttgcccattggctgaggcctcgagggtgcccggagaccggagtgcagcgggattggttgcagaggttcgtgacagtggcgcctattggctgtggcagcccccgtgacgcggggtggtgactggctccggagtctgaggggttcgggcttgtcaggttctaggtaggtgcgtttcgcgccgccggcggtaggcgctgttgcccggggcaacgcggggggaggggggaagaggagggaaggcaagcctagagcgggggcaacaatgcctgcccgcagaggggcgcccgggattcggccagggcgttgggggctgtgccgaggctcttcctccgccctcagccagcgccccccccaacccccgtccctggctgcagggtcatccgctcatcctcccgcccgcagcagagcattcctggttggggcttgggccgggctacacacccagccccacgagggccgcccctcccaccatcccgggacccgaaggctgagggggcgggtgccggcgcgaaagggctgtggcgggcgtagtggctccgccccgtcgcggggtctgggggctgatgggcgtgaggcggggtggtggggggactgtgggcaccacccaatcttgcctgtaccctcaccccttttctcggcggcactcatctgggcgccgccgtcccgctacgggggcattctcaacccctggtattccccccatcccttcctgcttctggagccccgcagtctcccttgacccgctcggtcctccccagctctcctcctatctgtcaccttctcccgcttttat

SEQ ID NO: 44686 - DNA, 853 bp, Homo sapiens
aaacttgaatgtggttactttagccagcttgctgaatcaagcatggaactggggaaagtggaaataggatatcaacggaaagcatgtccctctttggacaggattaaattggttgagggaaggaatcgagaaagcagcatgtattcaactttctcttctaccacttagaggcacttacacgttatttgatctaacctttcattcagccctttgaggtaggcatcattaaccgcccccacttttttttttgagacagagttttgctcttgttgcccaggctgaagtgcagtggcgcaatctcggctcacagcaacctccgcctcccgcattaaccccatttttatagataactcatcagttatgcaacccatcagttatgtttgtgtttcacagtgagatataactacagtggctttctacaagaaaagtgtttattttctcatgtaaccagcacagaggcagaaaggctagatatagcatcacctgaacaagactgaagtaagaaagaagtggtgaatggagagtggaggtactagcagtacctagcacagctgatgacagattaagtaggatactaaatgtagacagtcagcaaaataaataaagccagaatttgaaccttggaccgaacccaaagtcagtgtacccccgcccatattataatgactctggatgagatcctaaaactggaaggcacagattaccttaggttaagccatcagcatgtaggagcagttaccaaaataagctcttcatttccaccttcctcctcagagctaattaccaccgccatcgctttcagcaccttatctacccttatgttgtgattttcctctgatttggtcttgaggct

SEQ ID NO: 44687 - DNA, 3755 bp, Homo sapiens
ataatcttttaactgagcaacttcacttctaggaacccatgctccagaaataatcacacatagaggaagtttactgaattgttaacagtggctgacaatcaagatgcaagcaggactagaagtggaagcggtaatttttaccttacattcttccatactgtttaattttttaaaatcaaggatgaattaaaatttgtaattaaacatcgatcaataaattagaaagttattttcattataaatcatcatttgtaatagcaaaaagaaactgcaattaaatgtctttcaaaaagggaatagaataaattatagcccattcaaactcacgagataccagttagccttttaaaaagtattagggagacctatatgtaaaaagtaaaaatgtccaacatatgtaattaagtcaataagcaagcggtatgcaaacatgtttggtatatggtatagcctccctcaaaaaaaaaaactttacgtgtacttgtatgtgtctagaagtgcatttgcaagattttgaaaaatgaacactaaactgtcaactttacactggagtgggactgggggatgaaaagaaatatttaaattttacctaacagtccgttatttatattgttgaagtgtacatcaaacttgcatgtctgcaatgaatttttaaaattaagtggtcatctcatataaaaatgacatgaaccccaaaagacaattacaacactgaaaaatacagtttaaacgtttattactgttatcctcaggtttattcacatacacttcaaatgatccgtagccttcagcaaaggtgactgccattttaaagaaatgtgaccaaatatttcatgataaaacagaatacattaagcctgcaatgaaaattttaaacttcacagaaccagcagactcaaaagaagcgcctatgcggatgtaaatttttttttttttaatgtccggagaaggaactctcagattactctcctccctgcaaaacgactatttaccacctcccctttgcttcaacttggtctgagcgtctttaacctcaccattttgaatgtgcgcaaaatgattaccagtcatctgagggaggccaaattaaaggtgcatctgcaagaggagctctggcctgacatcgctaactgagagcagccctggcggaaaggtgctgatcccgggagtagagcgactgctgcggctcgagcggggtgtctgcgtgccgagcctcactgacaatcggggaaaatgcagacgcccagcaaaacgacggcaacagaaggctcctcgggggaggggtgctgcaggcctgtggcgtaagatggttccgctctacgcggggtgacgggaaaccgcagaaggtgggtgtgaggtgttggttggggggcaaactcttgtacagtggcgagtgtaggggaaagccagcgggctccttggccaagtcaccaaggacagcagaagaggcagcagtaaagagcggcagcgaagaccccgataccaaccaatgtcatctgtcggggggcggcgggcgcgaccgtcccggataggagcgcggcccgggtccgggctggacagggcccaggaggcgaagaaggcctcccacagccatcaaccccacccaccatggccggcgcagcaggccagggacaagccccgctccttccgaagctagagacagagaaactgaggagctgaacgcagcaatttcctcgccccgacccccacactcccgacagcggaacaagccagactgaaaaaaaaaaaaaaaaaccctcaccgaaatgtgcagcggctccggagcgagaacagcgctcgaacctccacccgccaccaccgccttcttctccgcctccaactcctcccccgccgaacgcgaagcggctggcggctgtggcggcggcggcggcggtggcggcggcggaagcagaggcggtggcggtgagtcccgccccttgcgccgcggtggaggcgaaggaggagagtacgcaagcccctcccccatagcagagatgaccagtcagcttacagggtctctgctgggggacaatgcatacgcccaatcagaacctgaggagtgggctcacgtcaatggttgggacgtggcagaaaaagggaaaaatacttggaccttctctacagcctgctcccccatctccctcagggggagttcaccaattggctgaagagcggaaagacgaagccgactcagtcccccgccccagccgagcccacctcctttccctgcagtactgcgacgtttggggagggggcggagcaccgtgtaggagctaaaactgcgcggccttttgtggtttgggctgagagaaaagggcggggtctcggaaagggaagggggtgtggagaactaacagaaagactggcgcagttaggctttttcggaaattccaacagcaacaaccaaaatggaggcattaaaatcgatcctgattcgactggaaacctgattaacaaggttaaggtctcctggcataaagttcagttacaatgcagatatcggtgagacaaaaaaaaaaaatgacacgaagaaaggcttgtttacccaccctgaccctgggcactatatggcgctttccaccctccctctccgcgctgacccttgcccctcgcttcttattctgctggggcggggttcagaggaggcctgcctttcctctgtatagccttgggctgaccacagcctcccagcttgcatcttgaggctgtttgtcaagccgggaagtaacagctcccatcacatgcaaccaaaataaatacaacagctgcagtccccggacaccttgcttaatttaaacctgggtaacagtttagttaattatgtcagtgatacaaaactgtttcttcgttccgcacatattccctttattcatcttgaaacgtgtccgcttatctgattacagtccctctgtcttctcttattccccacccccgacccgtcgcctgatgcccaggatatattcatcgccacccctcccccgcgaattaagagccccacttcttgtgctgtccccttaacaacagcgaactctcttgccagtgaactgagactaatttttttttgctgttgatggaaataaattacccaaaatttactgtagaaatttaggtttatgagaatttgccagacattttgtgaaatccaatctgaatcccagcccactcctgtagtacgtttcttaccaaaaaaccattccttgcttgatattactctgccttcacacgtgttgctataggagttctgactttaaccatccaagtacctctttgaaaaaaaacaaaattcatattttaattacatttccctagtttccctttagggtgttccagattggcccaactggatacattaacctgttctagaaggcagggattcccaaatttcaacctttttcatactgtatctgtgtatactactcactgtccttttttctttaaataaatgtatattttctttaatttctttaagaaggagactttataaaagtactataaatggaaaactagcatcacctattataagttgaaagtaactgtaagaaaaatgaatgcaaaacaatgtttttaaattgtggctagaaactgttgtccactaaaggctctaagtctaaagacaactgtctttgttaaaagggcaagctaccaagcattagacacacattaaagatacagcactcaaatggtatttttatcatgatgtcatcaaaggatagaaaaaatagagccggaatagcaatcactttctcactatatga

SEQ ID NO: 44688 - DNA, 3450 bp, Homo sapiens
tggagagggcatgacctggctcactgaatggcagagaagtcaccattgggctacgtctgcaaagcttgtggaagatgtgccctctgcaacttgctgcaaatgcctctagggtgccagggaagttattcatggggtagtgtctcacctcctctacaaagctcctagagttgggcatgtgagaggaaattgctagttactgagcactataggaccttggcagtggagaaagccaggtatgctgcaaaagcttatcaatacacagaaatcaggaagcaaaatcctttttttctgtaatgtctcttcagcgccctctgctgataaagcttcagtcccagaaggcaaacgaaaaactgtttaaaaggctcagatccgtttttacagtgcagtcaaaaagggcgaatttggagctgagaggcaataaatcaataactggcagaagcatcacttctcagattacactcatggatttcgtagtcagatgtttctacatgtgcctggacggccctttgtcagtctcctttcccccaggttttaacaggctgtcaccaaaggaggaaatagtgagcccgaagagaatgtgcaagccctcttctcttgcatttcctccagcccgtcaccaagtactcttccaggcacgccaggcccgagtgtcctaggataggaaacctgagcaacaaagggaagtggggtgtaagctcaacccctgttggacgtgggggtgctggcgcctgaacgcccccgaaggcctcaactcccagaaagctgcctgccaggtcacaagagccctgtgaggtcttcctatcgccgggacactgggaggcaggcgcggggcgggtccgccgggcgacgcgctgtgattgggcgccgtggggcccgccccctcatctcggagcgtcgggagggggcggggccagccgcccgctcggctcaggcgctgcgggcgcctattgacccagcggctgctgcgccgccgctgtctcctcctgctcgtggcgggcggtgctggagcgccaagtggcgctggagaaccggcgcttcctttcgccgcttccgccgccatctccgcgtttgtggggcgggaaagagggagggggctagcggctgcagctggagcgggcttctctccggggacggtcctttcctccctgctctccttttccttctttccgcgttgccgccgcccgccccctgcgcctccccgcggagcctgggtccgggagggggaaggtaggggcggcggggggcgggagagtctggcgagcggacgctagctctgaggaaactcatcaatccgtgagccccggagtccggggtgcacatcggcccagccgcagcgtcggcggcggcggcggcagcagcacgaaggggctcagtcggggtaggcgggggcggtgccggtgccgcgggggcgggcccgaccgtcccgcccagaagttgtagggcttggctcctcgcgatcttgttcctttcccctccgcttctctgacctagctgcgcggccccggcccgggagctgccgaacccgcgcctcccctgggtgaggaggacacgcctgccctcgtcgagaaaacttttcctgccgactcagttggggcggcggtggcaggaagtgcgggcagcgacctctcctccgcctgccccgcgcgccctgccggaggtcggcgctgagcttgcgatcaagtttgtgggggccccccttcccagttgccggcgagtctcgcctcgagaggggcgcccgaccccggggagggcggcaggccagggcgaaggccaagggcgtgtggtggcgccggagactaggtgcggagcaaggcggggactcgcacccgcatccgagagcgcggaggtcgcgcagcccgggagaagggagcctccggcggctgcttcctagagtccacagtgcgctgtctcctttggctgaggagagtgtcctggccccgagtctatcgaggaaaatgaagttaagccgccagttcaccgtgttcggcagtgcgatcttctgtgtggtgattttctcgctctacctgatgctggaccggggtcacttagactaccccaggaacccgcgccgcgagggctccttccctcaggtaagcacctgggaagggggcgcggggctccgaggggccaggcgtgcgggcccctggttagcggctgctacccaacctcttcctcccgccgcggccccacacccgtgctgggcgaggccaggggctctgtagctctcggacggcaatgatcacctcctgggagccacctcgcccgggcgcgccaagttaacaaagtgctgggcggcgtgcggcggcggcggcggcatcatcccgctcaggaaagtggccatgttccggcattcgcacccggcctgttggggtggcttcgggcacctgctggcgggggaacgggcgcggcgtgaggcaccccccgccagcccggggcccgcgtatcccggtggggtcgttctcggctctcacagggttaagccgcccgcaccagcccagagcccctgagcgcacggagtcgcggaaatggatcaaaccgaacccacctaggcttttttttctttttcttccccgctgcctctgaagagagagaagtttatttcgtgttgcggcccttttagatgtgaatctctaggttgattttagtgtcgtcattcttcagctattacatctggtttgtttgtggcagacagggggaaccgagtggggaagcgcgtgttatactccggccgaaagctgtggggcgctcagtcctgcgtccagtggttaaattggtaaatgagttgggaagacgacccatccaaagtcttatttaaagttaccaaaaataagcaaagcggacacagtctgttccctttggaagggtatccaccgcgcggcatgtgcgagttcagtttcaagttacttgccaatataacccgtgcacttcagaaattgcggtgaaactgggtattgtgtagtgtgtagtgtgctctgtaacgaatgaacctgaagaactcaaaccctgacagggcaatctaactattcctacttgacttacgagaaagagaagcctagacgtgaagttgatatatatttttttctcttttgtgataacttaaatgaccaaagaatatccttgccattttttttgtgttatgctagagcaaatggcttgaatttaattgagattaaagtaaaaactttactggaattattgtgaaagtgaaaaaagacccttttatggatgctgtcatcaatacagagcactcaacatgttttgtcggtgagaggttttaaaaatcttgctgcagagagatgtatcaaaattttaaaagcctctgcttcccctaggtagtatgacagagaaaatagaaacaagcactgagggcatctttaaatcttgagctcagagcttgtccagtgcttcttgatgaggttgaagaaaacagttggaaaaaggtaaggagtt

SEQ ID NO: 44689 - DNA, 1008 bp, Homo sapiens
agaggaaaagcggccaggctcttagagaggatgagaatttgccctttctctgccttttaattccatctgggctcccagttgattggatggtgactaccacatttagggcacatcttctccacttagtccactcacacaccgtctcctctggaaacactctcacagatacacctggggcagctcaataattctaatcaattgctaaaccacctgggtttcactttgagtagataaaggatgggcccagtgcctactgaagccctgaagaataatcagtgtttgaccagctatctggatattcattaatctagtcaagttgaaccccaaattaaccatcacatggggttaagcacaggagggtggaagcacagagtttgacttttttagatgtatatagcatataataaatattaagttcaaccttacgaaattggtgatatttgactatgttttacctatgagaatggcattttcgtatagtttgatctaatagaacatgttacattactgagaatgagttgcttttagaagtggaacttgattgagcaatattgagagggtttaatcaaaagggcaaagaacaaagccttggagcagttgagataaatgggattgttgctcggcagagggttggcctttgaagcagggagaaggaaaggcacacagttttccaggaaggcaggagaagatacacagattcagccatgctggaaggatcacagtgaggccaataccagcgggtagtgtcctatttgaggcaaataattatgtaataaatttacggatttagctgtagatacacattgattgattttgttcataggactgagtggtaactgagcctgttctaccttgtggtagactctaaatttgttctctcaaaggtatttgatatgtgattttttgcttggtttttctctttcactaaaagcggagtaaatcaaatatcatgacctccttccccactcctgagcggtgcaatgctgtggcctccctgtagaactgatt

SEQ ID NO: 44690 - DNA, 2851 bp, Homo sapiens
tttttcccctaggtttatatttaagtgaaccttccactgtcttctcaactatctctgcttgcttcttgaaatcagagaaatatttgatgttacatttttaaataagaatccaaacttaactaatgtgcatcttgggttttctaagaaattggactattaatcttcctaaacagactaattcattatacgttttatacaggttggattttatggtatttaactgaaggttgctgtaaaatttatagagcaatgggaagttacagtgtgtcttgtgatattcagagtcatttgcagatttggattgagtttagaatctaaagatatttagcatttcatcaaagcactgaaagcaatgcaccagggtctaaaataactttagttctaatagttgaagcagtggtttacgtttattttagaaagcatatgttctatccctaccttttcaattccagttcgtcttgagtgagacggctatccttccacctctcattcccttcaaccactggcatctatttatgtcatggagacctgtaaaagccatgagggacttctcaggtgctctgcccatcccttggatactttctcaagcctcagagaggatttttttgcagcattgacatcgatcactccattctcctcgaaattctgtcctcttttggctttgaagtgaccttgagctctttcactttcgggtctattctggcactgctgaccattcatttttcatcacctctctgatttcctcttctgcttacttccccaatgttcctgttctcgcctgttggggaacactgcttagttttcttcattttgcatgcttttccacactgttgttttaattaccaggcatttggactacttccagatctaaagatccaacctggacttcttgttctctagttagtggcaatagtaagagataagcactcgtttaattattcagccaatcctgtagcattctcttgagttaaggttctttatcatcttcattctcctgttgaggaatctgaagcagaggtgttaaggaaagtgcctaaggtcacccagctagtaagtgtggaaataggacccaagccaggcagtcttgccccagaaatagtgggcaaataatcttcacctctgtggtgctctgcctttccacctccctttcctgtgacatccagttagtccctaaactctgtgacttctgcctcttcagtgtctccagactctgacccctgcttttcgtctccattgctcttgtctcgtactattgtgaaaacctccaaatggcctttccatttccagctgtgccacttctaagtgtctgccatttcatcaacagagttagttttctaatatgtgagtcccaccatgtttgctttaaaatgctttgtggtgcttcagtctcaaaaggcacaggccactatcctttgcctgacacatactgactttttctgtctgattcctcccgacttgctcatccttatctccagtcacttcctgcttcacactctactcaggcattctgagccacgggtgtcctcagacacatgccgttttgtgcttcttaggaatttgcctgtgttcagcttggatttttatttttttccttttgtgcagtggataatttcagtcttactcatttttaacactcagctgaaatattacctcatctctgaaaccttcccttatttacttctaccattcattcagcaaatatttattgtgttatgctccagaaatgtaggaggtaagcaagactgacctggtcccagccctcagaaaacagcagggaagacatgtaattaaacacagtataataataaagggttttcttctatagaggcaagaagggggtcttggaaggcctcctgaagcaaatgatattcaagcttaaacctgaatgatgactagaactagccagtcaagaagtgggtgtcagagggcagagaaggaattttaggttgtgagaagagaatggtgattatgggccagggattaacaagggcatgtttgaacatctgaaagatgtttattagacagcagcagttggggagggtgggcagcgagggtgtgtgtgtagaagctgggtaaatcttggccatcagggagatacatatcaaaacttctagaagatactgtttccaacccttttagaatggctaaaataaaaaagatgacaacgtcaaaagttggcaagaatgtgtagcaacagaaactcatatgttgcgggtgggaatgcaaaatgggggcgactttctgaaaagcctccaaagagttttccaaacttaaaatatataccatgtgatctgggggctccactcctagcaatttacccaagagaaatgaaaaaatgttcacaaaaagacttgtacagacattttcatacaggctttttcctagtaacttcaaactgcaagcagtttaaatgtccttcagcaggtgatggattaaaaaattgttgtatattcatacaacagaatacctagcagtaaaaaaatgataaattactgaaatacacagtaatatggatgagtctcacaaatgttcagcagaagaagagagacagaagagtaaatattgtttgatttccattttatgaattctgagaggagactcaactgatctattgtgatagaaatggaatgtcagagtgttttttgggggcagggtgagtgggcgagcatggattggaacggggcatgagggaactctctgaattggtggaagtagtctatattattttggatagtgattacagttgtcacaattcatgagactgaaaatatgtgtattgtatattgttatatctcaattaaaatattttagaaaatgtaatacaatataaacatacaatacaataaataca

SEQ ID NO: 44691 - DNA, 1128 bp, Homo sapiens
ttcttttatttgactttactattttctgttgtgtactggaaatagttgtaaaatttttcaatcttttctttacaaaaattgtaagtccacatatttattctgcttcggttacatttatggtcttagaaatgctttttgcattgtgaaaagttcctgaaatttgtagttctacttttgagggttaacattttcatttgtagttttaagttgcatttgcaactacaaattctgtggacattgataccaactctgttctttccatgcctttgagctctaggcagatctcactgtcagatgcctggaatttccggagcacagtgttgtgaagggacccttgcatgagagtcagaggactgattctagccccatctctgtcactaaccagctcatatttttggaacttcagtttcatttgctctctatatttggcgggtattaataggtaatccccgaggtcacatccagttaacatttggttttcttgtctaagtattaatcatttataaagcaatcatttggataaacaccaggaaaggaagttttgaggaagagactactgtggacaataaccaagtgtttccagtaactgggacataagataatctgtcttccaaaatatctccagtattccaaaatgaagacctattatgtagcaaattttctttttaccacctcttacagaaattcagaactgggtagtgaaacaaccgcttgtgttgtcatcatagcaaccaggggaagtagcctaatcctcacctccaggaaaactcctttaccccattcctggcactgcaggtggggaggctttggagtgaaggttctctgctggggtgaatatagagcagtctgataaggctctgttcagagaggcagggggagggtaatgggattctgagtgctctagttgctgcatcagtgcttctagcacgtgcaccctgactgccttacccactgaagggagacagcaggtcaccttccctgtctctgactccctgacggattgagtttgaatcctggctgtaccatttctatggctacataaccatgagtaggatacagaaccattctatgcttctgtaaaataggcttgtaaagtaactgctcagcactgttttaaggctaattaag

SEQ ID NO: 44692 - DNA, 1519 bp, Homo sapiens
gtaagtcagggacaaaggtacttagtttcttctctcagagtgagaattagataatcatggtcttctcccttcctctagccttactttctgactcatctctaattaggcagttcacaatatttcttgaagacacacattatccccagaactgttgttagggtagtgattaagttcagtgactggtgacaataaaccagagtgatgacaggaaaaagcaatgaaattagcttgaagacaagctagaggcaagtcatgccagaggttgccccttagggttggtgcctgccatagcaggagcaaaaccaaagatgatgccgttgcgcctgactgaggcatcagtcacaaatggcccatcccccaaattatctggttcatcttatagaagccaagttggtatgctataagtggtcagaaggcacagggtgaagatccggtgtcaatgtttacctaatgtgagatcatgggaggccactttacttctctgggttgtttcctcctctgtaacttgaggtactacaaggctgacttcatggtcatgcaagctctgtgcagtcccagaggagccctcatgtagaacagccccacacttggcttagtgctttgctgtcactgtcttgaatttcttaatgatttttaagcaaaaggctcatcattttcattttgcactgggtaattatgtaacttgtcctgtgggccaagtcagtgattccacaggattcctggggttggtctatggactaaggtgcctaaggtcctatttgtttgggaaaaaggtgggttaaccattaaacaaagataagtaagtttctttactgaaggacatctcagagtgtttacatgttaatatttttgtcactctccagaaaaagaaaatgaaaatcatcttttaaacttatttgaccacaaagctctccaacttttttttttctcaagaagcatctcatataacaagtgacacgcagaatacattttggagaatgttggcttcactgtttgcttaggtatctgtgaagtcttacaacctgtacttttttttattgtaatgagtcatggatggagaccaggagcaggggaaggggaattaaagctggaattaaggagtggaaacagggtctagttccacattcaaagatgaataatgctattctatggcccagggctctgttgcaagaaagagttacactggtcttgtctcactgaagcccacacagacctaccatttatctcctctgaatttctgtttatgctgctttatctatgtaaatgccctgcttcacctcagtctagtaaattcttattgtttcttcctccaaaatgtatcttgaatttgtctacatttatgtctcccagcttcacccttgtgtaaaacacattgtcacaaatggagcaatgttatagttttctaattcacctcccagatccaccccattctccacttggtactctgacttgacttctctttcctaattgcagactggcctcatgccacttcccagaataaaacctgtcaaaattcctg

SEQ ID NO: 44693 - DNA, 723 bp, Homo sapiens
ttgtttttgaacttgggaggacattttcaagaatattttcttttctccctaatctctacatgagctgcctatgttagctgtgctactctgattcttagtttactactttaatttgtccactcttgctctgttagtctcttaaaacatctaagtcctttaaatatcgcatttctggtcgacacctcccactctcctgcccatatgatactatcagaaactttaaagtggaaatattttcctttccaggacagttcttcagtgtcagcatagaacgggttttagccctgataatgtatagtcgggatgaattagagaatcttccctttactattactgtttgggctgactctgtaagaaccactcagagaggagaaaaagcaacttccttccccagatcatgagcctacatcaggcaaaagagagttttttagctttagggagtagaaaccaagagaatttaagtttgcctcaagacgggaacagcttgtgcctagtgggaaattgcattgttgacactttgataatgatcagatcctgacttaagttctaataatagctcctattcatcacgcttttactatgagccaggtctatataaaggtactttaaatatgtagcagttgcaaatttgagcctataatgcagattgtgtaaacatatcatcttttttaaaaaattgaggtgtaatttaattcacacttacaagggtaaaattcaacaacc

SEQ ID NO: 44694 - DNA, 714 bp, Homo sapiens
agcagctgcaccatctaattcccacaagcaatatacaaggattctaatttctacacatcttcaccaacatgttattatctatctttattattataactatcctggagggtgtgaggtgtatctaaatgtggtcatgtcttatctcttattgtgtataagtcaacttactttctgttgtaagcttctatcctgccaggcttggatagaaatgcttttattgcccaggattgttcagtggtcccattggattattttacatacttgtgttaattgtagtcattgctgttaatgctataggctctcctgttccgtttctattggttggatagaagcaagtttggatagaagcttggcaggatagaagcttacaatagaaagtaagctcagcaaaatcgtaagttcagcaaaatcagtgaactcagtggtttttcagtgtttgctatgtgaggtcatgttgaggtcctagaaaacgtacacagtcctggatatcaataggtcaaaaactaagctgtttggtcactgaattgtctacacagataactcctaagtcattttagcccacatggccatcatatgttatatctacccctcttaaagcactcacacgttttgtgagacggcttattgttcgttggcataggggcgtcgtgtacctatgttttattttttcttctttttctattgaaaacacaggtgaataattgcactatatac

SEQ ID NO: 44695 - DNA, 1184 bp, Homo sapiens
gctaccatcagtcattcttattctctatcaattcaactacatttaccaggaatgtatttgtattttaagaagcttcattttgcatagtggtaaaaatacttttctttattaacaagaaattaaatttcagtggggcagactagcttatgggttgatttgcttagagtcggatttgtgttagggataataacgaatgctaacatttgaagaacacttaattccatgttaggcaagagctaatgctttatatgtattatttcacttgataactaacaacagcccttagatacaggtattattatgatattttacaagagagaacatgagacttagcaatgttaagtgattttccccaggttgcttggttaataattgatggggctagaattttgatccaggactgtttgactccaaagtcctgtcttgttagccattgtctcctttcatgcttaacactgagatctcaaagacaggtaggtatgctgtacctggaaattagcgagtttccagtaaagacagagagttactgtagattaggtagaagaagtataaagtattttaagtattatttaaaagaggtttgataagtgccccatcctaaaatatttccagctccaaactttcatcttcccaaggaatagtttataattagattctttggagacaggctttcagatttcaatagttcatatttccaggtgtgtgtgtgtgtgtgtgtgtgtgtgtggtgtgtgtgtgtgtttatgatagagcccatcatacctttagccattgccagttagctagcttccatttttagcagggattaatttatgaatcagtgctgaagaactggaacacagatggactcactttctgaacaaaaaagaggtggagggtggaggctatgcaaagaccagggtaaagcgcattctacaggaggcaaatctcttccttattaacttgtctattgacacagatagttgcaaaagtagtccaagggctgaaagaaataggaaatgtctcttgatatgacaaagagaagggttgcctgcaatgtagtgatgaaaatagaagtagttagtgctgtggtttatgccgaagcagagaggcagcttagagaaggcagtgtattatactttctaattatatattactgtattgtcagccttttcccatttttggcttgcttctttcatctccca

SEQ ID NO: 44696 - DNA, 1675 bp, Homo sapiens
gacacctactataaagacacctactaagacacatctataaaaggtaaaccagaattgtgtctatgattcctgacatcaagttagcacaaaataaatgatagttgcctttgaaaaaaaacttctgtataattaccatctctttctgattcattgaattgagttgtgtagcttggtcttcctcaggggtaactaagttgacaggttattttctgttttctgtcaaactgttcaagagattgcataatccttgggcagcagcttgttctttataactgtggcatctggcagagcgcctagcacatactgggtgctgaataaacactggctgactggctcagtaagtgagggaattaaaaaatgtgaatcaggatgatctgccaaattgggacaggggttcaactttcctgaactgatcctgtttcttgggatgctgctatgaagtgtctgaagttttgaataactgctacaaggagaatcagcaaaaaggaaagttagtgatggacttaatgtgtgtgtgtgtgtgtgtgtgtgtgtgtgtgtgtgtgtgtgtgtgtgtgaaagagagagagagaaatcaattctataaattgtttgttgaaaggtaagttgtagcccatgtagtaaaatccttattgaacaggagtgtctctagctacactctggaacagagaaagtcttgagtattcaccctatcatctctctagttgcatcagtatgttcaggttggccctatgagagaagtagatgcttcggtagcatctcactctttgtctcccggaccacaggagatattcaaaggttattactcagcagctatacaaaataaggaacagaattgcttcctaaatcctgctatgtagcagtgagtaatgtgtgtctttgtgtctatgtaagctggcctcctggggaggaggaagtgtgagctggagtgccaggaatcaaggggtgataatgacggtggtggtgtgtttgtgtgtgaaatagtatgaacttctactttcgattgcagctgattttccccataacgtatcaagagcaaacacttactcagttcttgtctccacaactgaacttatcccaaaactttgtctaaggtttgttgagtgattcatatttctcccattaacatatgtttaatctttgcaaccctattcccttgacttatgctaagaaaaattcacttcctcacggccctgagctccagttcaaatattcccccattaactgacaaagaagaactacttcttattcattataagattcctcttgactatacgggataatgtaaatttttttatcccaccattttttcaaagtatatagttcacaagattactttgataactgtgtaacttcttttgtgtccggaaacattgatgtgatcaggttcaatcctgtgtgtgcatctgtggatctgaagactgagaactctgtctctgtgcagatgacttgactttacctagacaacgttttttacataatctggtccaattgtgagtccttttctgctttcacaatggcgtactctaggatgcttcagactgcccttcgctgagactgtgttctgaatagataaagaaaatagggccacatgttagcagttttgctgaatctagatggctgctatatttgtatttgttttaccattctttgaacattttgtatctttaaagtt

SEQ ID NO: 44697 - DNA, 551 bp, Homo sapiens
tcaggcttcagtgggagatgatcaaattgacatcaccctgttctaaaccattaactggtgagacataatatagcctctgtattagggacacaaattctttatctggataaggacaatagtatatactaaagggaaagatagtggcggcatactagataccttctgatagcactccagatcctctttaccattctccatcctgctctccaccctagaaggctgacctatgtgattaaatcaatagtctgtgcattccagttggatttggtcatggggagtccccatagggttgttttaggctgtctgtgtcccttgactgagggtagcctcttttacacaactctgtttttccgggttctagtaatcattcctccttgttattgtgctgtcttctgtgggtcttcaatactgacttacagatttgaccttctttaattttgaccttccctggtgtatccaaatgtgaatgtgtaaaatttgtttctggttaggaccctgactgataaaattgcttactgtaacaatacagtgacaaaaaaaaaaaaaaaaaa

SEQ ID NO: 44698 - DNA, 1768 bp, Homo sapiens
tatatatgaagaatcagtgaagagagagaggtaattcatggtgttaatgtttgattacaaaaattttcaacacatggtttatatctgctcaaattttgtacacccttcccatatcatttgtggaggtatgaaaggactatggctactctcgcaccagattgatacgtacaatttagataatcatgacaaattaccttcttatttgcatctgttgctgttgcttgtgatttctgatagccaaaggaattgggtaagttaaaatatatgatactcttttgtattagaaatgaggggaaaggtaaagaataaaagaagcttgcatggtggccagtctctggagaaactttactttctcttctactttccagagacgtcagtgtcttgtatgtttgcctcacgttcacagctgtgcacagtagaaatttgtgaacaagagcatgtctacatcttctctggagatttggggtttccttggaataccaatggtgtcaggggaataggtaatactgacacagatttctgggctggtttctattaacagacacaaacaattaggtaggtgtcacaatctacgtggttaaaatattgtctcagataatgttgctgcccaaaagagaggatggtaagttagtgaatgcctttctctgcacacattctacaggctgtcagacagccaaagtgggcagggaggcacattcagtcctctgtggtttgcagaaaacagctgtgatgtcattgcctagtaaatgagaatgttacttgtgaatgagtcaaggattgacacatcactcagcgcaaccacgtaaaagctgtgctctctaaagactcatagattccaggcacaatttctttctttgctgtaaatcagtcactatgtgaaactatgttaattcctcctggcccctggagtaagccggcagtgctaacagagtatcagtagagcttcacagattacctattttatattgtgtgagtgttttttaagggaggatttggttatttctctatgtaatagacaatcagggcttctcagttgtcttccacttattctttatactttagttttcaattattcttttattgattcaacatttacagaaaatctactcttgtcagaccactgtgctagtcataggatatagaagatgaatattatacaaatagaactcactatttgccctttccgaattcacaaccacacacacctgcttcttctgtatcaaggatgcttaaattatattatgtggatggccaaatcctgaagtatcaggtaagattgtgcatatgtgtgtgtctgtatatatagagaagacccatatctttcattacatttgcaatgaaatgaataaatcttttataattattataattataatttttatataatttttatattaggaataaatcttttataattattgctcctggtactttgaatagatacgggaatgtgtttaattatggtaaaactggcagattttagacgtagattatacctgggaaccaaaagttgacaaactttagagccgagggaataaaacaaacagttgtgcaagagtttctaacttctgcagagcagacagaatcttgttagcacatttcatcgggcatctggggctttgtacaagtgattgctcaacacattgcacacttaaatgctgcaaaacaaaagaatttgattcgccgtcagctgctggttaactttaaaaaaacataaaacaaatctggctatttttgttcattgtacaaccttacttcgactttttat

SEQ ID NO: 44699 - DNA, 839 bp, Homo sapiens
gaaccttttaaccctatagacttgccagtttgagtggaagaggtgacattttcctttaagctacaggttgcattctgttcagatcctcaagcatcaaggtcaggctctgttcagaataactgaatgctaattgacttgctgggaattaatgtgcattatcttgtttacaccagtgttctgttggcagtttgtaaatcattctctccggcaggctctgacatggatttgaagtttgtttctgttttataggagttgggttaatctctagctatgctagagggttagagaaattagacagaatgagagaggggggacctctcccctgcacatttctatatcatgaatgattgtcaaaattgacagtgattgtgcagcctgcatttacctccaggtaagaaacaggctggctatataattatgctaacgctttccagggaatttattttttgttctctatctttgccaaatgtacacaggctcctgcttgcttgagcattttctcagcaaccaaccaaccaacacacacacacacacacacacacacacacacactctctctctctcttataaaaataggcacagactggctggcacactcatagagaccatgcaaggtgacctcagtgatttgtatggctactcctccccgtggtccatttctcaatgcagtgggcattcttccaaatacacagcagctctttgtgcagtaatcactttgccttctattgaaaccccaagaaagaggtatacagttcccctacatattgctctgcttttggtctacattaactatgatcctataagaggtgtggaaccacagcaactccaacttggatagg

SEQ ID NO: 44700 - DNA, 1197 bp, Homo sapiens
ttatttaacattatcatcaataaataaccataaaaataggcaaccagcagctcttggggggctgctctgaccatggagtagccattcttttattcctctgctttcttaataaacttgctttcactttactctagagactcgccctgaattctttcttatgtgagatccaagaaccctttcctggggtctgaattgggacccttttccgataacggtcccactgttgtttacttttcttctcgctagctagctatgtgatcttgggcaagtcactgtgcttcaatctcctcatctctaaaattaagggattatactccttaggtgtatcctgggtttcatgcttctttttcctttagttctaggaagcaaaatagttgctagcaccaaaactgctcatcttggactttaagcttggaggaacctgtagggctgtagcgaaaactatggtgacaatagaggctttatttggagttccagagctgcctctgagttaatgtgcaactgacctttggcaagtctgttggatcttcagttttctcctctgtaaaatggagataaatagagtttcttgcctgtcctgcagggctgtgatgagagagtgtattgcagtgagtaaagtgctatatggtgcagaggatgataaattatccaggtttgtctgaccagtccttttaactagggagatggcatcaagctagtcccaacccacaagtatcctcactagcagcagctgcagtgctcagtctagttccataggagaatcctttagagatgaagatgcctggactgcacctcaacaccacccaatcagaatttctaggggaagtctcaggtgtaaaaaaaaatgcatgtgcagccaggtttgagaacaagtgatctaaagacaaggaaatcttaccaccccctcagtctcaaatcctgatattcatcgtatgtgacaggatgtcccttatcacatctgatgcctgaggtgttgtgtaagacagaacagagtctgcgggggactgccctgctgtagccttcttattaaacttgacaaatataccttctagtcttatttcatggttttcttccccatatattgaatggaaggaatctctcacactactattggaaatgaactttctgagcactgtgtgtcttttgggaatgaggcgaggttcagcttgaactatatttagccccgtctaagcccct

SEQ ID NO: 44701 - DNA, 478 bp, Homo sapiens
cagagatctttagcagatttaattgtattttatgtttgaaatatcaactgcaggtcagagtgtattgctgttttctggatgtgagatttcccttgggtttcatttagctgttaccaacctagccagggaggacagaagtttgaattgtgtttccacacagccacccgatcagttattgagcaaatatgaccctttctgctgcaatggtaaggtcacaaaagtcacctgaacagcctgaagaaatcaatcctacggtgatcgaggaaccacctctgacttagggctttctgaatgcacagaatttctgactctgcattgataaggtcatacatatgtgtgtaccagacctcaggactccctagggttctggttttcaaaactctgaataaatagaaactggaacacatttggagtgagactgaagtctctgggaatattgaatctttgtacttttattttttaagtagcaagtatgttt

SEQ ID NO: 44702 - DNA, 1005 bp, Homo sapiens
tattttttaaaccccaaagtgtcagaactacaagaagaattagacaagtccataatttaatttagaggtttttaacatatctctcatcctgactgatagatcaagcagaaaaaataaatctattctaagagcatagaaattttaacaggacaactagcaacctcaagataacagacatataaggacatcccaaccaacaatgacagaggcctcactattctcaacaacaggtgaaacttttataagaaataaccatgtactggactatagagtaaggctcaacaactttcaaatgcttggttagaaaaaggatagcaaaataaactcacacagagaagtaagaaaataatatgcataaaaatacaagtttgtaaagttaaaagagccatgcaattggaaagaccaataaagccaaggtcagctctttggaaaaccaccagcaaaaacaataaatacctctcttgtctctcattcctgtaaattatgcaatttggactcttggacccttggccagcaattcctttgtcactggaccttctcttccctactggtccttcttatcacttatggtctcatttactcttggaaattatttgggtaaaatgtctgtctttcacactggtcacaaaactcttttgaaaatagtgatgaagacatatttgttagaagacataatttttaaacttgggtacaaacaccattattcatggtggctttcaaaggaacaactgccaaaaacctgtttcacttcttaatttctcctgaacatacttctttgttttgtggtgggggatggtggtattgatatcttaatgtttacctcccattaagtgatgccacactacatctgagaggcaatgtataacaatgaaaatagttcaggattttgagctacttggagtttgtcacttaagggctttctcccctttggggtaattataaaggtatgagtctcaactttctcaactttaaaatgatagtagtagcagttaccttgcaagggta

SEQ ID NO: 44703 - DNA, 1609 bp, Homo sapiens
aggaaaacgcgtaatttctaactccaggaggacagtattcgagtacgtgggtttctttcacccccgacgtgcacttcaacttttaaaatgcttgctctggtggtccacagtactttcgcgttcactgggcggtaccatatctctcaatagatttgatccaaaaccccaagtgcgggagacaaagctaggtggaacgttattaaccctccacaactccaacctctactagcttcctcggagcaggcgaggcaccaggcccgtgagaaaacactgagatctggggcgtagctgtgacatggggtatttctggccgggatctcaccgggtaggctccacccgcgggttatcggctccctccaagaagcatctttgaactcctcccatgcaggccctattcctacaccagttctctttctggaatctctttggtactgtgtttcattaatcccacaaccatattcccacctattccctaacgacaacaaacttttaaggtccaggttaccgccgcgtctccctagcaaccgtgccctttaatggttgccggaagaggctataatcacgtgctccgaagacttccgggtttccaacgtgacttccggttgtcagaatttacccctgacgcggcggcggccgacgggaagctgtgtgtgcttaggtcgtggtggccccggtggtggtgggctccgggcgggctcgcgtcatcctgcccccgctgcgatgcatccgcggcgcccggacggatttgatggcttgggctaccggggtggtgcccgggacgagcagggctttggcggcgccttccctgcaaggtccttcagcaccgggtcggacctgggccactgggtgacgactcccccagatatccccggcagccgcaacctgcactggggcgagaagagcccgccctacggcgtgcccaccacctccaccccgtacgaaggccccacggaggaacccttttccagtggcggcggcggcagtgtgcaggggcagagcagtggtgagaagcatggggaccgacacagggatgaggggttactggggccgcggcttgcggcctgcagaccccggaagcggcgcagaggatcccgcctcctattccttctcatcctatcgcgcgccacaccctttgccctcctttggtcctctgcccctgaggctggcctcctcttcctcacaaacgaattctcctggatcaactccaaaaaagacatctgccttagctatggggtgcatagcaggaatttttagaggttttggtgtctcaactgatggtctgagttaaaaaggagattggattattaactgttccctgattcactttggcagctctattttcttgatttaattaattaattaatgtgtttacttgtagttttgtgttctgaaaagagaagcctttcagcataagcatacttgggttcaaacttggttgtgccactcgtaatctgaacaacttaacctctgtgagccctcagttttctcatctttaagatgtgtagaagaatcctgtatgggacacataggctaaaaaaaaaaagtttccttccttttcctttttgaacacaggagttttgtctgcttttcagatccccagtctagaaag

SEQ ID NO: 44704 - DNA, 777 bp, Homo sapiens
ttttttttttttttcagattttattttgaaggaattatagattcacaggtagttgcagtctacttttacccagttttccttagttgttccatctttcctagttacattataatatcaaaatccggaatttgttattggttcaatgtatgtgtatagaggcagtgttttttttttgtttgtttgtttgtttgttttgcattccttactgctttttacaaaagtacttcctctagtactcacaatttcttactgtagttaattcctaaattgggctgacagtgtgcagaagccacagttatgccaaatatactctgtgccaattttcctgtaggcacaagctttccaaaataaacatgtccccaacatcaggaatcttttttatgtaaactctggcaagacagttacaacatccacagtacatgtagaaaatgtgagttgtttaggaaaatctcaaaataagatatttggtaaccctattttaattatcatagccaataactaaatacataataatgttactttacttcattatggttaatttttttgtggaagttaactttatttgcagttaacaaagttactgtatatccactttctcagttacattatgttaaaaatgttatacgtttttttctacatcacaaacatgcaactatgacctagagacagtgaagaaaatgagtggaatgagggagaagacattctcccccatcactgccatgattaggtttttctactccaaagtaagagttatcagttctactttaatctgaatat

SEQ ID NO: 44705 - DNA, 2065 bp, Homo sapiens
catggtagttgcctatcagtaactattgcttcagtttttcttacaaagaaacctctgatcttattcaggaagacaatgtgctcagctttaaaaaaaattgtggtttagacgcctttgcaccttggtggggccaagtggcagtattctgactgatgggttgtgaggggtcatcactgctctttgtcctttccactcttcctccgtggaaggtgaaaaaatgctggtgatatagcagctatttggggtcctaaggtaacaaacgtatgagtaaaagtaacaattaatggtaaaattggaaagatataaagaatctgggtctctcttggcattgtggatctcctaccagtcttcggcttattatttcataaagataagtgctccttgggttatttattttttatacagctgaaagtaaattgtgactgatacacatgtagtctaatctatgtataatgtatattagaataatgtaatataggcaaacagagacatccatgtaaaatggactgaaaggataaccagcaaactcagaagtgtggttgccctggaaaggaaagcagtcataagagggaaatgctctcattttgtttagtgttttttttagatttgaatcttttccagtgaatatatttatatcattttaaacaacaaaaaggagagcatttttaataccattcttattttgtgtgtgtgtgtgtgtgtgtgtgtgtgtgtgtgtgtgtgtggtgtgagataggacattttgtctttcacgttgtattgggaaaaacaggtgaacaagtttggaaattcaggctataacctttatgtgattttaaatttagctactcacactaaaaatattcccttaatcttttttatcttcaactcattaccattgcaaaatcctctaagcatgcatactctcgtactgagtcacctgctgcagtctgcaaagctctgatcactgtggtttgtgtttagggccgtctgtagaggattttttagggccgtctgtagaggattagggccatctgtagaggtttgtgtttagggccgtctgcagggtctgggaaacatcacactctgtactcttctccaacattttcattaagaataaatatttgtgaatcattatcaagaacagcattcaaggggaaaaccaggctaaatgacacagtgtaaataagaggtttgtacagaaatgggtactaagttttagaagcaagcagacagccccaagtttgaattggaatgccttaagtcattttgagagtagttaacatctctctctatggatagctatacagttgctgcagcttagtctcaacagaaacacaggctatgaagacagtctacttttgttttttaaaaaaatgctgtcttttcgaattattctcctttagtcaatatttcaataaacacatattgaatacctgtaatgccccaggcactggactcaaatttgggtgaagagcatggcacgaagagagggggatgcagtctaataactcttgagatccatttctccctgtgtcttcccaggacacggggagttggcatatttagtggtcagataggaagtcattagtcaaaaaaaaaaaagaagtaagagaatgtaaaagaagcaaacagataccaagagtcggaaacaggctaaggatcaaaagcagaaacatccgttcaagccaaagtaaactcagggcattccttctatccacccatctattcaaataacactaacagaaagcttgctaagtacaggcatcatgatagctgttgtggagaattcacagatatgaaaaaccatagatcctgtccttaaaggatttacagactaatggactaatgaggaggataagtataatcaaataattctgtcacagatcagccagcattcattaagtgtcataagagaagttcaatcaagggccaagaaccccactggagtgggacactatttttggctgggcaatcagagaagccctgtcaggagaggtttgaaaaacgagaatgactttgacaggaccaaatggagaaagaagcaggagaagggcattgtagactgtgacactggcagaaacaa

SEQ ID NO: 44706 - DNA, 2672 bp, Homo sapiens
cagttgaacacttaatagaagattctatttctcatcttcccttgcagctagatttagtcatgtaaccaacatctggccaataaaatgaaagtgaaatgttatgtgagacttcttgtaagtctcctttaaaaaaaactatggatataatggctagtgctccagccaccatcttggtccaccatgcaatatgcaaaagaagcctagagcaggaagtcagaaggaaccagggttcctgatggccatggcactgctctaccagtcctgtgcgccctacctccagacttgcagataaataaaactattgattactgaggattttctgctgtatgcaactaaatctaaccttaactaatacagaacccttcaccaccaccatcaccaaatacggagcacctttactttttttaagcaaaggtttttactctgcttgttcctatatgagaagccacagtaaatttgacattctgcctggggtaacattttgtagggagagctagatcatgcttggcaaggcatttgcccaaagttgttcttgggccaaccaactcaccacagccatacttcaaattagtttataccaatcattaccctatattacaatccattgatttgtcttcaatttctaaagtagaattgtttaatcctttccttagataagtgtaacacacacatcctggcctctacccacaaatatttgcaaggacatggctggatgttaatactgatcagagtttgtggctattgtccatgttggcatgagcagtcaatggcaagaaaggagttatcagacgctgtaaactgtgcttttcacctgagtaaatagtctctgatttctagacctattcatgcagatgcttggaactgtagtgccagcctagagaagtggcagccatcactgggagaaataagattaggagaaacaaataggaaatgggaatatcaactaaaggtttgcagccagctttctctggttgcctcagattctagttttcccagaaaggttatatctgggtgagcacctgaatttgttttctatttaatggtctatcctttttttagtcataaaataaatatgggaagtcaaagtctacaccattccttctgaatcaccccgatccaaatgtcattggtgatgatgttaattcaatatttgagttaggctaaaagacactgtttaaatcatactcatcagattatgacttggtgtagaggaatttaaatatccctgcagcagcataacagaaaataaacttctaatcctgccaagtgaaggcaaactgctcttgagaattaaaatgtatcgttcttgaaaagaatattttcacttaccaactaaaggtgattttagatattttcctgattaaaaaccacatcaagcacacacagccttatgtttggcacaattttctttagtttccttaatttcgtagttaatgatttacctaggaatattgatggccaaatgggaggatgaacagaatgctgttgggaaagatcagcacccactcaacctctcgatccacctatttccccaatttccctaccagagtgcccacttccccaggaatctgaaactgcttcatatttgcattttggtgagttgctccagaccttcaaatctggtgtagctacttgccagtgctctgcactgtatgagttctactcattcaggagggccaccttctctaaaaacataaaaattaattatagtaatatactcaggagggggtgaattatcctaagaaatttctttggtcctctgtatagcacaatcttgtatttgaagtactttttctccatatcctttgatgatcagattagtcctcatcagaaccaagtttcctggagttaaaattaactttgtaattcctgaaattctcaaatattattgtttttattaaatgtctatactaagttttagaatgtaagacctccctaaagacttgcaatcttgtaacacttctgaaggaaaaggattttggaattattaggccaactctcttaaaatttagatagatgagaatacatgttaaatttttaaataaaaattttataatgagattaaaaccttaagcagtgattttttttaatgaagttttaagcatctctgcttaatggtttggtaaagaaagagcatctcccttaagatttttgacctctttttcctggtgttctttctcagtctcagaaatttggactgttcaagtaaacagtctaccacgatgttggttctggtttctgcacttcagtagctgctattgttgccaagagtatcatttttccagtgctgcctcaatctcccttgtaattttattgattcaaaactaggtttactgacgatttgaagtgctagtattacacaacccattagccatattcagccacattatctccattcagactagatgactgctatgtaaacagcaaaacattgactacttaaagtctttctcatcattctttacactagccctgtatcaatcaaaagctatacagagaagataatttaaatctttggtaacagtaaagaagccaatttctctgcatgtgaataagaatcaaattatacgggtaactgaggaaacctattctggctgatgtgaatagtagatataaatgcagagattctctttactggcttccctgactccttattttatagtttgtttttg

SEQ ID NO: 44707 - DNA, 703 bp, Homo sapiens
aaagttcctgtctctacaaggcccttaaggagcatacctagagacagaacttctagcagcctagtgggaggattacctgagatcagaatctttgatactatatgaccaagatctagcttaaagattgtttcactagctgcctctgatgcagcccattcactaatatgtcaaatttcacaaatacatcaaatctcactatcaaaagaaaagaatgacagctaatatctattatttactatgtgataggcaagattcagagtggcatacatatatttactcattgaatatttacaataacccttcagtattataattattactcctattttataaatcagaaaattgagtaacagagaggttaagtaacttgtccaaagttcacacagctggtatgaggcagagccagtattccaaccaaggtactttgatcctcagcctgtgaattagcaactctgcctctcaacttaccatattgaaaactgagaccaacaataaaatatttccaaagccaaagaggaatttccagatactgcaatttcaatgagactaaactgaaattgttcacttatcaaccatttacggaatctctgaaattctttatcacagtactcaggagtttaattgagaaataatagctaattactaatttgctttccaaaaaagatgattcctgctagttaacattgttttgttgagtaaagtt

SEQ ID NO: 44708 - DNA, 3285 bp, Homo sapiens
agatgcggacatccaaaggatggcattattactcacaagcatagtgctatgtgcagttatggcttgagggaagggaggggggaggtcgccctctgagacctgaaccttttggtgtggtttcaagcactaaccagcactatctaatggctatttcactgccttgtcaatgacataggaaaaaggtacctgagtggaaactgttttcagggcacctttaaagcctgggagcaaagggtggagggatgattttccttgtggacttaaaagtctttaccctctttgtcctatttttctttcttccagaccaaaagtaccgagttcaacaacaccgtctcttgtagcaatcgggtgagtagagagttcagtgctgctggctttctccagggagacgccaggcattttggagagggagtatcctgctacgtgcagaactccgagaggtgcctgggctccgggacgccgccgccgggggaaaggggacatctgggctgtcagagcggggctgcgcctagcttgggacaacacttctgttccaatttagggagaggaagtctctatccggaggaaaggcaaattgggaactgggacgagggaacgttgttaggggcaccacctgctggggtccggcgcctccgcgctcgggctcggaattttggcagcctccgccccctggagacttgggaggagcgagcgtgggtgacagtcttttcgcgacgagtgccctccgccaccctcgccacgcccctgctcccccgcggttggttcttccttgctctactcaaccctgacctcttctctctgactctcgacttgtgttccccgctcctccctgaccttcctcccctcccctttcactcaattctcaccaactctttctctctctggtgttttctccttttctcgtaaactttgccgcctatgagcagccacattgccttactgaaatccagagcctaaccttcaatcccaccgccggctgcgcgtcgctcgccaaagaaatgttcgccatgaaaactaaggctgccttagctatctggtgcccaggctattcggaaactcaggtaagcccgaagcctcagacgtttgctgtaccttggggctaacctcaaattaaactggggctttggtgcagaagtcgttctcttatttttatttaggttttatctttcgaagagcaaacgagccgggtaaaagtggtaggatgtcagttagacccacgttgatacccggaatcaaactcacctatttctacggttctgatactgttttggctgaattatggttctaaaccttagggcaatgtttcaagctatgatgagtgagacttctatatcagaatgttttgattgctggagcataagagtatggctgctaaaaatgccaattcccaggtactcaacccagaccttcaacattaaaatctcagattatggggctccttaagagattcttgtccagtccaaagtttgagcaacacctcttgttcttatcacttaattattgtgtgcttatttgctaaatgtataattacattatacataaaatctctatcctatgtttgcttaattgcttgtgtgggcgctattgctgtctctttacacatttttgcacatgtagttatctgcatttgaatgctcgtgtagcattaaatatggagatagtgtagtggaaagttaggcacaggaactctggagacaacctgcctgactttgaatcctggccctataacttctgtgaagacttagttaaattacttagcctccgtgtactgtagcttcatgggtaaagtaagtatcatatcagttagtcttatacaggttgtttctgaggattaaattagtcaacacatgtaaatgcagttggaacagtgcctggtacacaacaggcactcaatatttatttcagtcagcaagtagaggatttatcttcatggtgacaagtttaaggaacagagagagacaagtgcagatatgtttgattgctccttattagcctagtggactttatatgtctacagtctaggtagatggacacgactgtcactttttttttttttttttttttgagacagaatctcgctctgttacccaggctggaatgcagtggcacgatctcagctcactgcaacctccatctcctgggttcaagcctcagcctcccgagtagctggaactacaggtgcccgccaccacgcctggctaacttttgtatttttagtagagacggggtttcaccatattggccaggctggtctcgaattcctgaccttgtgatctgcctgcctcggcctcccaaagtgctggaattacaagcatgagccaccatgcccagccaaaactgtcactttctagaggttgaggattgaagccatagcgctgatctgggttgagcttgaattagaaactcaataccagacagccatatgggaaacctatttggcttcatgccttcttatgaaggagaccctggcaaatctgcagatggctacaataaaattcatttaaataagagcacaaacaaaaagctagatcaagttcttggacagcatgtgagaaagggagagtttggagaaatttatttcagtccctcccaagcccaaatggagagtctaagactaataataatgattttgcaggtttttttaagatttgtgcttaataaccctgtgactttattaatttgcataccatgtgtctaggaggcccagtgtactactcaaaggtaattcagataaaggtatatactgcaatcctctttaaaataagccctcagatgtctgtgacacatctagacaatggggcaggggagggggaaggatggggagcaggagcatgcattttgggtccaaaaaatagactaggtttattgaatgatgtctataaacaggtataagatagctcttgcccatgaggaacttgtgatcttgtcagggaggtcttgaaatcagcaatttattcatttacttaatcactcaacaaatattcagtgtttcctatgattaagacactgtattcagtgctatggggaatacctatgatgcaatataaagaaaagcatgttaagtgagagccaagttaaatgacacacactcttaagtactggaagagtttccaaaagcaaggtctgagcaattagtggaggctttttgaaggaggtggtgcttggccttgaagcaaaagtaggtgggtacagaaacaggaaggcattcccctggaaaaggcacatgctagcacatagtaagcaggtgctttggagacacactgaaagatggatttgcatagagaa

SEQ ID NO: 44709 - DNA, 1854 bp, Homo sapiens
ccaaaagatgaggatctttaaaaacgtaatcataatgctactatcatatgtaaaaatgaaacataattccttaatatcatcagatatccagtgtttaaatttttccagtctcatgtttttgtacatttttaaataatcacatgtttaaatcgtttccatctccaaggcgtcgacctcccctccattctcctgggcgtcgcgcttccctctttgtttcccgcccttgcggttctgtcggaacctaacgagcttccttccaccgcaaaagagctggagaacaatgctaggcaacgtgctggagaccttggccctcggaacccaagtcacgcctcccatgtgagctctggagggagaactttatgtgttgcactgagggcagtctccggaaacgcgattcgcagcgggcgccggaagcggtgttgtgtctgcagctctggcagaggactgttccactagacacgctgaagggactgggtacgtgttttccttcaggaccagagctgagaggagctgggatcgcggcggcaatggaacgggcctcagaaaggcgcacggccagcgcgctttttgcggggttccgggccttgggacttttcagcaacgacattccacacgtggtgcggttcagcgcgctcaagcgccggttctatgtaacaacctgcgtgggcaagagtttccacacctatgacgtgagtgacttcttttgttagcttcccaggaaaaccaccctccttggcctctaactctgtcctggagcagtccggttctcccttcccatttaccacgggcttcccttctttaacccctccctgtcctattaatatttcgccatccggtcacgtccacgtgctgatttggcacttgcagtcctcctggggcgtgtttcagaggcagcctggccaaggggaaactgctagagaacatctcagttgtatggcagtaatatttgttcagtgaatatttattgaccttcccttgaaggtggaaacataattaagacaaacctctacctcttgcattcttaatgagagagaaaaacatgcacgctattacgttattggtgacacgagctgagttagaaattcactctaggtagaatacattgggagaaccggagatggtgagattaattaccgttagggaaaatatctaatagcaatcagttattttcaactaacgcaaagtgtctggcactgtcactctaagccttgcagccgtttctttgcaacataggtgtcattataccgtagcacctttatataatctattaaagtaaatttcagataaatcacttgttagtgatgattttttctcctataacagttcatcgatcattgtaatagtgtctcttgtttacttgtttcttttgtcttctccgaaagaatgtaacctctgtgagaacagaaaccttgatgaggaggatgataatagtcagtgttaattaagtactttcttttctggaaaacaggtagagttgtctctcttggaggattgtgaatatcaaatggcttattagcaaaaagagctgggaggtaggaactagttgagttagtggaaaaggaaagtgagggcagagctgaggtgaagagcaattgggtttctcagagtctgagctggtaatggagacagggtgggttagaaccatattaatcatgtgaaagtatttagtgttaccattctctgcacttgttccttgcttgctaacttttgcttttgctggttaatgttttcttccttgaaatgtaatttttctgagtttattactgaaataactcttgaaatcttgtctttggtacagtgtctttcctgacactgcattacacacagacacaggtgtttttccctatattctac

SEQ ID NO: 44710 - DNA, 2394 bp, Homo sapiens
cacaacagtaatagtcctccttgagaaaatgtgtttcattatggtaaaggaattttagttattcagaagctctaggattggtgtaaatgggcatactttagatatcttgaggtcttccataagtgagaatagtagcttaatgtctatacattttccctgttttacagaaagggaaaatagcaacaggaaggttgagtcacttgtccaagatcacacagttcataagtgatggagccagaattccaacccagggcgtctgacttcagagcctaaagctctctcttgtaaaactgtggaagctgatcacaggctggaaaagacttcatataaaaaacctgggcccaccaaatatttgtcaagttttgtcctggctgctgaacctaaaaatctaaggtaatctttctcaagtgtaaattcgggaaaacaatgacactgatttggtgagaaattatttgagttaatacatttagcagggaccttggaaggcagtaagccctgggaaaactttgtctcttgtctttggcatcacctccgcgaagcctggtgggacgcggctgcccctgcgctgtctgtgcacctcctaagaaccaggaagcgcggtgacctccaaagaacaggactgtcccaaatcaagcgggattaccaccgcccctctcccatttaacagctgaggacactgaggtctaatggattccaagtacttaaataggtgagcggcgcgcaggggcgagttgcaagccctgggatccttccagctcgccgcttcccctcccaggggctcaggtttctctttcatctgtgaggtcctctcccgcccggacgccggggcccgccatccccaacgtccaccgcgagctccccagatccatggtctggagcaggtccagaagacgcacctggcaggacgccccgggcgccacagtcgccctccacacgggccaccccaatcctgccgcggctccgtggctctccttacctttacctgaggtgaagcaaggacgtggaagcagctacggcgcgctaccaagcacctcacaccgctctcaacagtactgctcagcctcccggcccgccgatgcgcaggcgacagcagccaacttgtaagtcaccgctggtcgcagccaactggaaggcacccagcgcctcagggcaaggcgggccgagcccccagccccgccccctggcccgatcccgggggctccggggagggggggctgagaggaggtggccggaacaacgtgcgcttgttcggattggctggcgcgggagcgtgtggagggctgattggtggccgataaatggaatgattccgcgtgggtgtgggctggcccgagccgcgccagggttccctggatgtctggggttgcctgcaggtttggattggttgggttgggttgtcctgtgatcacttaattgtgaaagaattttgtcaagcagtaaaccgactgggagaaattgaaacagaaggcgaagtgaaggatcacagtgagggataaggtccaaattcatcccgcttgtggatatcctagtatctcgcaactacgctactcctcccaggactaaaagtcaaataagaaaaagcgcccatgcagaggaggacgagctctctgcctcctgcttagcctgactcagaactgagagagctgggaaggaaaatgcatataaacgaaagtccctgccactatgtgaattgacctttagccaaatacgtttgtgtgtgtgtgggtgtgggtgtgtgtgggtgcgtgtgtgtgtttccatcctcagataaagagtttagagggcaaccttagaagcagagaaaaggaggaggtgtgacaagtggatttagcaactgcacagttttggagtttccatctactcgaacatgagaaagatttcttccagtggctgtgaagtcacccatctgatgggatgcttggcaaacagtgaatttcttcctttaccagagtagccatgatgcactgattagcgaggcttggtttgtctgcaaattgcgtttactaagatacgtagtttgagaaccaaaagcagggaagaatgcagtgctacaccattagtgatttctgatagacttgcaatgaaaataaataatatttcgtaaatttttaagtcggcctcaccaaaagaattaccaaatactacttgctagttattattggccgatttattttttacctccatcgtttatatgtaaaataatttgttttatatttatatttataatttcgtgtgacataatagaagagttcttcgtgtgttgtaaagctcctttcacttaggaattattggccaattattgaggtgctttggatggatggatgaatacgtagataaataatttgaaatggttggggaaaagtgctttgtaattaagttgtacctacttaattc

SEQ ID NO: 44711 - DNA, 1177 bp, Homo sapiens
tctaattattttagctttcctttgttgagcatttactctgaggccattcctatgtttaacaatcacaggtgaacaatcttcatttagtcctcacaagaaccctgcatgggtgttcctattattttccccatctcacaggtggttcagagattaaataacttgcccatggttacctaacttgttagtgatagtcaggattccaaagtctgtcctcctgtgctctgcctgaaacccagacactaatggctagcaattctgtctctgaccattttggttacaagcttttaggcaaatcatcctggaccattctgccgttctaaatatgtgacttgctcgctgtgtctatatatgtctatgaagacgtgtctgctgattggattttaattctttgtctctttaaagaatcaaatatcagtcagctgccaagcagccaagtcccaggctctcagccatgtgctcttgccaacggttcttggctgggtctggggttttcccaaaagagttcgaaacttgatacttattcttcagcctaatttccaacctgtgatgccttcctgagcccacacaggtagttgattgtgcagctttttctttgtgtgcaaagaatgttccgtcaccagctcagatttactcttctcaagggtgccagtgagagacagcagcctgtcgaaatgggagggttgactggaggattagaaatggatccttggactgacatgcactgcttggattgccaagcaaggctgcattttcaaatggcataattatgtaaggtctgtttcagtgctaaaatctggtttataaaaaaaggataggttaggggcaatgcgattcacactgaattcaccaaatccttgattatgaaacattttcagaatgttggaaatcatttctgggtaaccccacttacacaatagttcccaaagctgccagacacactggtatgaaatgcttaagtaaggtcaataaacaacgtgcaagttcattgcctttctctgaaatatcttactgattctggatatgaagaatctggataatctttcctgctgaataaacacattgcagcgtggatattactaccttgacccatctacatggcatagcatgaattgacctagccctcatgaggttgcaggagggaatgctgcaatatgtgactttgttgtttaaatatttt

SEQ ID NO: 44712 - DNA, 996 bp, Homo sapiens
gaaggtcctagggattaagaagttcttcctgttagcaaggctcagctaggactaaccttttcaggtatgcttccaatctggttattgctgctgaaatggaaacaaggataaggaaataaaacccatcatggatggatgcaaaaggctttcatcacattcttcattctaatgctttgaacagagataaagcaagcaatgagatctcacactaggttccaccaacaatccccaacaccagtggccttgaacactgtttcagtcaagctatccaagggccttcctctcttgttgcataaaggggcagttaagaatagcttcaccagagattttgaagtacatgtattctgaaaacacttgggctttcttctgtagcatccacccttggacaaagagtgactaattaagataaatttctagcttacataatgtcccttgcacaagaatatgtttgcactctagagtgttgacactggcaaatggggccagacttttggcaggtttttcaaaaaaacaatgccaaactggctaacttcctatatttctctagtcttttttggaaaatacctagaacactttccaagaaattagtttaggtcattcagagtttattctggatagtactgtgtttattgttgcataagactctaagtcagcatcaactcgccttccagactcaagccagttaatgctagcattaacacatggacctttttgctctgggaatgaggcaactcaaggttctaggaggaaacacaaattatatttctgggtgactcgaattggccatgacctcactacaaatactgaggctttgaaggaactctggttcataagagaacaatactatctaaaaaatttgaaaagctaagagtttctgtgtatcttttttcctggctggtggaagtaagcatggtaggaagggaagaggacaaagcatgaagccagtgactgagtttgaacctgggctttcatattccctagctagttacatcagat

SEQ ID NO: 44713 - DNA, 1070 bp, Homo sapiens
aatattttcccacagtcctcatttggcttttaaatttgttcttgtgaactggtttttgccaaaaagaagttttgactttttaatcattccaaactgtcaacctttccttcatggactctgggcctcctgttagacttagaaggttctccccactccaagactgtaaaaatgtggacagtgtatttatttagagcattagatgaccaaattcaaagaggccacagtaacataattgatacgatgccaaagaaaatagcccgaagccctgccgaggaatctgcctagccctccttttcccctccactgtacttttccggcctgtgattatttgttatgcctctaggcagccctgactttccattaagtcctcctccctcctcttttattcctgtgcagagagctgtttgcttttcagtttttgctttttgttttcacagactgtgatggccaataagtgggacccctttgacctgtacttctcccttcctaggaccaaatgcagcattactgactatatgtacaccttcctgttctcccgtctctcctttcatcctcccccttcctggagtgagcaagcaagggagccaaaagcagactttgacacatctgccctggcttggctctattccaatgggaaagtttgatgttgcaagcttttgaaagtcgctcacatttccctgacttacaatcatgcaggcttccttgacttccttctaattcaataaggataaagaaagcaagctgtttgctgcagcctgggtcctgagggaatcagacccaggcaaatggataacctagagccattgtcatgggcccctttttttgtcccttctgtctccaacaccctgcccacccgaggctgccttttctttctaggcaggggcactctattggggcataatctgatacgaagtttctctccttggtggggtcaaccacagtccaatgtcaagggttttcttaggaggatttttgccccactacagtctccatcagcctccaacatctgctgtgtatgtttatttaaacatactctctaaataaaagcagtatgctttctatgtgaatgt

SEQ ID NO: 44714 - DNA, 1174 bp, Homo sapiens
actaaaaccaccaaagtctaatttgtaggggaaaatagcttgcctttcagaaattattacacctattctaacaatctgttgttctaagaactctccatttgctaaaaaaaaaaaaaacaaaaacaaaaacaaaaaaaaagccaatgacttttgccaaagaacttgggaacatgaatatctgacagcaaaacacacatgactaaggaaactttctcccttacttcatatttgttacactgaccaaggctttttttttcactattaggcatttttagcacattaggcattttttagtatttgaatcatcaagtaatcattgtatacttttagaaaaatgaacgttgctttggccttctggtagttttccaatctccttcaaagtcagaaccttaagccaaaaatggcagggacagaggagtctcagttacattcttaaaacctgcttggctggtatctaagaactcagcatatccctagacatagtacctaaaggagatatttaaacttttcatttttttaagcacagctagttttaagaaaccgtggtaaattactggaaacaaatatgatctatctgcattacagcattgttctttcttatacctgcagtattttgagactctaaagtgaagagcttaagagaaaagatctattgacaatcattaattacctttgctctcaaatgattcagacctgacctttggtattccgcaagggcctgaacttccattccattcccagtgctggatgtggagaatgggtgatcccaagcaacaatcatttgcctttctgtcaaaagctgtctcggtttaaatgtactgtattttctttgcctcttcttctcatcggaacatgttctagtctactcgccaggtgctacttctggcagtcagaaatagtgccacttttcaacttcaagtttcttaccaaccttttttgcattcatgcagcaagagttcatgaaatagctgcaaagtgctggacactgttaggttgtgggaattgcaagagaaacagagtttctgccttctagatgctcacgtctgggggtggggcaggtacagcaggggtgatcaatccacaaaaatttacttttaaaaatgtgttatgggctgacttgtatcacctcaaaattcatatggggaagtcctaaccaccaatacctcagaatgtg

SEQ ID NO: 44715 - DNA, 1089 bp, Homo sapiens
atagtggaatcctctaaattcactctgctcatcgtgaagccatcttgagaggccactgatgaatatgtgggaacctgacagctgtggaattttatttctagactttaactaggcacagaaaggaaaaggaaatctccttgctggcaacaaaatgaaagtgtttacatgtgaaattaatcgtcagcacaaagagctttcacagtcactctgttccacaatgtaatattctgcttgtttggctgctgagtgttttaaaatttcatttctaagaataatagcaaagactttcaaggggggcaagaaatcaggtcaggagccagccacaaaaggttaacagaattacccgacttttctttttcaccacgacttaaaaccattcattacgtgagttttctgggctttgatggtacatggttcaaggccaggtgcagcaacagccagctaattcaagcatagtgaacacggaggtcagctgcaaacatttacgttgtgcaacatcgtgttcctctcattccagccccattcctttccaataagagcacatttagcacaaagcaatccacctaaagactccataaatccaaaaaagggagtcactgatcgaggaattctcagatttctgccaaggcaccctcccttggactggaggtcagcctggtacagtaatcggagccaaactgtggactggactcaaggaattaagttcagcacttcaaatcttgacttttaatgggcaatttttcttttcagcaatgaagagaaaacaaagtacaaatggctggtaacagcccaaagtaaaccaggagaaaaagcacaagaataaagcttggatacaaatcttataagtaatatctaagagcctttccaaacaatgggaaaaaaataaagcagcctttttaaaacttggtttgagattatgcagttgtgagtgaacaataataaagcaaaggccacaatacaagatagttgctctctttagtgaagaaaaaaaaaaaaatcagcctttgttagcttgcagcaaaaaggcccctcaggcatttaagcactgcataagcttttctttgcccctgtgacctcaagaaatatatt

SEQ ID NO: 44716 - DNA, 2625 bp, Homo sapiens
tattgcatgcttttaaacggtgggtacattccctgcacagcattcattctttaagctactattaactgagttcctctgatgcagaaggcactaggttaagtgttcaaccatgtgctgcctaacccacatggcgcactcatctactgacactcaacaatgtctggcaaatgagcacaagaacagactttgacatcatggtcccaatgagccttctgggtggctttcactaggatgactgagtgggaggcatgaaacagtacttcgtggaggaaatagttaatatcaaacccttacttgggtcatgtttataagcaccttagtcaataagttttatccatataaatactgactagttttcccttgatagtctgaaagttggctggcaaagaagcagtatcttctcctaatttctactctttcctgtccaagaataagttatatatcagacaccaactttatccaatgaaagcgtcctcaggatgcctggacccgttttaaacaaaacaacttttgtagatttctccttgttcagccactggactgtagtacttttccctgctggaaatgtatcaaactcaattcagcaggaaggctgttacctgctccagtaatcaaaggacatggtgtgtgatggtgatctgagtaagagctgggatgggggagagaagagctggagctggcagccacagcaaaacttctgtgcacattatgagtctccctgttgttttaattacctattggtgagtctttggcttggcatttttattggcaacaactacttggctactcccccttccttttcaatcaatggctctggttcccaaatttcagtgaaaaggggcagacagaccttcctttcatgccacgttctcttatgttatttactccttctccttcttgaatataagttatatttatattttgctccatgaaaataaggaggaacactgaaccaagcagtctaaaatcagggatttaaaaatatctctagctagattatcataacactttcaaggcaaaaagcttagattagaaaccattctaaggtcataatgggcaacaatttcactttaaaagatttcattaccctgtgaaaccagggcagatttggtctactgtcatgactgcctcagtcagactattgagacaaactgtgctgcccgctggaaaagcaccattaataccctcacgcatagtggcgccccacagccagtgttgtggataagatgtgtgccactaccctaaagtgatattccttttttatcagaccataccaacctagctttctggattctcaggacctcttctgcccaaaggagtgcaaaagaatggaacacagaattttaggagtcatttttgtagtgtgcttagatctcacttaactcttcccccttacttcccaaacatttgagccttctaaaatgttcactgaaagcctcttttcagtagtaaattgttcatcagtgcctgttcatttcatttcccggaatgcctgacttataaccaagctatcacagcagtgcagtgtccggccatgactcattgtatgataccaaagtgggcaacctggtcctgcccagaaataacagattgtcatgtatccatgaccactgactcattcatttattccgcagacagttgttgatcactgaggatgtgccagatcctagttaggtatgggagcacagattagactggttcatggtgtgggatctattccaaggtctcattaggaaatgtcagtgaaggttagagtttcctttcactttgtagaaagagaacaccaaaccactttgtagaaagagaacaccaatttctctacaatttcattactgaaagttctctctcagtaatgaaacttttctacatctgaattcaccatcccactggtagaggaaatggaaaaaaaaggcatcacagcctcaactgctaccaaaaagggaaaggtgttgctcagttactaagtggtcaatattcttctatcaagtatacaacctcggagggtagaaaaacatgcagaaataagccagccgcaagaagaaagttaaacatgtgataagtatacagaggaacataagaagattcctgctgaatgtactatggtgtttcatagaggagttgccattcaaattcagtcttgaagaatggctttattttgtcaggaggtgtattccttctagaatcaagataagcaaaggcacagaaagagggaatcctggggcagttgagaataagaagtagcctgctccctctaagaaaatacaatccactatggctagaaataaaggattaattcatatagttcctggcttatctgtcaagccgcagaaataaaactttggaagttctaaacatagcaggtgaaaaaaaattacttgaaggtatgaggtggagaaggcataaagaattcaaggagcaatgcttacctatgtcacttttactgagagatttacagacaagtaccacctcatctaaaggggttaaaagagctagtcacatcatttcatgttgaaaatcttgcagctgatgcattccaaggtaacattctgtgctatttataagagattgcaggaaaaaaaaaaaatccctcttggacttggctttactcgattttcgtctatcatg

SEQ ID NO: 44717 - DNA, 1854 bp, Homo sapiens
cctaagaagaccctcggaagcagcagcattgaaagagtaatcaagtgtaagggcggagggacacaaattcattttataaaaagggaggaaaagcttgcatgcaccaaagtgcatttaatgcaaagaaacacaacagtttctaacaaggctttaggagcaagaagaacaaaattaaccacaccaacaagcacaaaaccccaccccttcccaaaagaattcatttctccctccgaacttgtgcattttagaaaaaacccaagttaaattccagcctgaatgcagcacaaccaaaatgccagaatttctccaaggtacacgcttcagctctttaaaatttagagggaagaagcatgaactctgcagggttgaagggtccagctaagagcaacggcaaggaatcgacacaaaagagaaaccagcgctcccagccggggataggaatggcatatacttacagacaaaagccccgctccctgttcactctctctcctctctacacctgaaacacaaatgtggttgaaaaagggcaacatgctagaaagacagattggggggggaggggggattgggggagggagggggaggggaaaggggtggaggaagaggagggaggagggggaagggaaacaaaacccaaaccggcttcacttccaagaagtgcagccttggaaaaaggaggaggagatcatctccctgcctcgcgctctctctccaagagtgtgtgtgtctctctctttctctaagagtctctctctctccctttccctctctctcccgctagggtgctagtgaacaatgagctaattctgatggagctggcgcggagccagcgccccagccttgctgccactgtgcagccgcctaggagccagactgcttactcggcaggaatcggcggctctgggccccgtcggcgagcggccaacaggcgcgcgcgccccgacaccccgcacccgcgccccgggcgccccgctcgccgcgccgtccccactgcaccgcgcggcgccccggggagacaaagcggacccgcagctctgcgccccggccccgccccgggagcacggcgcgcgcaaatccccggccttcctccccgcccccggccagcctctccgcctcgacgtgcggttgcttttcagacaaataaggaggtggaggaggcggtttgggggcgcgccaagcgtgaaggcggccagggtgctgcacagcccggcggcccgccagggccgtggggagaggcggcgcggcccgtactgtaataataaacctgcagcagagggcatctgaggaaaagaggacggcgacgggcggcagccgccttccttttatgtgcctgtcctgagcgaagcagaaaatggtgcctgcggcggcgcggagccgcgctcagacacacaaagagtccgcgaaggatgcatttgcacacggcctcgggtcggaccctgcccctcagctgggtacgcgcgccccactcccttccgcggggaagcccggggcggggagcgcccctgaaggccgggcccagaggtcctgtggctgcgcgtgcacacacacacgtgcacacagtcacacgcgcacaaccagccagagctgcggcctggcgtgatcggcccaagacatactcccctggtgcttccttctccttccctatacgctcccccactgcctgcccgtctgaaattgtactttttaaaatcgaggattgctttaaaaaataaagtgctttgccatttctgatttttgtaaactcgtcgttcttatttaaaatctatcttttcatagtaatgtaatagctcaaaattttgcaacaaactcaaataaactggttctgttgccaataaagcaggatatcattttatg

SEQ ID NO: 44718 - DNA, 668 bp, Homo sapiens
aagttactatgttgatacatataaattttaccacctcattgactgggactttggcgtgtgtgtgtgtgtgtgtgtgtgtgtgtgtgtgtgtgtgtgtattcatggtggagttattgataaaataacagcaaatctctagactagctagattctgtgaagtagcctggagtgcaaattctgccaagtatagacagcagtgatccaggaaccaatcagactaatctcataaaaaaagactaaatgggatattagttagccaaataaataatgagagagatatagctagaccgaaagaggggttgggggagggagagaaggagtaaaaaataagttggagtagagaggaaacagttgatacatatgagaaaagtcgacaatgagctgtgtgtacagagcccatgaggcaacggaaactgtgaggaagaagcagaaaaatacacagaatagagtgtgagatggttggtagcagctcaaaaatcaggaattaatgactctctgctgctgtggagctatgagataaccggctcaccagtgccaactagacaatgaataaccttccagttcctgggccatgagccagtctccacaaaatcaactgtactatttgttccatttccataatgcccaatgtatggcccagattggaaccgcccttatttccacttgta

SEQ ID NO: 44719 - DNA, 1734 bp, Homo sapiens
ctcatggctcacactgtttccatcggacagcgctaccctatggcatgaccctcttttgctgccctcctggcacttacattgtagaatttcagcatccgggctcacttggtcagtggcctactcacccaagcagaatgtaccacagaaaccttgcctggctcacccacacctgattcccaggcactcaggccagggcctggagcatagtaagtgctgactaaatatctttcgaatgaatgactctactcttcctcagctggactcatgaattctgtcgggtcccaaaatacgtggtctaaagtcctttgggctcctgccgctgccagcactgatcatatgctcttgaccctggtcgggtggggggatgtctggatacctcctctgtggaaagaactggccacacatccgcagaggtgactcgggctgagaacccaggctcctcctccctttggtgacacgcccctcggtccctcactggcacttctccctccggccacacggcggcgtctcgccatagcgcagcggccgatggtacagcccgctcccccctcgcgctctcggacagtgggtccttccacttgtagaaaagcattgtgggacggaagcctgtcctttcttccttttggtgcgagcttgctgtggtttttgctctgggtcctctgggatggcgcctggctgtggccgcgtggtctctcacgcaggggcgccgggcgggggaacgcggccaccctgagtctggtgagtcgactgcggcggcctgtgtccgaagtgtccggggccgtgaacaagggcagcggcctggcctcaggcctgcgttcccacgtttggaaacggggagcttcgtcgatttgtgtttacatcatcgactatgccagggagttctccagataagcctggttttattttcgtcagtgaaaaggccttaccgtataactgactttatgcttgccctgcccccgtataaaataacttaaaagcagcgtgcctggttacagctgtttccacgtgcggtgctcgtcgggagtgatcacctaccctacaggtgagttttcacgttcgtgcaagaccagtcgccatttaaaacgcatcgcatttcacttttcattattaagtcggattttaaatcgtgagaaaatttctctgaaatgtattgtccgtttttaggctgtaatcggcattactgtcagccagtcagcaaccttatgccataaagcctacctcacgcagtgtcagcctttgtgttgcccattcactttggaaactagtgaatgtggtgtcaaaaaaggcgtaaattaaacgctttgcagccttttcctgcccttaaatttgatacctttggtgtaggagctgcataagtaacagttgctgcttttacgtttccacgcgtgatcttgaccctgctagccttaagtgtatggtttctcttagccagttctaatttttgttcaggtggaagatggatgcctgaagtgtagactgctgctagctgaataccatctgggagcataaaggtgacctgaaggtagggtgatatgtcttaaagcactttgtaatgggaatttttatcaccttttaaattggggttccttctctagtgagttttaatgtcagtggtacattcgtagtgttgctctgtctgtagctattaaggtgagttaataaatgggatagcctccacagcttatttttgggaaggttttgctgatacttcctgagaagcccagggaaataaat

SEQ ID NO: 44720 - DNA, 1071 bp, Homo sapiens
cacaaaccatcctctcagaaatcattttcacaaccccttatgcactctgtttgcagccccttccacagaggcagaatgggaatgccaaaaatgtcatcttatcttgctttgcaatagttcaaagattatgctgcaagtatttgtgtgttcagtgagatatttttaagaacttaaaatgctgcatcagataatcaaagccttgtgtatccatcccaaatggcttcacccattacttttcttatagctaattatgaattatatccaaatattctgtcttcattgcctacttacagcagagacgatctcctttgacaggaatccaactgtgtgagttgccaagaacttgtcagagagagggttgtaacaggagggcactttttcctcctgccgtcccttttctggctttacccaagctcctctgaggcagtttagacttgcaggaatgctctggctgcctgccctgatgctgacctcctctgggtggggaagcaggcagctgggtgcagggcacttgattctggaatgtacttcctcataaaggtgccagggcctgcacttggcaaattctaaacacaatggctttttagctgccagggcatttattactcctgattgagaggtgaataaacatgctttttaaacttacagacaactgggatgcaagttaaggggactagtcatctagtttgattgaattactttaacttcggaattaaaaagaaaggtcttctaaagtaaaaactcatttagtataaattaatgatacaaactaacaaaaagtaataacccccatcacgactttttaaaaaattatatacaaatgttttgtgttttttttgaaacacatcacatttattcatttgcatattttcagtgacactattgtgctacaaatggcagaggtgaatagttacatcagaaaccacatggcctgcaaagtctaaaatattcattatctggcccttcgtgaaaaacgtttgcctattcctactccactaaataactcttgtggggtatttttatttatttatttattatttttatttcaatagttttaggggaacaggtggt

SEQ ID NO: 44721 - DNA, 885 bp, Homo sapiens
gctgttaacctgaacaagcccaatacatggtcataccaggtcgctgcacctgtgctccctcaccaggaaggcccttcaaaccatcaggtatcctatgatttgtttcccccactgtctggagatgggggaggcttcctctaccagcgtatataaaaaagaacaccccccgccaccacacacaaaaagatacctagctttccattctcttcgtagcagttataacttgacaaacacatacacacattgtgtatttgttaacggcctccctcaccctctagaacagggttggaaaactacaacacatgggccaaatctgagtcactgcctaagcatttattagaacacacgtccactattgttttacacattgtctgtggcagagtccaagaggtgcaacagagacctaatggcccacaaagctcaaaatatttattgcctaatcatttacagcaaaggtttgccaactactgctcaagaatggctatctccctctgtctcctgctgtgctcacactttatctccagaccattttggcgccttacctagcatgcagtaggcactcagagaacatttgtaaataaaagaaagtgacagggtgggggagaatgaagggagaagagcatatgaatgcaagagatactggagggaaaaatcaacaggcctggcgactgggtttaggtgccagcgaagagagcaggaattgcacaataggagcttttcaaatgtggctgtgttccttggccaaaggatgagattctaatcatcaaaccataaacacaagctgtgaatcagggctggctatcacaccactgatgggtttaaaataacagtgtcaggctccttgacaaggtcagtcaaggcctgacagcactgcccccataaata

SEQ ID NO: 44722 - DNA, 913 bp, Homo sapiens
acaacctcctaaaggaaagggttaacaatcttgtagctttaactgattatttttgctcctttctcccgcaaaagaattacacctatgaaactggaattctgtacactaagaatggcaacattaacgctgaaacttttagccaggaatagttatcctagtgtgcataaaactatgtaaaaactgattcacaaaaggaaatgcccagggcctaccccattatgattaacttctgagatgaagcgactaagagaggatacttggcagcctgaactcgatttctcagaaagccagctctatcagagcgggggcgggggggcggtttcccttcaccagactcagctgttgccttatctaaaatgccttagcgatctaaaactgaaagagaaagataaacaaaacaacaaaacgctccggatttagatctcctttaggtagttaacactgttgcaaaagcaaaacaagcacgcaggcgcgtcggtcaggttgtcactacaaacatacgtaccttctcatccaatgtaaggaagaggatctctgcgagctctgctgcctttttgtttgggctctctaggttaatgtagtgattgcattttaatgacccacaaacaggagcaaagttattactgggtcgctttgagagatgtttacttaaatgtgaggataaacccaggtcgctgtagaaagggaaaatattttccgtccaaacgtagcattacccaactacgaacccacgcaaaacaatcacaatgacccattaatgcgtttcaacgagtgaactagttcacttccctaataacactgtcaaggaaaacgccttcaacaaagtcgagggaaaccatgccttccacactggtgggacgcagctggtataacccattctgcccctctttgagagctgcggggcacccagagg

SEQ ID NO: 44723 - DNA, 914 bp, Homo sapiens
ccagagttgcacagctcttaaatccgtcatccacgttgagcatataaaagcatctggctactggaaatgaaaataagggatttttgaagagtgatatgtcttctgaaagctctgcatgtgctgtgggttcctctaccacctcattcgcaaaagaataggatgtgaattgcttgttttttcatctcaacttagaagaagaagcatcaaagggaattctcagagagcttaatgtgtatttcctgaagtctgggggtggggacacactgcacttgagtgtgactcccctctgagcactcaagggtgagagacaggctggacagcagctgactggtaagccaagggaaagatggctgggttgacataggcctgcatacacagaatttgtcagagcaagagatgcatggattttacataacagaaatgtgaaccacacacaagaaagctggcatgaggtcatcttatatcctgtccaatagggctacctaggagggcaaagtcctcagtagagagaagctgatggcatagtctgactcatagggattggagagggaataagcaacacaccgaatgagagggcaccattcacatgaacagagttgcagagagatccttgaagatggtgtggaagtggagagaggacaaggagtgaaatctccaaagaatacatgatggcatctatgaaatcattacctttaaactcacgccagtgccagagaatatttgaaaattgttgtgggttttttttaaaaaaaaaaaaaaaaaacaatctcaaacttacagaagcatgcatgtacaatactaaaaactttttccagaattatttgaaagcaagttgccaatatcatgcctcactgtgtggagtgacatcttcctcaccctgtccatgctctgataccctccacaagaccaccctc

SEQ ID NO: 44724 - DNA, 1500 bp, Homo sapiens
agggtggtagtgagaggtggtagggaagcagaggtcgcagctacaaaataataacttgctcatctccgtttctccgctatcttatgagcccttgtggggctgggacagaattttattcatctttctatcatcagcgtctagtacggggagtagcaaatagtgagcactcgatagatgtttgcggaataatggactagtgtgtgcagaaggatctattaactgggctgcagcacaattcagagaaggccagtaagtgctgcaactgagactcggctgcctaggcagcaatggctcacgggacagaacagcgaagcagtgcccggcaagcggagcgcagcacccattgcgcctgcgcataacaggctctagtctccgggctgtgggaagccagcaacacctctcacgcatgcgcattgtagtcttcccacctcccacaagatggcggagggcaagtagcaagggggcggggtgtggccgccggaagcctagccgctgctcgggggggacctgcgggctcaggcccgggagctgcggaccgaggttggctcgatgctgttcccaggtactgttgttggctgttggtgaggaaggtgaagcactcagttgccttctcgggcctcggcgccccctatgtacgcctccctgggctcgggtccggtcgcccctttgcccgcttctgtaccaccctcagttctcgggtcctggagcaccggcggcagcaggagctgcgtccggcaggagacgaagagcccgggcggcgctcgtacttctggccactgggcgagcgtctggcaggtgagtgaggctgcaggcattgacgtctcctcccggcaaagcttcctcggctttgccccgccgctgctcgggaccctacggtgctcggcccgactctgtggctctcttctctccatgtctcaccctctcccctccccgcactccccattcaggcctccagttggcccctggctttgcaggtcctccattctcacgcagtggatgggggtcgcgacgcccgccgtcctccacctttcctggctgctgctggagcttcgcccctgcaagtggtgccccattcgcgttaggtgggtgggtcgtccgcccttcccattttagtcgcttccccatcttcctcgtttggaccctcttgcttcctctaaaagttttaaactctctgcctgggaaaatacctgatagcccggcatgtggagttacaaagaaagggctgttatccaaaggccggtgaattttgttcactttgatgggagaatcaagtccccaggagccttggatggttaggtcagagtctgactccttgacccaccaagtagaggaatggtgcctctgttggcaaatgattgttcatctaaatcattcatttttttcggctgtaggaaatctttggtctctgaactgttgaggtgggggcgtgagctttctagatctagtgaaagaattggaaactgttatattcgttttaaaaaagaagaccttatgcagtac

SEQ ID NO: 44725 - DNA, 501 bp, Homo sapiens
acaattcaaaaagaaagataaatggcagataagtccatgaaaagggattcagcatcatttggcatcagggaaatgcaaagactatttcactcctactcaaatgactgatgtttaaaagactgatcacaccaaatgtggagcattggaatgctcaggcattgctgagagaagtattaaaaaccattttggcagtttcctttaaaattaaaccctatgactcagtgtttgcactcctagaaatgtactcaagagaagtgagggcaagtgtccactaaacggtacaagaatgttcatagtgacattctaaataatagcctgcagactggtaacagcccagatgcccctttaagaggagaaaggatagataaattgggctgtatttatacagtggactgctacatactatacaacatttaaaaacaatgaactgataaggcaacagcatggacagatttcacagatactatgttgaacaaaaaaagtgagacacaaaatacttat

SEQ ID NO: 44726 - DNA, 2028 bp, Homo sapiens
ttaaaaggtgaatagttttgtttcgtttttcctagacggagtcttgctctgttacgcaggctggagtgcagtggtgtgatctcagctcactgcaacctccacctcctgggttcaagtgattctcctgtctcagcctccgagtagctgggattacaggcgtgtgccaccacactcggctaatttttgtatttttagtacagacggggtttcagcatgttggccaggctgctctccaactcctgacctcatgatccacctgcctcagtctcccaaagtgctgggatacaggcgtgagccaccgcacccggcctaaaaggtgaatagctaagtttctaacgcagagcacactgaaacacaacgtctataactttgctagttctaccactacaaaaatccattttgccaaactgaaagcaagctctagagcccaggaacggagaaaaattaaacgtaaggagtatttccttccctgtctaacatatatttgcatcctgaaccacacagattcccctcgtggcacagtcttcgccccttaacagagagtagctagtaccacccatactcgctgagaaactggaaacgagggagggtcgaagttaaaccctttttagtggcggtgcatgcgccccacatggtcttcccggcttgggaaaggaatgagaagctttcatgattctctcgcgagaagggaagtcttcatgccacgtcagagactagagatcctggcgccgagcgacaggtgccggaacaaacaggcgatgagaaatcgcggacgcggaaccatttcttgggcaggacttccggcggaaaagcgggctgtctcggaaactcagagccgggttcctcccgggtttctgccgggtttctccctgcggctcctgggttgttgagactcttgtgaagatggcttgcgctgccgcgcggtccccggccgaccaggacaggtgggttctgaggcggtgggtcctccgaaaggaaggggcttgctgtggtgctgcaggtgctacaccgcgcttctccgctccgcggcctccagaatggcctagctgatccaactcgctctgtacgggccccgcgcctctccctggcagctcgtttttctgaatcctgcagcagccaccaggctcttctcagggctcctgaaattccgaccataggtagcctagtgtttatctgtacgcgagacaaggattttgggtgctacgtggacatgatatcaagtaatataatcacagtgtgagaaatgtgttctttttaagtattgttgcgttcagaaaggctcatttgtgaaattttaaggtttttaatacctcggacactttatataagagggcgggcccattctcaggaacttttgacgggctgctctgtctaatgtaacagttacccaagtcgttttgtttctattcctgtggtttttttccatccaaggtagtggataaagtttatttttaaataagttaaagtgaggtaatttaaagaaataacattaagcaaataatagcataggtgtaccagcaatgatgacgactaccacggaccgaaagaatgtatttttgaaaatacttgttatctgttgagtgtagttgtccaggttcttggcgttttgaataaggaattgaacaaaacacacaaagcaaggcagcgaaagcagatttattttaaacaaaagtacactccacagggtgggagccggctccagcaagctacccaagagctgttggttacagaattttctagggtttaaataccctctagacgtttcccattgacctgtgccagtctgattggttgagggagggggatcaatcagaaagaggagtaggcccgcggccagtctgattagttgctcgaggggaccactccgaggtactttgatttttcaactgccacgcagaaaaaggaggggttgaaaagggagtacccatctgatatctaggcagcatgaattggcctttggttccctgccacccgacccttttctcctgcctcttactgctctagtgataccacttatgctattgtcta

SEQ ID NO: 44727 - DNA, 611 bp, Homo sapiens
gaaactccatcaagaaagaaagacagaaagaaagaaagacagacagacagaaaggaaaagaaagaaaagaaagaaagaaaggaaagaaagaagaaagaaagagaaagaaagagaaagaaagaaaaaaagaaaagaaaagaaaaaagattacagaggcagtggagtgagaatagctagagcctgggaggtcaaggctgcagtgagtcatgattgcaccactgcactgcagcctgggtgacagagtatgaccctggctaaaaaaaaaaaaaaaaaaaaaaaaaaattaagatgagtctatagaatacctataatgaagtataaagaaaaaaatgcagtcattcagtggtcaaatcttttggtgtttaattacagtgatctcatttaccactatccaccattttgtttttaaatgcaaaatggaagagtcagtcacagtcaaatataacaatgcggaatgtggacagacatccctacacttaagactgaattggtcccaacacacctgtgacctatgtcaattaacttcagtttgtggccttgatttccacatctgttacaggtggctatcaccctagcagcttagtctctaagaccccttttagctaacattt

SEQ ID NO: 44728 - DNA, 2331 bp, Homo sapiens
tttttatccctatggttgaagaaagtagcagagaccaactgaatgaaggtaaaaaccactggctttcttaggaagaactgtagagcaaaacaaaattcatttctggagaggaataattcctacttgaacgaatggaaaaataaaatcgtagaattaaaaaaaataaacacattgtagaataaaaacaactttggtaataaattcagatcctaatcgtaaaaattcattttttaagtagctcaattatataaatgactcacttatataaccaaggagctatatcatggagcatttttaaaggtttttgtttttacactagggtaagcatttcccaagtttgtctgtaacatgtggctttttcaaaataaaagaaaatgagaaaattctccctactgtctcaattaacgtaattatgaattaaggaagacctaattgatagggttttactctctaggtgcataaatatatggtgaaatactcattaaaataattactagacagaagtgctcagctccctgtaccttctgagatcctcccaccagtaaagggaggacgacagagtggtagcgctttcctgttagtgtgccaaagagaggggacactggtcaccaggataatctaatgaaaatacctctgggctaatcgtcaagagatagggattaagttaaggttccaaaatggtgaatactatccccaccccttatgtccaacctcatccctccccgccgagctttcacttttctcccgggaattgcggatgtgcagtctactgcagcagccctgcggggaggaatggaggaagggaaggggacggctgcagggtgtgtcacttacgagatgtaggctgggtagccaaatcctatcaggttgcagaggagagaggctccataaccgaacaccaggtacaaggccaccagtccgatgacacctggggaccacaaggagagaagtgggtcgggcagcatgagagccgttcacgcgggacagccgccgcccacaccgcgaggctgggcctgttgtaggagttttcctctcgactcgattaaaggagcgagaaaaacaaaccacacgaaagctgggcctgcgcgtccgctgggctatgccttgaagtctggggataccaggcagccccaccattgtgcctctcctacctcccgcagggggccccggcgctttgcgcagcaacccccggcgcccgggacggtcccaggcacccgcttccgccctctcgcagggcctgctgggcagcgctccagcctgggaagctgcgctcagcggggagcgtcccgagaggcccggactcccgcacacgctgcagtagcagcccccgcccacccgagaggcgccctctccgggcggagctccacggagggtcgggtaggaccgggtacctccgtcaacgcgcccgcccgcaggggccccgccgtccgcgcccaccgcgcaggacagcaggaatagggcgccgggccgcggggcagacatacgtcagcgctggcccttccagctgccagcgcccggcgccgcagctgccctccagccccgcgaccctcagcctgggcagcccccgcggggtcctccgatgcccacgctttccgggaggccagcctgatccctgaatatgctgcttgtcccgtctgtctccgactccacctttcccgagtcctctccctgcttccttccccagcagctggggcagcggcggctcccgtggccctaccagcggcggcgacccccggccacccaccaagagcgatgaagctcctgttcacgccggttttggcctcgagcttggccagaaggtcagtcatgcagttcttctcgtgcaggaaccggtcgaacctctccctcatggccgcagacatggcggggaccgtctcgccgctcggggctgttcctagtgccggatagactggagcggcgactgcggcggagcagcggcaggcggggaccgcggcgcgtctacgcgtcctccactcgcctccgctcgccccgcccggccgccgcgcgcccctcctcggccgccgcgcgcccctcctcccccgcccagcgccagggggacagcgccacaccctggcgggggcgggcctgcaactccgcggacgctgcgaggtggcctgcctgttgacagtcttaacccattgcggggtaaaaaggatgtggcgtgggggcgtgcattttgtgtctctcgtgggtccccttctcaaatcggactattgcaaaaagcaggcagaaaggaggcaggcgtccttgttgctcccgcctgcaattcactgcgatgagtttggcacctacattgctgtgctaaacctaaggcatttttgacctaaaaaa

SEQ ID NO: 44729 - DNA, 687 bp, Homo sapiens
ttaccccacacttccattccaattccgcatcccttcccaaaattctgattctgcttaagaccatctacatgtgctgtttgtacttggcttccagggtgcagtttgactttccagtctctcaaatatttttgatctggactgtttccatctcttttgcagggtgcttagtcgtgctgacagaaagttacatgggatataaaaatgtaatctcagggttgcttgaaaagtgttgaattgaaatgaagcctaagctgagtgattttcaaggttaaaggtcctattagagccattatatggaagtactgccaagcagatggttaagttggttactcagtgtttctttagtctgtgggacttgaggcgcagtgccaaaccctgcagctcagatctctttcaggctttccctgtgtaccctggtgactcattgtttttttaaagatgcaaataatgttagcgaactgtctaattcaactcttcccccttggacccatgagacagttttctgcagatagcatattttgctcatgatatatcaattttattattgtaaatcagagtgttctcaacttctctaagtgttggtggccattcttgtttgtgccaaattagcagggtctaagcttctgtctctatttccaaggttaccgtcctgccaatcatcttttgctctcatcacttttttttaat

SEQ ID NO: 44730 - DNA, 1656 bp, Homo sapiens
ggaatacagatcagagttcagcttaaatcagtattttctaagattttgctaggtgccagatactgagataaagtccttgtcttcatgtttggaaccaggtgcctaaggaagcacagaggagagccacctccaaaatggataccctctccaagggtttgtagtgaaagaggcacagctcttggcctggagttggtgggggctgcgataagtgcaagatacttggtgacaggaatcgcgagcatactcttgtgttgtacggattctcagggtcggccctgcagaggaaagagctcagtcaccgcgaggtcctgcacaacatgccaaagtcccggatatgtgtccggggtctacacctaagccccgacccctctgaacttcccagaagcgcgcaggaggcatggtgcgcatgcgtgtagccacctcaaaggcggcgggaagttggttttctgagtagcaactgagcagcttgaagacggattggaagtagcagaccaataaacaaacgtctcattggcttagagtgcttagagtcccaattcttcagcttcccattgggcctttcaagcgagcaggggcgtgactccgggggctccgccccgagccttggcccagtcttggggtccaaggctgagggagcgggacggaagtgagcgggtcccgccccttccccttctcgtctccgttggagtcgtctctgccgcggcttcctcggctgccagctctccggcgagccggagtcctagtgccgtaccgtcagtccccggccgcgcggagccgggatgcactgttcctgctgtgggtcctcatcatggagaccaaacgggtggagattcccggcagcgtcctggacgatttctgcaggtaccgcgctacccgaccccctttcgcccccgtcgggttttctcagtttcgcggacccccagaggcctctgggtcttcttccccgcccacgtccatgtcctcgctttccgctcccgccgctgctcgctttccatcgtcgaccctgctctccgacgacaccgcccctctttccgccgcagcctccctgtttctcaaggccctccgtccttccccgcagaacacccggaatttcctcattttttaagttactcaactattttgctttcccgcaggcgtagccgcttcgccggagcctgggtcttagcgttttgccgccgccgccgcctccctctcccattgttttttctgcctctgtgacttttccacgccgtgcaccccctcctccctgtgtctcattccccgattctgaaggaagacccccagggtagtaatttaaggcttaggatcccaggtacgcggacctgcgcaaggagcaaattttcggacttattctgacgcctgcgtgttatttgtccgtggcgttctctgtaaattcctgtaaggaattactttttttttctcatccctggacttgtctttgggggagagagggaaaaagtgtagcgctgcttttctttttatccttaataatcctattttaaaggaaattctcaaccgcggggttttaactcagggtgtatacttcagatgagaaattttctgcattcttcccccttgtcaactctgatttcagatagccaaacacgtgtaggatacttaaaaatgcttattttccgaaggtaaaatttggagtgc

SEQ ID NO: 44731 - DNA, 1191 bp, Homo sapiens
aatttttaagcactcccagggcagtgatactgaaaagactgcttctttactgccactaagtaatcaccaggattatcactcttaagtattctggatttaataaggaaaccatttaatttcaagatttaaaatgacctagattgccaatttaccttagttctcaagaactgtattaaacagcttcaatcaggcaggactaacatgataattcaatttattctggtttgccatacacaagaggaatggaattaagcaacagcggatggggaacggtatccctatttcttcctggttagctcataagtctttcaaattcttacaatgctctcccactaaagattggtaggtcaaggcagccacaccacactcggatgtgactcaacagtccattctgccactgcagaaccaattctgaggccaagtggtttccatggttttgccctggtcattctcctttgctttgttagcaactccctcatcactggcatgacacataagagagtctttgccaacaggcaaaagggcaaactgaaactacctcttttgtaagacttgaaaagaatccataaaatggggtatatggtaaaattactctaggtaggacagttaggataggatgtagggatccaagactgagcacatttgcgaagaacataaataaaactaggcaaccatcaggaagatgatctaaatcagcatgcctggtcgatgccaggaatggctctaccagattgcctgtgctgtttccagtagctccaagtgcctctaggatgctgactcaacattccagaactcccttctgtggttctctgcagcacaggcctgcatgcttggcagccacctgtgacctacttgccattctgtagggactgctcccaggactcactatgtaatttgcaaggtccagtgtgaaacgaaaaagtggggtccgttgtttaacaatattaagaatttaaaacgttgacagcagagcagtgaagcaagtatggcacctttctaagcataaggcccatgtgaatgccaggtcacagccatgatggcagctcagactgctgtgagcactcctctgatgaccaaggtggtaggaacttccatccccaccagcctgacggtactgctctatgtcacaatacataagccaccttgaacagatctttggaaagagaagtgaggagtagcacctcctccctg

SEQ ID NO: 44732 - DNA, 738 bp, Homo sapiens
tgtgtgtgggcaccatccaactggctaggggtctggatagaacaaaaaaggaagagaaaagacaaattcactctccctcttcctggaggtagaatacttttctcctgcccgtggacatcagaactcttcctgcccttggacatcagaactcctggctccgtagcctttggactccaggacctgcacttgcattcccccaggttttcaagcctttggcttggactgagatttacaccatcagcttctctgttctgagcttttcaaacttggactgagtcatgctgccagcatcccaggatctcaagcttgcagtcagcctgttgtgaaacttctcagactccataatcacatgagccaatcttcctaataaatcccctttcatatctttacagatgtctatctgtctctacgttctattggtttctgtctctctggagaaccctgaataattcagaggccaaaccaatttgctggagtgctgagggctggggagatgcctaagcctcaggagctcagaggacaaggagagcctttgtctcattggtctacacgtctaagtgccttccagccttgcagggaatcccctcgaggaggggccagctcatttacataacaaaaactggcagaatttaatatgacatctccacagatgtagtcttcctttaaattaaaggcaccaataaatgtttgtagtcaagaagctcactgcatttcaaagtgaagcagtttggtcattac

SEQ ID NO: 44733 - DNA, 2506 bp, Homo sapiens
tgaatcttctttcctttccaatcactctaacccagccaacaatagtcccaactcggatcactttgttcccagaaaatgaagagaatgggaaagagattaggtagaaagaaaacaacatgaaaaaacagtttcatggttaaggacataggctttgtcaaaatgcaaaaacaaaataccctggacttgagtattagttcagctttgggtaactcgtttaacttttctaagcctcagtctactcatctttaaaatgggaacaacacccactcattctagttgagaagattagatgaaatatttcaggcaaatcacttaaccacaacatcagctggcagactgttagccacaagggtcgttgcaatcttcttttttttttccctgagacatggtctcactctgtcacccaggttagaatgcagtggcaagaacacaactcactgcagcctcgaaatcccaggctcaagtcatcttcccacctcagcctctccagtggttgggaccacagtcaggcaccaccacgtccaactaattttgttgttgttgttgtagagatggggtatcaccatgttgcccaggctggtctcaaactcctgggctcaagtgattctcccaccttagcctctcaaagtgctgggattacaagctagagccactgtgccttggtccactgccaccttactgaccacaattatcatatgccaccccttctgcctgctaaaaagtgtcaaaataaaatcaggctttgaaaacagtggtacgttactatcctatctcattttcacaagtcctgattaagcaatcagaatgattcaacacattggagcctagatcacattaatcagagtaatctagagtctgcctttcaacacgtgtaattgaatcagctgctccctgcacccaggctgggccagcaggtaagcaggcaaacacattcatcctaaacagcctggaaactggagtagcctcatgcccgctttgcaccctctgcctcatgggtcctcatatcattcaggtaagagacagtcaagaaccaagcgggacatacataatgaccccaaaatcaatttccataaaaacgcatctcaatagtacaaaagagaggaccaaggaagttattgtaagcaaggacacacacaaaggtcatctattcatgatagaaaaataatcaaaaataataagtttttgaataaattgtgtggcaggaatagaataatcctaagttgtcaccaaaacagagaaatatataattaacttagcaatcattatttcccacatgtatgactcatttcctaagttctttcatgttggtttccaattgtcccccacagatcacctattctcccccatccactttctctttcctccttttttcctgtaacccttagtatgacctgacatcatatcctaacatttttttttgttgactcactgcccccataaaattatgagttccaagaaggcagggatgtcaagaggctggggaaatagctcatgaacaagaagaactgtacctggcacatggtagaatttcacgcagtatttgttgaacgggtaaagttagcaaattagaaaatacagataaaggaacattatccttacctcttcccaccaccactatgagatgatatcacctgcaaatatctgtcagacatttctgtaagtgtaactacacttaagatagtttatgcaaaacaatttttaatatagtattatttttagccaaaatatctaactagaaagaagtccaaaaatacatgtaccaaaatgttaacaacatccccaggtaatctctgtgtagtgtgattacagatgattttctttctcaggtttattgtattttttctataataaacatatattagtattatacaatttttaagtgttttcttgaccctatttacaaagtcttatgaagaatacaaataaataggtaatccttgctctcaacaagctcccagtgtattcagagagataaaccaaggattttccaaatctaggagttggaaagatcattaactgtcctcttatccaacagtccagccagtgccagaatcctgtctacagtgctgcctgcaggtggtcactatgtctatgtgctaaaaagctcggcaactcctcagacagccaagcctgctcactgttggatagctactggcatttgcaaattttaccttacatagcaactctgaaattgcctccttgcaacttgtcccattggtctagttccacaagtaggataaaattagctctcttttatactccaaactctccaagtaactcactctatcagtaagatccttcctaaatcatcaaacctccagaacaatccttgatcgcccaggggcccctaggatgtcaatgttccttttggtaaatggtagccaggaccaagcacagtactccagatgaattctgcctagctcattcttacgtgtcgatcactttacaagagttttcatagaattctcacagtaaaccgagataggtgctacaatgaactcatttc

SEQ ID NO: 44734 - DNA, 1290 bp, Homo sapiens
ctcagacatctgaagacaactgtcaacagaattctcaggaaaagacatctactattgaagctctagcatgttcctcaacacacagagcaagacactgttctcaaagtccaacagctaagggtgacggctcccttgtgctccaggcttgtaccaccagctgctgaccacactgctgcacccagaggatgacacttgatgtggcccaaactcaacttcccttctttccctgcaaactaacccaccccgtacatccagcttgctaggcaattgaactgtcacccagttcaattaaatgaacaaatatgggccatgagccaagttctacaggcccatttacccaaaccagagacttgggtatcctttttgaattcttcctccacgtccctcttatcgatttctgttgatcttgcctcacaaatctttctggaaaccatccactcctccccatgccagcatcaccattctagctcagggtccactgcttgtctagattgcaggaacagtgtcttcactggttccctacatctagccttctctctaaactgttctccaaaggaagcgtagacactctgaggtgcatgtctgatgacatcatttctcttgctaaaagagaaatataaacaataacaactcttcagtggctgcccttcgccctcaggtaggtccaaattcttttaaatggacctacctgctcccacccccacaccatcttcaggtggcctctggaaagacttcttgagtcctagtggacccctctcctatgtagcctcctagttcccataaagcttctaacacactctttcggtggccttgtttctttggtctcctctagtagtctgtaaactccttgaggactagcattttgtctgactggtttccaacagctagcactgtgcctggcacaaaggaggcactgaataaccacatgttaaagactaacattgactagttcctctaacatgggaactatgataaaagctaaaccaggcgttggaggtcattgtgtgccttgtgcaatgacacaatgtggactttcagcaatggttaggaaaccatcccaacaaatctctcaggtacataaccatggaaaatctagggctagacagtccaatgacttcagtcacacaatctgaaaacaaaaaggagcactgaaatcaatgatataagtctgcttatgatgataaacaatgttaacattaagtacattttgccattaaagccatttcacataaagacattataccaaaaaacaaaattgttatagcaattagatttcttcatgatcctttc

SEQ ID NO: 44735 - DNA, 916 bp, Homo sapiens
aggaattcctcctctcatttgttttttttctaaggaatgattaactgaagcacaatttgggtaatagttgttatttttctatgaaagtgtattttgtgacctattcctgtttttgtccagtaccacacctggggatcatctacctgccagttctacctcatgtttacaggtaccactattcacatggtggcagctgcacaaactgaagaaacagcacttgggaaaaattacgcaggctccagaggactcctatagatctaagcttataaagtaacataaacatcatcgtctagtcctgtgattggcggaaaacaaaaaatggtcatatctgacaaattactgaatctgtcttggatatgtcataaagaaatccaggcatccagcagggggacatggtgataacctaacttatccagggcttgtacaatacttagtacatgcaaaacactcttgagaaacgtctgttgaatcagttaaagtccaacattgccccatagaagagagaaaaacaacaacttgacactactcaaaaggcctcctggtctgcgtgggggctcactccctgaataccgacaatttaggaggcccaggcaggaggactgccttaagtcaggagttcaatatcagcctgggcaacaaagtaagaatctgtctgtacaaaaaaataaaaactaaccgagcatgcatgtgtgtagtcccagctactcggaaagctgatgcaagaggatcacttgagcccaagagttggaggctgcagcgaaccaagattacatcactgcacttcatcctgggcgacaaaggaagaccctgcctcaaaaaagaaaagaagaaagaggaagaaaaagaagaaaggggaagggaaagggaaaggggaagagaagaggcctcctgattccctatgatgagtgatgaatgc

SEQ ID NO: 44736 - DNA, 657 bp, Homo sapiens
tccacttactttgaatagacaagatgtgctaatccctgaaactggacacaaaattgtatgagtgtattttttctgggaggaaagtttgctgcttccagattctcaaaaggattatctaaaaagagttaaaattagggttggagagtgaaagaatctgaagcagcagcattgcagcagacactgtgtgccatgggccatagaataaagtctcaggatgctctggtagaatggtgaatggggtgaaggcagttggattgcatcaccacgtgaatgagatcattattccccaatgactgccagcttgctgaagtaaatgaggccaaggagagagaacaatgcaacagaccaccaaggctaataccatcctctcctctccatgcctgactttcacaggaatgagtgacaccactccaaacatcctgaactttctgaagacaaccctgaaacccaagggggatatttttctggcttcttcccggtgaaggctattgattttgaaagataaaagtggccaagcaacacatatgggtatctgaaacagaatttttatttttaggaaccgtgtgtgagacactagaatgatggctcctagctggggagaaagggcatttcatgagcacaggtggaaagagttttgccatggatgaagtgacaagg

SEQ ID NO: 44737 - DNA, 3571 bp, Homo sapiens
atgcaggaaggttggtttagtaaaggttcattaatgcccaagacaacatgcctttctccttaaaggggaaaagtcttattctgctagagggctagattaaaatcaagcaagtttttacacttaagctaattgagaccaggggagccaggaatgaagtggtttcctgtcccgccatccaagtaacacgctgtcaggcaggctacactcactccagccaataaaggggcaacggcagcaaggaacgaccccacaaccccattttcatcgctcctctttccctcccagtttttactggctgccagcacaacccagtcaacagcaagctttcctttaccacacaggctttcctccttccctgaacctgctcaaccccagcctccattacaaatttccccattaaccgaagccaccaaaatctgctgtctgccttccttgccttagacacttctgaatgaattgtgattaactgattcaatgttcagttttgcaaaagggggaaaaaaaaaaaggaaggatggggaagaagctcaaaacaaataaagcaatcccggggttgtgctggagtgcacacggagcttctataggaaatgactttttactagtcccttaaaaaacttgcttaggccaagcagccactctttatctagatttgccaaaatctgttctccaggactgataacctacactggggtagctccgacactgggtttactttgaaagattttctccagttaccgccagctgcctatctgtttcgacaatacgtacatagttagcctacaggatcatcactgtcattcttttggacatgttcatttattagcagtcattcagatacgccgacagtgtatttgcaggggacacaaaaacacacacgcttatacacacatggtatgttagatgtttaagactgggaaaaaacttaagtcaaacaacacataattagcctctgcttgcagagatgagacagtttatcagactttatgacttctgttcccattccccagctcccccatataccttctactttcccctcagccccaatgcagatgaaagtttgccctttatttaaaaaaaaaaaaaaaaactttttctaggggtatagaagcttcagacttttgaactttatggcgtccgtgttagaagagtgacttgacatattctcaaccctgtttttcatcaacaatgcctgctcactgccaagtttagatgtgactttaaattgcacccaatccggcaaaataatatttcactgctggctaccagtaaagcgcatacaattttccctttcagaacttctgagccaccaagccaggaaatcttttggtgaccactccccttcccatttgtagagagaagccaatactcaggaccaggggctggacttggggaatacaagggttcctgcatttcagccagggctccctcttgccccaccgggaaactacccaggggcctgaacctgcaagaggtagacaggcactgtgagctgggccagttgccccgcttgtgctcctaccttgacatgtgctctggtcctccttgcccaagaggtgtggggatgggtgtggtggaggcacagtccggggttggtctcgcctgccgcacgcctgttcagtagccttttaatgaactcagtgactcagcgctgtccctcccccaccggcctcggatctcattcctctcaatcgcactgatgcccatgtgacagcacgttgtctccaccgagactaatcccttatcaataagagctttcagcacggcccagaccagattactctgtctcacaaccactttgctgacctgcccggggggccaccgaatactccccgagcgcatactatttacagaagagtcaagataagccggatcacttggcgtgattatttcgcttccaaagtttgtggctttaacaaagcaaacccacattcaaccactcaaccaggcgccgtgcaagccaccagaatgaaaaaaaacaacgctggatcttacacacatgcagtaatcaaaatattacaaataaaggctacatgtgaaatgataggttaagatgcgctctagacaccagatgtatggagtttgctattagatttctttgccatagatccagcgcaaggcaacatggcatttcattgtcagattaatgtggacataataatttataagaaggctttaaaaaaagtcaccaagattggtccttaactttgcccattcagattcttaagagcaaaccaaatttgaggagagatgccggacgccaaactgagtacaggctcaatatcccctattttccgtccttccttttccggcaatttttatcccactcatctctatccacagcctttctgggcagctgagatgaataagaggaatgagtataaagcctacaaacacggtcaaggagatgactgggagtaactacatctgtgcctagagaatggtcttgacggtttgcaagaaccgtttcatcagcattatgggcaagaacaagaaggccaaggcatacttaaaatcatcacaaagcctctttctagcactaaatgtgaagtaatgaagccatcacacagcagatgaaggcctttgcacacaaagctctcttcctcagaaaagctctattgattgatcttgaaatacagatttttagttctaaaactgtgtggatagctagttaaaattcactctctttccctccgaaatgcattaaaattctaaaacatgcaccaaattctaaaaattaagaattctaaaattctaaaatatacaccaaataaaatttatttttagtattaaaatacctgatgctcatttcatcaagtctctgttctctcgtctctgttcaacgcagttaggcagatctgagggtgctgcggagagtatctgaggagaaatgccaggcagagagcgagcaggccctgagctgcagagacaatgctccaggcagaaaaccatggctggcaggaaaccaggagaaattgtgcaagcgaagagccattccaaagctgttctctgtcccacggttatgatcacaggggagggtaattgcatctacttctgatcatattaccttttgccatttgtcagatagcagacctcaaattcaaggtggattagtctggaaaactaaacaatcagttttgaagtcttacttttatatccatccactgatcaatgcaaatatgaatagtacagaaaacagtcaaacacctaatgaaaagtggaaccctgcagtaactcccccgtattcaacagatgacagggctaatgcagggagtttggggctatggactggttttatagccaaagccacagataattccatcaccaaagactgcttcctacttttggtgaaggaagcaggtaatttacatgccagtctcagttttttcctcctttctctctccctcaccccctgccttactggtatttttctctatgagttcccttgatgtattttgtgttggaggacccagcctgcagctttcacaggaagggctgatgcagtgagaagagcaggatctaagaatcagaggaggtgggtttgagatctagaataaacagttaaaggcctaga

SEQ ID NO: 44738 - DNA, 968 bp, Homo sapiens
ctaaacaggactgacctggtggtcaggtatggaatgtgggcttgtatcatagagaaggtggacaaaacaggatggagaaaacaaagtctgagcccctgctctgccatgtcccttgtggggcttcccttcctcttctaggctgcatttgtaaaatctgctctgtgtatctaccagggtcaacaggaaacttaagcaatgcatttgaagataaatattacaaaactgacgatgctatcagagggcatgttcttaccagtctgtccaaagactatgttttaaaagcatgaatagctctaaagttgaaagaaagtcttaaagagtatttttatattacactatagaaaaatatcttatttgctttaaataacgggaatctaagtttcaagtcagcagattagaggtgagcgggtagcgaaaccatgaggggtggcatgggtagatagagcattctcccaagtaagatgactgaagccagagctgatggggctaacaatgacgttcagtcaacgcagtgcatagaccagctttggaggccagggcatttctatagaaggctcctgaagccatgccacagagatgggtcctttcctgttgcttcactgcctagcccctttgtgagcatggtgagaagcctgaaggtggcagcaagcactgtgtgctggcatctgcagtgagcagtgacagctacaccactggacaactcaatcctgcaggactgctccaagactgaagttcagaatgacaggtcactacggcttgcagtcattgactcccaacacctcattttacatacaggaaaactgaggcctggcagcaaggtggaggcactttcccaagaaaggcagcatccaagctttactgagtgccctggtcctcggatgccccacccagtgtatactcactaccttgggatgtttccccctaactggaatcctattgttcacccatttgctcatatgtgtaatata

SEQ ID NO: 44739 - DNA, 1116 bp, Homo sapiens
ttgcatgacatgactatgacggatggccagggtgctgtcgtttatcttttggagtgaaaccggagaactcaggcagagcccagtgagcacttctcatgaaaatgctgtcctatctaatcccaggagacaagagaaacactgagaggtcagaaaggacatgagcacatgagtgtgcacaccacgcctgtatgttcctttcctcttccaacacattttcggggactgaggaagtgtgccgcacatatcccaaacagaatttctcagtattttctgcagtttgatctgtcccatgctgaccagacactgtaaatagtttagtttagaaagaagccagaaatcctaagtgagcatctggctcttaagaagccagaaggatggttgcacgggggtgggggtgaggtgggaaactggggggagtatggagagtgggggggtgggggagccctttacccagcttctcttactcacgagcactggcgacaagcgacattggcttatcgcctcagctaggataaataactctaaatgtgtgctgggtaggagctttcatgccctggccttcaatagttttattctttcacgtctctaacgtctgcagcttcctgagattggctggtatttttgtcactgggctttcgggctgggggctgggcagagctgaatgtcaggcaagggtaaagggcacctgtgatctgctgagtgcctccgctttctcctccttgttcctgacattaccgcccgctcaaccaggagggcagaaggtgggtcagaataatcagttaagtgtattagggttttctcctccttcactacaaatcccacaagtgcaactaatgagacaatgcccagaggtagaaatgaacttcataacaccaaagtacgggtgtatttcaatttatgcgagttaaaaaatgttaaacaagaaaagcaaataagtctcagagctgttttttcacattacaaatggaactcaatacagattttagaatataaatatcctctcaggcatttaaaataatgtgttcacaaggctttgatttgcacatgatgttggcaatatcttttgtgcaagatagacttggggaaaaaaatcctcagttttaaatttttagttac

SEQ ID NO: 44740 - DNA, 646 bp, Homo sapiens
aatgaaaagaggcactttgctctttagaaacaaaaattaagtgattccgaaagatatgatttttcagttgtaagactttgtgaggtaaatatccactaaaaactgcttcctaaagccagcacacttcgctgctgcaatgcttttttaatgcagtttgtccctgccaaaacttgcattgacgtttacatacaaagcattacacaatcttccaggagacttggtttctctatataaatacgaaaacggcatctgcctccctccccagtgatacaatgagcagagggccttagtcacgggtcaaacacctaaagtctggcctggtaattattagctcccagcttgaaaactagctcactgaacttaaaatcttttcttcctctcaaaggttagttaggatgctggccaactatcttccagaggtcttgtgggattaatgaaaaggttaaaatattaaggacttacactcaatgagagctattctcatccatctcagctattataaaagtaaacactcccccttacttccctgtgatactctagggggctgcaaaccacagcccatgggccaaattcacctgccatatgtttttgtagagcctacaaggtaaaaagaattttcccacttttaaatggttaaaaaaatcaa

SEQ ID NO: 44741 - DNA, 2369 bp, Homo sapiens
agcacagcagcagcatgacacttaagagcaccaggcagggcccaatagcattcaccagcccgacggcagacctcctaggtttcccccaaccccatttaatcccccctctttcccatcaccaggtgttccctcacacacacacacccccgcaggggctccatccctgcatttttcccttcaccattggtagtctgacatcaccattatctgccttccggctgcttttacactgttttccttttcttcctctttcctctcttcagccatactcaagaaacacggactacttatgctacttttgcccccataaatggctcagtgatggaaccaagagggaaacccacagacaccaagcctctagctgtagacactaagcacacagacttcctcttcttttcagcacccagttctacgggcttctcatcacttttcaggtattcaaagctttgagggatgtgcccgaagcatccctaaaatcatgaaaaaagatggctttgggcatcttaccgctcacacatttgcatagtgtttgatgtagctttaatttcaaagctggtctcaaacactcaagtggataggttacagtgggagcccaggaattgcaaatgcgcttgcctcaaagactcaggagtccagatccgggcaggaaataaagttctaaagcggctttgaagtgctttctccccagacccctccccagcgcgggtcattcatctcagcctagggaagagaccaccttgcctgaacgtagccaaacgcatcgcacgtgggagccaagtgggagatgaaataatccaatgcgtccccctcaccaccaccacccccaccaaattagttaccgtcggcttaaactcatcgggaatgtccgtgtattttaccgatcagggaaataaaagggtgtatataaattagtggaagcgggtgggaaggaacaagggatgcagactgtcgtgagtaaaacgcctcgcggcttggtgagaggttgtttcttttttaagccactcatttcagactgaaatatcaagccagttcaggtcatttcctgagtagcactacaagttaaaacaagatccagaaaatctactaatcttcaattgcgctgcctccagactgggagcacagggggatagggtgtagggctgtggggaggtcgaggggagggggatttgtggaaaagcaaacgcccgagaaaccctagctcccgacctcagctgtttcttacctcactcagctcggccgaggagtcgtttccatatttcatggcaactccggaattcatgatgcacttttcagagctgggctctcagtcccccaggtctcggagcttaagagttggacttcacaggctcaatatccactgcttggtcccttctgccacattttagtctagacagccattttcacccaggacagttgcgaagcgcaaacggaggatgcaggcactcttaaaaagagcagccgtggctcgcgtttcacggacgagccattgctgcaggaggctcggtggcgcggcgcgctcgcagctgcggcagcggcggagcccgcgcggggaccctcccgcgcgcacccagcgccccgttccggggcagtgccaccctgggcgccgcctcgccactcctacggtgcctcgccgccccccattaccaggatggagggcacttcccagcacgagccgacaccctagagggcaccggcgagctcccgaaaaaactagggcggtggggcgaggaagatccgcgcctcggattccagagaaggaaagaaagctagagggagccggagcggagctgcacttcacgccgaagtttccccttcgaatcgtctggagttgtaagtggtttctgattgaacacagctgtctagctgctggccacggggtgcgcggaggaggcggggctagagggagaaaagggtgggggcgagtagcctggaggccgagcagaggagaccgtgctgggagagcagagcaggcatccttccagttctctgcaatagtaattaaggacccgagtccaggagggggagtagaaacaggaaaagccacctgaataatcgtgcaggaaattaaaaaaaaaaaaagaaaagaaaaagaaaaaaaacttccctcataggagccgctttccatgatttaataaggtcaagacaaacctaaacactgtacatcagacagcacggtgcacttctcacggaacattaagattttacaagggtgcagggcagtcattttccctaatcagtctaaagtcaacgctacgggtgtaaattcaatgtcaaactccctctgtctgtcactggggcagagtacattttctgcatgtccataatgaagatagaggccccatcccttgaaagatgtcgataggctcccc

SEQ ID NO: 44742 - DNA, 762 bp, Homo sapiens
tatttagtcaatgaacatttattgagaggtttcagttgggaataaataaatgattgagagattaaatgaatgaatgagcctgtgtcaagcaatctgattggcactggagagacacaaacacaagattcctcctcttgataagctcacagtctagtggggaagagagacacacaaaaaacagacttccttgttaacccagagaaatatgagcaatgtgctttaaaagtgtagagaaggggcctggcatggtgactcatgcctgtaatcccagcactttgggaggccgaggcaggtgaatcatgaggtcaggagttcatgaccagcctggccaacatggtgaaaccccgtctctactaaaaataccaaaaaattagctgggtgtggtggtgcgcacctataatcctagctactcgggaggctgaggcaggagaatcgcttgaacccaggaggcggaggttgcagtgagccaagatggcaccactgcactccagcgtggtgacagcaaaactccgtctcaaaaacaaaaaacaaacaaacaaacaacaaaaacgtgtagagaaggaacatctagttctgtgaaggccaaattgcactcactgaaagcaaagtgagcttgaggaaattatggctcctattctggcccgagagttcctgtcatatctgatagcggtggttggggaggaaggagggttggagatatgatggcaatggcgagctactaaggaaaagagatctggagcactttctactctggaagtccat

SEQ ID NO: 44743 - DNA, 2013 bp, Homo sapiens
atataacaaatatgagatcaaactcaaaattaagcatagagctaaaaatcttacacaatgttgatgtctaacagcattcaaacatgttggctctaggaactactggatattgtttaccaggcttcctggataaactatgggatatcattgtacaagccacagcaggcctctccctcttgcaaaactttgccttggagaagaccggctggaagttcttagtgccttgcctactcctgggcaaaccccaatggccatatgaggccccaaagttatttcttagcataattttatcctgggcttctccttacttctatttaaaaacacagaacaacagcatggctattacagtaccaagatcatcaccataaaatactaaaacccaactccatgtgtcaaacagaatgatcaaaagatatttgtgcattcttatttcaaagatattttatttcctaatcttctataatttgactcactagtatgcttattagcgtatataaacttttgcaaaaattcaaccagtatcctggctttttttatagcatgtactctgtctgcccagaaaaaacccacattcatgcattcaagcctactatgtagtacacacacacacacacaattagttgtttgtttttaaaaaactgaatttcagtagcagagagggtaagggatcctaagtggcaaatatatagaaactgaaagaaatgcaaattcagattcatgtcaggaaacagattttcaaatggtgataacattgtacacaagactgtttaagaaaatgcaccagactcattgcaaaaaaaaaaaaaaggctgtttaaatgtcatcttgggaggaacacagtattaactggcaaagcagggtgataacctacaggccctctacatgttccaaatatttagacttctgaggaaatacatgtttattttagaattaggaaagcatactacttatctcttaaaattttcaggaaccagcaactggtttaattattagcagagttccttggccaaactattgcttccaaaaaaggtgatatcctcacatattaaacattcctttttgcaatcctaaggcctggcacagtgactggcacaaaaacactgctaaatgaaaaccatgatgggtaaattagtatataggtgagatcttgctcttaaatacaatataatgtggccagaatttggaaatgtgaagagagagttgatgtgaataccaattgtttcaccttcctctagcagagtaccaatgtaacactcatgatactttctcaaatatttccaatagcatagcctacactttcttagttgacacaattgtttgttctaattttctaaaggtacatttttatgtaaaaggaaaagcataggcatgaaacaatattccactacacacttgtggttcagtaatcattttgctgttttagtgaaatatcctcagagcaactgaaaatgctaaatataaaggaatgaaaacagaaacaaggataataagcaatttctatttctactgaaatctgaaaatatagaatttctgtttttaatttgaagtctagaaataaaaccaaaatatatcttttctatagctgagtctaaaaaccaagttttctttgtaaaataaataggaaaactttttttttaataaggaaaagcattattctccaggttataccattttaatacatctgaccccaatttttagatcttggtttctggaacctgaagcaactggttctctgctgattgctaatttgagggaggaaaatgatcaggaaggaggtaaaatctaagtcagagctcggccttctggatctgagaggaaatgcataaaccaggcaagtgcggagcccacattaggaaactcccaagggggatggtgatgttctgtagttaaaacttaaagtcttctcaattagagaattgagagatagcttctcaattagaaacacctcagttctaagaagatgctgtcttttattcctgaacttgactgcataaaagcaaatgctccctattt

SEQ ID NO: 44744 - DNA, 1608 bp, Homo sapiens
ctaaaacataactgtccttggtgatcatgaagaagggggcagcagtgcagtcatctaagtgacttttgcctctgtcaaactaaatttggcctgaattacataaggacagttgagtcctcatgtaattaattgcagtctaacttagcacataaactaactgaaagcctaacttaggagtatagttttgtaacaaatagctgagtctcagtcaatcacaggcagccagctgatcagaccatattcaaataaggcaaatgccaagctgtaatcaatcaagtttctgtacctgacttttgtcctgtccataaatgctgccgcccatgtaatggagcagagctctctgaaccgcttctggttctgagagctgagtgattcctgaatcattctttgctcagttaaactctgtgaaatttaatttgtctaaacttattcttttaatacctctgcacatacaaaatacaagaatacattcctgtaccttttttctccctcattcttaattcatgactttattttcaaatacaaagatgcaaagatagaaaaccttactaccccaaagtaggaagtatgtttcctatctctcctttgccttttcttcaaaaacgcaaaaagtcattaagatgttaatgctgagataagtcattggaagaaggatggaaaagaaactacaagaaatgatagacatggtgctgccaagcagctactctgtttttataaaatacttcagacataaatggcatttgtattctgtgacgaaaacccctcttcccctcccctacacaaaaggaaaggcaaagaaatgcaaaggaagtggtaattgccaggtgtctagatatgggaccactgccctctagtgtacttgaaatttttctaaatccctttatcagagatctttacctgaaagatagtaggaaacagaataaaacatgaacctctgttgaactatccaatagaatcattttaaaaaatactgtcaattattaggagagtgatatgacggcttcctaccacctcactatctgttggtgccaacactttcttcaggtcctacacatggacctgaacaaggtttcagtccaacagattgccaaagggcagaagaaatattaaaagtatttcacaactagtgtggcatacgcactagctaaccagaacagatgcccggaagatgccagctggcagcaattctgcctcttccctttgcagggccagcattaaccccttagatgctgaactgtggagaggttctgggttcctggcagagggactaggtagccaagagagtagggggtctgggacaaaagcatgtcaatatttcaacgatctgtactgtggtgttctggctgaacattcactctgctaagaggattagaagacatcagaaaaataagccagtaccgctgagcagagcagaagagtgactcagcgtccactagcaaagatctgaagtagctcttcctcccagcagctgttccttctcttgccaataaccagggacatcctctagaccaggacaggggtatagtagtgttagtagcggatgtcaggaaatctaccctacagtcttggttctactacttttgtgtgtccttaggtggatattttgat

SEQ ID NO: 44745 - DNA, 710 bp, Homo sapiens
gctccccgcagccgctgccgccgcggccgccatcatgcgcccgctccctacttgggaggaggagtacgcgcgaccgcagctggaatccgcgcggcgcgcaagctgcctgcagccccgaacttgcctgacaacggagcatgcccagtggccgccggggcgctccgggcgagggattccacctctccgggttttgcccggactgggaagatgggcgctctggaatcgcccgaggaggcacctcagggaagagggaggaggggaaggtggctggaagagtcagggagctaagggtggcaacgggaacacaagaggaggcagaatacactggaagcccccgggaagggtgtcagcattgtgcatccggcaacgacgcgggcccgggacacttggggacgcttcaggcagagggcaggtgtactcccggcagaccttctccgaccgcccggagtcatggcttccttttccagagaagctatataaacactctccttctgcaaactcaaaacggtgcttgtaatcccactctccaggattgttccgggttctgtacccatagccaccaatgagaaccggaatgactggcctttttatgaaattttgacacctgtcaagaaacctggccctcgcagccctcatcttggctcccactctgtactgggaagagtctgcacgctgtgtggcattgtgtacgttgggtcaatttctggaaa

SEQ ID NO: 44746 - DNA, 524 bp, Homo sapiens
atcctacgacttaggaagtattaatagataagtacctcatagagttatcttacatataaaaggagagcagacataatgcagttaggacaatgtctgacacctagtaagtgctcaacaactgttagctctcattgttcccaatttacaggtaagaaaactgaggtaccaagacctgctcaaggttccaggtttagtaagtgttagggcagaggcaagcccgggcagcctaactccagagcaggagcctttaaacactgcactattcccccatagccaaagggaaaccacagtgaagcaatttgtggtttcgtgaatgactcattattctgtcctggattttctgccagagaggcgtgtgaagttctctggtggttttaaaatatgtccacagattctttggtgcacccctcatcaagaggtggagtctgttgcttcccctaaacctggattggacttgtgactgccttgacttctgagactaggttagaaaaggcaatgcagattgcacttggctctctcccttg

SEQ ID NO: 44747 - DNA, 1774 bp, Homo sapiens
tgaactatgtaaatatgtactacatacctgcccccactcagctaccctgtgtagcgtgatagagcaagggtggcatacttgcattaaaatctcccattcagaaaagggaagaatgcaagacacacaacagtggctcattctttagtatatgtattttttatgatatttttccaaatattgcatgggaaatatatacactaaaaattattcgtttatctgaaatgcaaattattaagcattctgtatttttatttgctaaatctggcaaccctcctcccactaaaatataaactccatgaaggtaggaaccttggctctctggttctccaatgtacatcgaaggcgtggcataatgccaggtccacagtagaagcccatacatgcttactgcaggaattaatgaaggactaaacgaagtagcaagtgagtgaataagaagatgaggagcgacccttggtgggcggcgcgggaagagaaccgcaccatagctccgcagacagcctcctttaggcgcgcagcggcggccgcgctgaggtcacgggcgccggccctggtgacgtcattacgcccgcgctcctcgcctggccgtgatatcaatggcgcaggcttcacttctgctgtggcggtgactgaggcctttctggtgacctcagcccaacacaggccgtctccggagcttcccggtagtggccccggattcccacggtctttgtcattggctgtcagctagcaggcctggccgctcccgtgcggagagaccatctcttcagggcaatgtccaggccgagcagcgtctccccgcggcagccggctcctggcggtggcggaggcggcggcccctcgccttgtggccctgggggcggcggccgggccaaggggctgaaggacattcgcattgatgaggaggtgaagatcgcagtcaatatcgcgctggagcgcttccgatacggggaccagagaggtgaggttccggacagggaccatgctggcagtcaggatacccccctcaccccagcgccccccaaacggcggcccaccgagtgatgggggtgcctccgaagagggagggaagacccgggccaccgtccggggcgggcctcagcggcggcacccgggtctggaacgcggctgttggccctgcggtggaatgcgaggtgctctgcggatcaatggggttatgggcactttgctccctagctgaaagtgtttttcccccgcgtctttcagcagccttgggcggttaagccaccgtgtttcagatattggttagccctaaccctttttaagggggtgtcacctaattgtggcacgtttaagctacagatgtagaagagcagaaagaaatcaaacatataaataaatgcaccagcaatacgtttggaccctgaagcatcacgctacccacttaaattaaacttgtttggcacacgaagcatcttccacacctcttgaggttagatagccacttgtcttgggtcatataatgcagaaccagcaactgacctgcggtgacctgtgcagtctgttgagggctcattcggacctgctggcttagttaggggacctcttactctggaatcttatagtccaaaacggggaatgttctagacagagagattctaaattcacattaaaaaaagagaaagcctcagcaatatataacaaatccctctgaaatagtgaaatacgaattctgtacagttttgaaagcaaagacaatggagtttcatgttgagaattcataatatttgaacatatctcatcattgaagaaa

SEQ ID NO: 44748 - DNA, 890 bp, Homo sapiens
gctgaggatgatggtttccagcttcatcgatgtccccgcaaaggacatgaacttactctttttttatggctgcacaataaacataattttatttttacttcagtttttcctggagaatcaaagagagggacacctcctgttttttatgaaactagtataacttcgctacctaactcagataaagaagatattagaaatgaaaattatgggtttatcttacttatgatcatagatgtaatatgctaaataaaataaaaaattaggtcacatttaaactgggttttcccaagaataaaggattattgaaaataaaagaatctcttttttttttttttctttaaatgagaaggagtcagcattctcatatttggatgagggcctttggtttggtgctgattcatctctggcctggtatttaccacaagggaaaggatagaccttgacctgaaagtggatgactcccatggccttagtgcactttttgttcacagaagtgagcaacaaggaccaatggttctttcttatacattaaatgcagcaggatgtatgacagagcatgcctccatttgtgtactagtgtggatatagtttatttttcaacttttgagttcagaggtacatgtgcaggtttgttacataggtaagcatgagtcaagggggtttgttgtacagattatttcatcacccaggattaatcctagtacccattatttttcttaatcctctccctcctcccatcctttaccctctgatagaccccagtgcctgttgttcacctctatgtgtccatgtgttttcatcatttagctcctacttacaaatgtgagcatgcagtatttggatttctgttcttgggttagtttgctaaggataatggccttcagctccat

SEQ ID NO: 44749 - DNA, 2652 bp, Homo sapiens
actaccggggtgaatcagcccgcgccaggcccctttcccacccgccgctgcagttaggacttggcaaagatgctcgatatttgcgtatttgtgaccggtctttgctttgtgtctgcgctgcaggtgaggaggaggaagagaagcagaagagcagctggaggccggcggtggctgagcagcccccacacctttgagcgagccgcctgcctctccaccggcaaggaagccctgggacctccggattcgggctgccggagggcctgagcgccagagcccaggacccggcggccgggggcgccatcccctcatgttctggagaaggcgcaaatgtgagctggcggtagcggggaaagccctccgcccccgccaggggggacccgggaagcccggccggctctgtcggcagactgcggggatcccctcctccggccccgcccccacccacccccggccggggtgccgaggcggttaaccctacccgcgccgcagcgcacttgggctagagcgccgcgcacccaatccagattccagagcctgccggctgggaaagatccggtctcggggtcggctatgatcccgcagcggccaaggcagggctcaggccccgggattctccccacacgctgctgcactggcgcagccggtcgccaaactttttctccccaaagccagtgcccccgcagttacttggcgggcagccggcagcccactctcggcgggatgatctgggagaagcgggcgtgggacgagggggctgctgttttgcagccctgcgaggcgtgcagtcggagaagtggtcggggttccacaccgtccctgagcctgcccccggccaaggtggcccgacgtgctgcagtggctggcgcaggtgatccgggcagcgcgtccggcactagtcaagggggcagcggcacgggagggaggggcgcctttctcttttctcctccccctgcagcccagctgcactgcgtgggggctctccatctccacgcaatcagcaggcggaatccctgccctggagcgccctggctctggactgcacccccctagggtttgtcctgcagattcccctccccatctttctctgccacacacgcttccctaagccgcgcgcgccgcaaactcagtctcggtccccgcaggtgatgtcatgcccattgttttggtgcgcccaaccaatcggactcgccgcctggattctaccggagccggcatgggcccttcctcgcaccagcagcaggagtccccgctcccgaccataacgcattgcgcagggtgcaccaccgcttggtctccctgcagctttaacagccctgacatggaaaccccattgcagttccagcgcggcttcttcccagagcagccgccgccgccgccgcgctcctcacacctgcattgccagcagcagcaacagagccaggacaagccgtgcccgcccttcgcgcccctcccgcaccctcaccaccacccgcacctcgcgcaccagcagccggccagcggcggcagcagcccatgcctccggtgcaacagctgcgcctcctccggtgccccggcggcgggggcgggagataacctgtccctgctgctccgcacctcctcgcccggcggcgccttccggacccgcacctcctcgccgctgtcgggctcgtcctgctgctgctgctgctgctcgtcgcgccggggcagccagctcaatgtgagcgagctgacgccgtccagccatgccagtgcgctccggcagcagtacgcgcagcagtccgcgcagcagtcggcgtccgcctcccagtaccaccagtgccacagcctgcagcccgccgccagccccacgggcagcctcggcagtctgggctccgggcccccgctctcgcaccaccaccaccacccgcacccggcgcaccaccagcaccaccagccccaggcgcgccgcgagagcaaccccttcaccgaaatagccatgagcagctgcaggtacaacgggggcgtcatgcggccgctcagcaacttgagcgcgtcccgccggaacctgcacgagatggactcagaggcgcagcccctgcagccccccgcgtctgtcggaggaggtggcggcgcgtcctccccgtctgcagccgctgccgccgccgccgctgtttcgtcctcagcccccgagatcgtggtgtctaagcccgagcacaacaactccaacaacctggcgctctatggaaccggcggcggaggcagcactggaggaggcggcggcggtggcgggagcgggcacggcagcagcagtggcaccaagtccagcaaaaagaaaaaccagaacatcggctacaagctgggccaccggcgcgccctgttcgaaaagcgcaagcggctcagcgactacgcgctcatcttcggcatgttcggcatcgtggtcatggtcatcgagaccgagctgtcgtggggcgcctacgacaaggtacaggcttgaaccccagcccacgctaccggagtcgggcactgggtggttgggatgggcactggcggggaccctttgcgtgcggatccctagcctctccgggacgatcaagggagcccgccaggacagcgggcgcgtctaggacgcgcatccgtagtcagctaaacaactcggagatgaaccctttccgcgtgcagccaaagttctcgagg

SEQ ID NO: 44750 - DNA, 491 bp, Homo sapiens
aggatatagatataaatatatgagaggagatttattagaggaattggctcacaggattatggagactgagaagtcccaaggagaggccatctgcaagctggagacagggtatgctggtatatgtggctcagtccaagtctaaaagcctcagatccaaggaagccagtggtgcaactctcagtccaaagctgaaggcctgtgaatccaaagagatgcaggtgcaagtcctagagtccaaaggctggaatgcctgaagttctgaggcacaggacaggagtctgaagtctaaggacaggagaggaagaatgtcccagctccaggagagagagagagggggcgggagagagaggaactcaccttttctctaccttttttgtcctgtcctagcccccagccaggatggtgctcacccacgttgagggtggatcttcctcactcagttcgctgactcacacaccagtctcctttggaaacaccctcacagacactca

SEQ ID NO: 44751 - DNA, 754 bp, Homo sapiens
gagcccctagtatgtgtatcttgggtgattcctgcctttgggaaatgcttctctgttaatgggctgaattatgcccccaaaatgctcatgttgaaatcctaatcctaaatacctcagaatgtgaccgtatttgaagataaggtctttaaagaggtaattaaggtaaaatgaggacactaggctaggccctaatccatcatgttgaatgtccttataagaggaggtcagtgcacaggcatatgcagagggaagaccctgtgaagacacaggaagaagacagccatctacaagccaaggagagaggcctcagaagaaaccaaccctgccaacactttgatcttggacttacagcttcgagaactgtgagaaaatcaatttctgttgtttaagtcaccaatctgtagcactctgttatggcagccagccatagcaaacatcctccctaaacaaaaatccaaaagtcacatccaaaaataacagtgagcagtttctgagctcctgccctgtgccagggtctgccctttgccacatcatctcatttaactctagtaagaaccgtcatcacacacgaaagggaacctgagaatttcatggatttgtcaaatccaccatgctccaaagcctctgctttttttgttacataccatgacttcccatggaaaacttgcccaatatttctgggattctcctggattatctggatttttgcttaaagtgtgagtgttataaaaagcaaaggcttctttgctcaatt

SEQ ID NO: 44752 - DNA, 1447 bp, Homo sapiens
caagaaccaaaccagcaggcccagggcagatgggattatggcagctgggatcagggacacaccagatacagcccttcctgcccagtcatgcccagttcatgcatccacagtaccatgcttctctctgtctcctacttctggcttagctaagctgccttcattgaccacagtccctggctttgacttggtgaacttgagaggagaagtcttcttccaatcgaaggtttttctccattgaagggttcgtggtctcacaagcttcaaggaatgaagccgtggaccgcagcggcaagtatcacagctcaattagagaaacgcggggacccaaagagtatgcagtggcaagatttattaaagagaaagcgaaagtaaagctcacacacggtggacgggacccataagggttgccgtttctggcttgggtgtcttatgcttatatccccttatgacccctcctcttctcctttttctgtcctatagaattagctatttctatccgcttgtgggttggcgggcctgattggttaaaaacatcaagctgcagctagagcttaaactccctatgtgattggttcaagtttcaatcccttagcttacagctgtgactcattttggctgaggggaaagtcgcctttgattggttgaactttcaatcccttagcttgcagctatgactcattttggcttaggggaaagtccccttagggaagtccctgttgacccaggaagccaacttagccacttagtccctcaaactgactccaatctctgtttttttttattttttaccacattttctatttgggggggtctgcactatcctaagtccttgcctctgatttgagcccagtcaacccttccacagttccattagtctggaactccatcaacccaatcaaccctctcttttgtagatctgtctggaaccccatgtcatgaaccggatgcctagaacagttaacatgcgtgagctaataacattttcataataaaggtttattagtgtatgtttatatatgtgttaggcataaatatgcaggtatctttttttaaaattaatactaagatgaccctctatctagcctgaggagattcccacaagtaaaccctttgtttctttcagggaattcttcacagtcccacacaataaccctgcaagatcaaaaccaactccacacaaccctcaagttcttgctgtttttcccaggcctagcttgccacctactggcaagaaacaggagcaagaatccaggagcaaagacagaaaaggaatgacaagaattgaacacgatgcctctgctaaatattctagcccttagtttctagttttagatctctcaaggcccagatctgccagacacctacagaaagactggaagcagtcaaaggaggctttctcctctaaggcactgttaagatctgtttcttcttgaaaacagagtatgaa

SEQ ID NO: 44753 - DNA, 1628 bp, Homo sapiens
tcacaatggacataaagtatttcttacccaagagaaaatttagttcatctgtcattgagggagaaacaaactgattaagtgtgatgtggcggctccctcaattaagcagttcctcgagaaacttcggaagaattgcacattcgacacctttaaacaaaaacacttgtaggctgacagctgccggggccccggcccgccccccgcgggcaggcgaagccggggaggagcctctggcccaggcggcggcagccggccgggcccgcgggggtcaagacgcctagacaaagggcggccccgcaagcgcgagggacgcgccccagctttctgcccgcacccgactcccaaacgctaattaattctacagcctgagctccattagagagaccctccatgattcccccgaggtgctcaggtgggcaaccatcggatttgcgctcttctccggcccaggggaccccacgtccggctctcggggatagaaaggggacgccccggattgcggaacctagccccgggcgggagaaggcgaagaggaagcgggatccccacacgcctgcctttgctctcccgggaggaggctccctccgggctcccggcggaggaaagagaaagagccgcggtcggcacaccgccctcgaggtgggggcggcggtcccctccgcactcaccggcgaatctgagccatcgccctccatggctgccttctgccaggtgtcatcagcggcacgttccactcacaccggctaccgagcgcagggtctggtgggcgggtccctgcggcggccgtggagcctcggtccgaagctggaagatgagctggtcagctgtacgtggccagcggaccgacgcggggagaagtaagccggggcaggcaaaagcacaggcgcgggagaagcgagctttgctcccagcgactaccccgggaatcccgcccagctgccggctgcagcagcggctcctgcggactgcggctgggaacggcgccgcgcagagacctgggcggggcaccgcggggcgtggacagggcgtggcctggtcgttgcccaggcaacagcgccagtcgcacaaaagaggcggggccgcctggggctggtaggccgggtgtctgagtggtaggctgagcgggactcggctgggcgtgggtgtggcacgcggttgggactcggcgccctccgccgccaccttccccctacgcatcagcccctccctcccacccgggtagtcgcccgtcgccctatgccaggctggggggctctgaggaacggaagtgagggcagcggggagcggtgggcgggtgccgagggcggcgccggggcggggaggctccgctgcagcagagcagccggctgcagccctggcccctggcccctggccctgcgctgccattccgcccttcagtttgctctcactgcgctttcttcactcgcggttcgaagccccgcttccaggctcggcacaggacggtgcgggcgagggcgagcctaagccaccttccctgaatggccgcggcgagcacggcagagctgcgcgaggcgaccagagtgagaccccgcccgccctctccgcggtccctagccaggcgcggcctggggttccctggccccgcccggcttgtcccagttctcttc

SEQ ID NO: 44754 - DNA, 1131 bp, Homo sapiens
aaaatgccccagatgatgtcctgctacaataaagttggtctacagaccatgtgttaagtagcaaatatttacaaattacaaattctattacctggaatgaattctatatactaagacataccttcagcccttgaaaggaactgggacacgattcaactagagcttccaggatggtgaattctgcctataagttgcctcctgggtttactgcgggtgccctacaaatgcaataatttttttcgacatgttctatgatgtgaagacagtggggaagcaatgtagcacaaataatccagtcagtactataagaaccacaatttggttttttcggctgcggggagaggagtgcaaacagtcccagttacccaaagcagctgatattcattgtcagcatggcccagagcctttttcccccagtagtaatcatttggagattgaaatcttggctccagttcacctctgcagtgggacttaattcatgccagactgtggtggtttctgcagcagtccaactctgccaaggctcaaagtccaaagattctgtcatgcagtggcaacaaaggaggagtagaattaaaacataaaactcttgttctatgacctttcagttattattgcttaattatttttatgagattataagtcattttgccaagtcactccttagccctttttgaaactgtgacaatgattactaatttggtcacttttcctaacaacctataatagatatttggaataggaaaatgtgagactgtatgaaatgaaagaaatgtgaatttctgtggagtcagttggcctttaggttaacgttgtatataagtatgtgtgtaggaacatagtcacacatatgagattgtacctgcaggtcaatttctagaaaagaaactgctcacaggtgttgcctctggagagaagtggggaatgggagaagggtcagctctgcgagatcttttgggcaatagtacttcttctattctgttttaaatttttttctaatatgatggcttaacttaaaaaataccaaagaaagaactgtctcaatgactgaaaagtatgataatacttgcaggtttgggtaatataatacctttcctctgggtcatctagtattgaaactctttttgtact

SEQ ID NO: 44755 - DNA, 1968 bp, Homo sapiens
ataatgtggttcttgaccaagtgtgcagaagtaatctgcaaagctccccaaactgatccggtcatgcagtgttcaaaatacaccagcaactcagaatttggaaaacgtggggaaagaacacagcaaaaacaagccgctctttcctcccatccagtctcaagcagcttttgagcttcacttcaaaacacagcaatgcggagcaaagattgccttctcctttctttcttctcatccccagcttttactgtaaatgaagtcgcttagtctctgccgcaccacactcttcagctattgcgatacttttaacaggctgcttcacgcaacaccacacctctttcgcctaccattagatttatagttcccacaaagtttctaagaccttagaggttctctgccgctcctacacataaaacaccatacagacactctattaagagttaatgactttagagaggacaaggatgcacagaagtattcatctaaaaatacgacgacaaactttgtccttttccttttacactcggaagtaatgaggcaaagtgacaggctatgggagcgggtaaaaaagcagctcagagttgccagaagaaaagggaagtgaaaaagccggaaactggagatgccacagccctcgacctacagccttccagaccttcccaccgtacggcgggagagtgggggtaacctcaagcccacttgaaaccagtcagtgccaactgggcggccgcgcagcccccttccggcgcccagtttgcggtccgactccgccgcgcctttccgctggagcccgggccttgtgccagcctggctgactgtgccacgagttacctgcttgtctcgagtgaagaatagcgctccggcaaaacctggaggcagcgctggaaaaatcgcacgtgccgatcccgtaagaaatccagccgctctccctcaccgctccctgctagcctctcatcctcagtggccgccatgctgctccggaagcgacgtccgccgcgacccggaatcagtgcccgcggagagaaagaaccctcctgtgctgaaccacagggtgccgggtgaggggacctgcgcccgccgcagactaagccagtatttgaaaccgctatcatctgggtcctgtgcagcacttcctctctccgatatctccctagctagcgcatgaccctaccttttctactcaaagccctcgaggcttgtaaacacctcgcaggccttgtgaaaatcaagtccacaaatccctccgtcagaatttttatcttgggaagcgcaaggtcaaaagcatcaagtacgctttgagacaattctggctctgtagaacctgaggatggtatatctgaaaacgaggatggatcagtataaacttgctaacagattcatttttggagggccagttttaagccgaacggttagggaaacagaaaaacaaaccagtggagataaatgtttattgacactacaaaagctcagagactttcctaatcttaatcctttctggataccaggaatcacttaaaaatctgtgtataatgcccccaaacatatacaacatgcatattcatacctatatatgactgcttgcgtcattcttttacaaatcttacagattttactttgcttgagtcgacgtgttatcaagaatcaatggtgcatcaatctgcaacagcaaaataagctcaatatcttctccaattacctgcattctaaaaaatttaaacatgcttctagttcttttttccaaaaatagggatttaagttgtttagccggtatactatgccctttaaactttcatgaggcattcctgagtagcgggtggggggatccacccaataatataactaaactaggttccctgtgatcaacttagctaataaaattttgggtttaattttgttagctttcttagaaaatgtaattcttatactctatgggctggggtaatcttacacttattcaacaatccaaagtgc

SEQ ID NO: 44756 - DNA, 1037 bp, Homo sapiens
acagggactgggtgtgccgcgtaaggcgattcattttagggagatcatggaaagtctcgctgagctgataacatctgaacaaagataccttgtcctcaccacctagaaagcggtcctaagccgatcactggaaacacctctgcctccgaccatcccatattgtctttctccttgtgttcccagcgccggtacagtaacagagctgccaccaattactgagcacagagtccccctccaatcaagcactgtgccaggggctccccagacataacgttagtccaaagctcgggaggtgcatgttactattcccaatttttagagaagaaagtgagtcgccgacagcatatgttcttatcacgcggctaggaagcggcagagccgggttcccacccaggtcttcctcgactccgaaaccacatggaggcggctctgcaaaagctgttaaacgcacaagccaacaaagagcaacgcccagcgcgtgccaggccccgagcaggggaggcgaacgccgcgcctcccgccggcgctgcagagggcacctgttcagccagggcctgcagcccctcgcctgccgccagagcagctctcggttctcccggatttacctgttgaggcgctggcgtcgctcccacgccggtcccggtggccgcgcccgcccctgccacagccccggctaccgcggtggccgcagccgctaccacaaccgtcgtcagtgcggccatgtttacccgccgagctactcgggccgcggcggccaccggtgcctggggattcgtggcaggcgcaccctggcctctgcagacagctccctgcgctgcgggcttggccgggatgcagggcggggccgagatgtagggcggggtcgggatgcagggcggggctgagatgcgggggtgcaggggtgcgggggtgcgggaggggcgggactggggtgcagggcggggccgaaatgcgaggcgggggccgggattcaggcggggaggggcggggcgagggaggggcaaggtgccgggcggagccgggatgcaggggagggg

SEQ ID NO: 44757 - DNA, 561 bp, Homo sapiens
tctcttcctttatattgtatgtaggtagatcaaaagatcaaatttcaagaactttaaaaaaagtcagaatgtgcttagaaataaaggtaggattctatatataaggagcaaacagaaactaggacaacgggtgacacaatttcatggactgcagaagaaaaagagtccatgatcaactgcaatatccatgactcaactgacaaatatttgttgagaacccactatatgccagacactgtaatgggagctgtggggagatgggagtttaaagatttaggataagaaatataatgccacccaaacccttcctgtctagctgggaggcagtggatcatgcatgaagagactggagagtgatacagaaaggcagatacttaatgacaatggctgacatgcacttgattgtgggccgaacactgggcagagttttgcagatgttactcaatcctcacaacaactctgtgaggtcactctcagcattaccattttacagatgaggaaactgaggactgaggagttaaaatataacatgttatttacaacagtcattttccatgttca

SEQ ID NO: 44758 - DNA, 933 bp, Homo sapiens
tctgggaaatggattgatgcattaccccgggagatcttagttggcccaggggtggcacttggtcttggggatggctcattattctgatgatcagttgaaagctcacagatggtttatggagtgaccctttgtcctacatgtgtctggcaagaaatatagataggacgacagggcaagtttttccccaatatatcattaagtcaatcattactaaagttttttaaacaagtgtatcagctaccatttactgatgatgcgtactagactctatggtatgcacttttcagaatttactcttcataatgaccctatgcagtaggtgctattattatccctatcttctcagttaagtaagaaaaatgttgtgaaacttgcttacactcatagcctgtaagcagcagaggctgaaatatctgtttggctctaaagttcattggagtcccatatacaggaactgatggtgcaaagttcaactcatgccatggtacttgagtagagatccattcctgtcatacattcacagaaaactttatatctcttcatttattattaagtaaataggattcagtaactgtgggcctacctgttgtacagtctctttctctcttcctggatatccccaatcctcccttcttcttactctttcaagtcttaagtgtccatttaatttaaggtgaggacacattatcttgttccatttgagagctgtcttgggttttacatgcatatgatagaaccgatgctaaccttcagcagcctaaacagagtaattttcttcagacattccagatggagctgtgccaattattggtgaacacttaactgtgagtgggacctggataatgactatacataataagtttcacatcatctattaagacgttgcttatgtggatgtgggtacaggaacatttggtcccccaccaacacatc

SEQ ID NO: 44759 - DNA, 2172 bp, Homo sapiens
aggctgaaaatctataatggtcaattgttcattaaaagttttcctacaaggaaataaaaaagaaaaaggaaaccttccaggccacaggtgagccgcctggtggctcaggttatccccaggccaagctgaggctgcaaggtcaccaggggactgggaattctgggcacatagctggggcagagctctaccaaatatcctcaccataataccaccgacctgccatggagcagccagaagcagcaggagaggcccttcctcctgcagtgttcctctaggattgcccactgagaaagcttagttaacatcatgctctttaaaaaggagagatgtcttcacaataaatagctaatgcatgtgagtcttaatgcctaggtgatgacttgataggtacagcaaaccaccacggcacacgtttacctatgtaacaaacctgcatgtcctgtacatgtatcctggaacttaaaataaaattaaattttaaaaaaaggagagatgcttaaagaaattctgtccattgtggcaaaacatatctcagggtgactttggagctgagaggcaataaattgataacgggcttgctttaatgttggctttgttgaatattaatatagctatattagcttttagttagtgtgtacatggtaaatcccttttcattcttttactgccaacctttctggctctttatatttaaggtatgtctcttataagtagtatatgactgatcaggaatttaaaataattattgatatgttttcatcaaatctgctaacttacacttttttggtaattgtctcatttgttcagtgtttcattttctcccccttcatgccttgttttgaacagagtaaaaatttatttttctattttttcccctctacttcctggcgtgtgtgtgtgtgttttaaaaatattactcatttagtggttactccagtgattatactatgcatcattgacttactacagtctcatataaattacagtggtccctcctcttccagggtttcactttctgtgatttcagttaccttcagtcaaccaaagtccaaaaatattaaaagaaaaattccagaaataaacaattcctaagtttcacactgtgtgtgctgtccagagtagcatgatgaaattttgcactgtctcactctaatctgcccagtacatgaatcatctatttgtccagcatgttcacaatatagaggctcccacccatttgtcacttaggagccatctgggttatcttacccaatgttgagcatcacagtgcttgtgttcaagtcacacttattttacttaatagtggccccaacatgcaaaaatagtgatgttggcaattcagctatgccgaagagaaaccagaaaatgcttccttcaagtgaaaaggtgaaagttctcaattgaataggaaaaaaaaaaaaaaaacaaaacagtacattaaagttactaagatctatgtgaagaaaaaatcttctatttgtgaaattataaataaggaaatttacaggctagttttacaagtcaaataaggaaattatgtgctagttttgctcctgtacttcaaactgcaaaagttacagtcacagtgcatgatatgtgccttgttaaaatggaaaaagtattaaatttgtgggcagacattccaaattttggcagtggggtttggtactacccgtggtttcaggcatcccctaggggtcttggaacatatgataaggaaacatataataacatggattaaggggagactactgaaattattttactacttcccagatgttgataagctattagaacactttaagtccatttatcctctcccacttttgtgttatcattgttaacttttcactccttcttatttatttatattaatacaaatacttattgtattttcagtagagacagggtttcaccatgttgaccaggctggtctcaaactcctaaccttaagtaatccacctgcctcagtctcccaaaaagctgggattacaggactgagccaccatgcccagcttccttcatatattttagatgccacaagacattattacttcttagtagagatgatattcatttacacataccctcgccattgttcatcatccctttcttcatttctgtggacatgtctgaagtaactttccctttgcctaataattttatttaaca

SEQ ID NO: 44760 - DNA, 3405 bp, Homo sapiens
agatttaaaaagaatcattcctcctgatgtgtttggaatacactgcagcaaagcaagagtgtcagtagaggacaagtcagggggctggaactgccggaatctatgccatagctaatggtgctttcatctagtgggttagtagcgaatgtcaggaggaacagttggatttgggatatatttttgaaggcagaggcatcagattccgggggggttcatgtagggtttgcagaggtgagtttccatgaaacttaggcttcagggcctgccatttgcaccagcccatccaaatatgcatctttgtatctagttttgtagtcttttacttaatgagaacccctccctccccactaatgcatacaattcaatttccacaaaatgggactctttctctagggtctgagagtaaagaggattaagaattatggttcttaggttttggccagaaggacaggaggaatagtagtgtcatttctaagccatagtactctggaaaaagaacaggttgaaggggatgtagaattccattcacaccaaaagaaaaaattctgttctgtttgtactaaagtctcaacctctcacactgaaagcccagaacttatcctactcacccaggctcttctctccctgaagcccggacttctgtttgtaaaattgtctcaagttataatatcctttcctgctctttctcttttattgacagtctactcactcttcaagccttacccttccataatagttaacttcctcctctatgttccagggattgaaaactggaagcaggttttgttgatttttaaaattaaatgtgaatgctttaaatggggcgaggattctcctgtttgcttcgtcacaatcacagattcacggtagttgtttcagtcctagagccatctgagtttatgacccatgacctcaaatcattttgcttacatttctcctatagcagctgcacactgggtatgtaatacatatttagcaaatcaatgaaggaacaaatgctgtatttcccacacacagatacatttgccacaacaatagtttggtcaaggaaagttttacatattttcatacaattcttttctttttaaaaatcatgttctaatgggagcagtggctcatgctcataatcccagcactttgggaggccgcggcaggcggagtgcttgagctcaggagttcgagactagcttaggcaacacggtgaaacctcacctctacaaaaaatacaaaaattagccgggcatggtggcatgtgtctgtagtcccagatactttggaggctgaggtgggaggatggcttgaacctaggagccagaagttgcagggagctgagattgtgccactgcactcctgcgtataagagctgtctcaaaaaaaagaaattgtttcctcttgttctttttctctgttgttgcatttttttctttatggaaaatgtaaggcaggagaaaaaggatgcaagggtagagaaaaagactattactcacctgcctggtgatgtaatttgacctaatttcaaaatgccctctgagtttattttgtgatgaagcaaatatttcacactaataccatcagaatagaaggtacgttttatctttccctaggccagggctatgtgatataggtcagtttcattttagctaaaaaggaagaagaattaaataaatattttaactgtggaatatttgaacaatttttattaataaaatccatccccaagttcaactcataggttagatcttagttacacagaacaagaataaagtgaatttattgtttattagataatgtttctaaacctatttgctgttcacaaatacaaacacgtggcaaagtccatgggcagcttccacagagaagggctgtggtgagaccagatgactcattgtttgtctgatttagcagctgtaatacatattcttgccagtgtgttttgttcccacttaattcccaacttcccatcttctttctaatgaaaaatcagctttgaaaaattactcaccaaactgccttcagtgagtcgaaatctcacaaagtagccctgaatgattaagtcctttgaatgctagattttgctaagttacccctgggaggcagtcgtggtgagaaaagaaacaaatgcccagaaatatgaactgacatgctagaccatttctcctcagtgtataataaaatcagggtggggctccagaaccacactttgatttcccacttatctctctgacccttcttttcagaaattatcttcaagaaagtgttttgaggtatccagacaaaaggcattgtgtaaactcatggtgcccaactcatctttggtctgtgtgtagaggaaaggaagagttattctgtgagcttcatgaaagaaagaagagaatccttctactcctactccacttgcttatctgtggagttacagcatatctgacttttaattagtttctagaccctttactgctctggggctatggccaagtgcggagaaggtaccatctatctctgtccagtggctctgacacctcctataactttgtcagaagcctgcttggctctattctcttctctacagctctcattccagggatgtgaaaatagatacatagaagtaagctcttcaggtacctcatggtcaaaaggcaagacagtagaaacgacaaagccattgcttgtgttcagcctcttatggaacggagggagtctcttcccagctaccagggctgccatcatgggcaggaacgaggcagataaggtgcctctccaagagatccacctggctttcctccctaaggtgtggagaccctgccacagccaccaaggagaggcacccacagatgctctcctcagggaaagcagcacctcctcttctttgtacagacctaaatagttcaatgatggggcagggcatatggttggagctgactgcactgccattccctgctcacgttggactgctctgaggctcctcagtggcgatttctgccatctccaaggggtagtctatgagtaataaggagttttctctccttcttacttgggaggcagcacttcttatttcttcctgaagtaaaaaaaaattatacgtatgtgtatatatatgagtatttctatatatatgtatgtatgtatgagtctgttctcatattgctacaaagaaataacctgagactggtaatttatgaagaaaagaggtttggttggctcacagttctgcaggctgtacaggaagcatagtggcttctgcttctggggaggcttcaggaaacttacaatcatgacagaaagtgaaggggaaagcagacacatcttacatggccagagcaagagaaagagagagagggaggtgctacacatctttaagcaaccagatctcatgagaactctatcactatacagtactcgtgggatggt

SEQ ID NO: 44761 - DNA, 1395 bp, Homo sapiens
aaagaataaattaatagcttcaatgttaatgcatttcattgaattccagttctttgaaagttggtaaccagctctttgaaagttggtaacctgagtatgaacgtaggaaacagcttggtaaaatagaacataccagtttcctctcactgccaactaaattagagtataccaaaactagaaatgcatgaataaatcactatggccaaagtggagatattctcttccactgtagaatattaagctcatatctaagaagtatctttattgattgattgatttatttattttttgaggcagagtctcactctgttgcccaggctggagtgcagtggtgtgatcttggctcactgcaacctccagttcccaggttcaagtgattctcctgcctcagcctcccgagcaggtgggattacaggtgtgtgcaaccacacccagctaatttttgtgtttttattagagagggggtttcaccatgttggccaggctggccttgaactcctgacctcaggtgatctacccacctcggcctcccaaagtgctgggattacaagcgtgagccaccaggcccagcctgaaatatcttcatagtttgtaaatctagcattgtccctctctgtgacaaactgttgtgacatatgaagtcttgtgccagagtggacaaaggttaagccttattatagaacagctgaggttacatggatgacgtcaaaagtccttatatttagaaaccttctcaaattgccttgtgtattgtcagccctctcaatctgtcactactggcagccaccagtggatctggcgtaagaagcctgtggttttgtgtccctcccacaggcccacaaactttggacttttggttctcttgctgactccctgaccccgttcctgaacccaagaaattcactcccatggtggctggcactgcacccccacacccctccctatgttcccttaggtgtctgctttcaggtagcactgaaacagtcatagctattttttaaaatgtaactctcctagaatttagccatgctatgctatcttgctattttgaaagctgaatctattcaatatatattttcaaatatacatttgtctgctctatattcttttacctctacctgctacctattgcttcagatctcctgcatcagacaaattaagaaacaccagattaagatgaccataaagaggagtgtttgtggggatgtagcagaaggcaaagaccaaatgtctcaccgtcattgtcatcttcatcctaaagaaaaggaactaagattgatagtgccggggcctgttccaggctcttttttttttttttctgagacagagtctcgctctgtcgcccaggctggattgcagtggcaagatctcggctcactgcaatgcaagctccgc

SEQ ID NO: 44762 - DNA, 772 bp, Homo sapiens
aatccttctgtttatgaatcattttatggttttcaaactcttttgcttccatatatgttttgaccttatcaaaaccactaagcaacgcagggctgactttattaccttcttttcatatatatatatatatatatatatatatatatatatatatatacacacacacacatacatacacacacacacacacacacacacacagaaattgtgtcccagagagggtgagtgactggccaaaggtcagatgatgtttgtggcagagccacctgcccttgtgtttaggtctccctctagcataccttttcattacagcaggattctgagcaaaagccagttttatctgtcaagccccaagctggagagcaacaccatcccagtgcctgtattatcaggttcattaattctatcagctttccctgctctgtgtctgaacacactgtccccacactacctttggctgaaataactttctgagcctgactagttctttggtgatgagaacagagctgtggcccctctgctttccctaaatggactcttagctgggtgagtcatggaaagacttctggaattctcagaggaaaattattaaacaaacactagcttggaaggacctaaaagattatctagtccagcttcgaattggatgaatgaatcaaggcagagagattgagggacatgaagtccttggactggttggccagtggctgaagatggtaaatagacctcaactctcctaactccctgtgaaaagctctttcaccttaggcca

SEQ ID NO: 44763 - DNA, 849 bp, Homo sapiens
tctccaggtagccacaagtttttcccaccctatttaagttaccagcctggtccctgtaggcagagtttggaatccctgattgtaccccacccaccagtcaggttcttcctccagcaccatgctaaaaaatatttcagatttctcaatgacctctatttcccaggctgataaatgaaggcccatttcgcaggggtcctgtggagccatttcctagaccaattactgcctgtgacctcattccagttcctcctgcctttcttcccctctgtttaaaatgaaagtaagccaagaccctaaacaaaaacaggctttcatcctcaacctccttaaagaacaaattagagcctaagctttaagagcaactattgtcagcccatctcaagccagagtgtctccccagaacaaacatcagcaacttttacatggcccagaggtccagggccatggggaaatagagggaatttcccaagttaagcaagaattcagtgctaccagttctgaaagggtttttaaatacaatgtgaaagttccagaaggcctctgaattttgtttgtaaagcagatatgcagcaacttctgggaagcttccagatgattaatggaatccacactttctatgtggctatcccatttactatagactcagcctccagaactgagcaaaatcgtaccatctgtgaatcaactgaactccccttgatacccattatcatagcagaaatactaatgatgaatatgaaatgtaattgctgggtggggccgagctaggatgagacgtgaaatgaggcaatgcttcaagtgaaaatgtgtgttcaattaatgtggcattaaattcctcaggttttattg

SEQ ID NO: 44764 - DNA, 3442 bp, Homo sapiens
aatcatcagcatatagacattatttaaatgagaaagacggaatgagatcactcaggaaatcatgtagagaaaagaagtgggggcactcatactacttcaccaacaatttctccactctgtccaacccggtcctcttgggttctgagcaaataggggttctctcacccctggacttctttcttgtgccattctcattgcctgcaatgccttcctcccttttcctagtatccctgaatgctcattctttaaggatcagctcaaatctaccctctccaggaatcatgggccttgtttagccccactgccaatgtcggcctccttgcttcccgtaactttgtttattcactgcacatttggcatttgtaagtcaatgtcttctgctctgtgtatatgtcatatttctcccaattagagtataagctcagagaaggcagtctggatgcctttacactccccagtatttggcaggttttccagaaaagagttaaaacaaacatctgttgatcaatgaccacattcactcttatcttctcttgctacttttgtgccagtggttgagaattaatctcaaattctgagcagctcagcaagggtgtttcaatcaatttcttgaaaataaggcagcaattgtcaaatgctttaagacacttatggcaaataaatgcttgtggcaaataaaaagaatatgactcacttcatattgaaaagaaccagatgaaagtagtttcccacagaggaaagtcatagaattaaaatgaatgtctatgaaccacttcaactatttttgcatctacccctgaataatattccacttaactggaacatatctcagtgtgtttgtgcccatttaacactccctgtcttcccaacccagcatctgtaacttacagcctgtagtcattccaaaatgcttccacgtggctaacctgggttgccaagccccatctggctcaattagcactggagattctggagagccccaaattatcattcttttctggttgtactaccaaagaccttcccatcctatctcttcctcaaactccctaagttccatagttgtatttgttccaattttgaatcccaatagtccccagctgttttagatgccccgcctccccacccccatctgggctctcctggctgggcttcccatgacagtattctccaattaggcaaatcacccttcaatccccaaattttctttaaagctgtagcaagtacacccacagtcgtgacaatactgaataaaatggaataggtctgattcactttcccaaagctgacttttgctgctgattgactcatatctgtttaccagaggtcatttgatttcctccttttgactcatgctcaacttcaaaactgatataacttgagtgtgccactcgaatgtgaccttcctttttgcctgcagaacctccagctccactcagctcctggggctcagccagcagagctgtgcagtggaaaggaatccaccttggaacaggatccctggctttaccacttcaattgctgagtgatctccagctagttagtttcagcctatttcctcatgtgaaaaattgaggtaaaaatacttggaaatattgttgtaaaggttaagtaacgtaagaaaaatgcctggaaccatgtcttccaccaaagtaggtaggggctcaacaaatattgaattgattcatatgacattgccatttatataggtcaaaaatggccaaatattgacaatttcatatggttcaacctgccatcagcctattactcaagcacctaagaaatcagtgtccaattggttggagtattgggtacaaacaaggtagaaccttagaggtagaaccccagtgttgacttttatttacattatcaaagaatcaaggaaggccagcaccctactatgcactttaaattctggaagattttcttcactcttagctagttaaacaaagccgatttaagagacaggataaaattgtggtttagagcctagactctggggagagattgtctgggattaaattccagctctgctactgacgagcattgtgaaactgagcaagtttgttaatcaacctgggtctcagttttgttccccgtgacataggatattacagggtgttgtgcagatgaaataagttaaaacatgtaacattcttagaatctggaagtgttaacgatcattatcttgatttaaaataggtggtttggcctgactagttagtgaaatctctttcacaacaaagcacccattgggtagaaatcagaactccagcaatggagaatcagcctccccttgttgatcagtcccagtttagcagctgggatactccttgggaagctcaaagatggtaggtgtcaccacccatgatagctcagtgagaatccacccagccagtgatgagtgcttcaagggtggggcagagaatatcacacagtcatttggagcagtggtgattcatgcacaccctgaaaacctcaacagaaaagagatggtagcagatgaaaaggaagagggatacaatttccacaaccaagaagaaacagacactgctcattctggtgagaaatgagagcataatttgaattcagcatttatttagaaaatcagattaatgaggacaaagacatcataaggaaaataatgataaagacctctaggctttcccacaatcactttcatgtatattatcaaactatatccacacacaaaaagtctctgagtcagataggcaaagccagcattattttcatgtatggatgaggaactgatgaatcatggagtttgaatggctaactagagtctaaaagaatgtagaaacccataaaagacaaagagaataaagaaaacaagcagacaagagaattccacacaagtttgaaagataggaccagatggaggtaagtggtttagtaagacagaggaagcaaggatttaagtcacctgaagacaagttaccacaaatgaattagctcattcatcccaatggaaaacctgagatgctcaagatttggagacagcaggtacaatgaagggttggggtgaggtaaggagctaaaaatagaagttgaaagttcgtttgtgaagcagtcatgttcttctctcaccttgcacagtcaggccactagtttcccaggctggtgatgaaagagtttttttgtgtgtaatttgaatgggaaaggctttgacttggggctacagagataggggcaacagaggggagggacatggaagtctgcaaacttaaccaacttctcttcatttctccctccctactactcttctccgcctcacttctctaaagaagatatacaaatggctaacaggtatgtgaaaaaatgctcaacgtcactaattgttagggaaatgcaagtcaaaaccacaatgagatatcatcccaccccagttagaatggctgttatcaaaaagacaaaaactaaatgt

SEQ ID NO: 44765 - DNA, 3254 bp, Homo sapiens
gtaagggaagttaaggttttcaagtatcaaaattatgctatcaaggcagttgcttttaagggttaaaaaaattctaaactactttttgctgcttttagtttattacaatcaacaaaaattatacacaatcaaaaaccggagcccttcttctggacaaaggtgtttacactgttgctagccaacaaatccacatctgtttaatctagtccttgttcttcactctcagtattgaagcagttttaaaaatgtgttttctctcttgctatatttaatgcatgttcttataaaaggattatctattgaccacaaacaaatatagaataagggaacagatttgctcctttccactgatattaatccttccaggtcagtttagcctagccttctctgacagaaaaagtgaaatgactgcctagaacaaacaagaccatgactcaataaatatagtaatttctactccaaggttgttctaaaaaaaaaaaaaacaaaacaaaaagctaagaaaaatgtattacatttaaccatattcccaagtagattaagcataagcctaaaggctcagatcagctaccactaacatgctctgtaactctggggaacccatttcccaagaattttaagttactccaaataagagagaaaatactgcttaacagagtaacagaagtcttttatcacactttttcaatctattaccaaacatcatagaaacactcaacaaagtcatactggaagacttacctaatcaaaacaggtctgtcaatgctggtttactcaacaccagtgcttataatgatgtatcaaacttcctgaaaataagtggtagacatttagaaaaacaaagaagctgaactcacctttgacactttttctattaacatctgcccccttttcaagtaaatactgagcaatctctttatgtcctttgtaacatgaaatcatcaagcacgtatgcccatgtcggtttgacacttccaaatcagctttgtgttctacaaggtacttcactatttccaaatggccatcgaaacacgcagctcgaagaggagttgaattggttaaagtcgtgttgttgacagatgctccatgatttaacaaggactggaccaccttcagatgtcctgctgcagaagcggcccataaagggggagccccctcaatggtttcgccatcaaaattgacggagcccccaacttctatggaggcactgcattgctctaggaggaattccaccatgtcaaggtgcccatacctggcggccatcaagagtggcgtggccccatttgttttttcagagatcaaggaggaaacctcctctttggatttgcttgccaacaatttggtgagaagccggagtttgccatcccgagctgcgttaaatactgctgtctttagatccatttatgtccagttgagaggctgtgctttatttatctttcaaagcagagctccagtttaactctatcgacacaggcaagagtcacaggaaccaaagtccaatgttaattgctgcaccccagaacggatacacaaccacgaagagtatgttccgtcctactgctttccaacatctgacaaccagggcaccaaactagagaaagaaaaaaaaagtagcagcatttaattttctatagaagaaggcaaaacacttcttaatttccacttctgtgggaagaaaggaataaaagctatacttcaggcactactccatcccacacaccccccccacccccaaagaaaaggtggtaaagaaaaatacagaaggatacacagagacccaaatgttctggtcgcaggcagtctcctccatgtgcggaaaatttaaacactacaggcagcccgttttctcgcctccagctctaaccagccaagctttgttctagttttgctttgcacacgcccagggagagtacaaccgaaagaggcaggagactcgggttcagaaatgtttctctttcttgcaactgcaggagagctggccaagggcgccaggctggaaggcctgaggccgggtttcgagaaagaacaaaaaggtcggacacaccaaaccccggctaaggccaaaactgtgccccgaaagattctctttcctttaaaactactcacggctctcaggaaatccgcctgccttttagtcattaacttcgcccgccccatttcgatcaccccccaccccccgccaagggatgatccgcaggttcctcaaaccacagtcgccccaacacaaccttcccctctccctgttccagacaacggcagccccctcccaatctcctccatcgaccacaaccccctcccgatgggccaagctgtggcctccagcccgctgcccgccttcggctcccccggcgccctccttcccgcccaggccttccgcgggcacctcaggccccggcccgagccctggcaggccgctgccgccgccactacctgcccggggactagtcctccccgccgccgctggtcactcgggctttgtccgtccccttcaaagggaaaccgttgtccccaccgccgcccgggccgccctgctccgcctgcggccgcacagctcctccatgctccgcgccccaaaggaatgaatccggccgcgctgttcgccacgccccgccacccgagctgcctcccgcccttagtcggctcggactgcagcggctgcagcgactgctgcgacggatggtgtaatgggctgcgagccgggggccggacaagcctgagcgtcacatcactgactgtgccgccacgccattgggccgggggagggcggcggccgcggccagcaacagcctaggcgcggggcggggcgtcgcggccggggtggggcgacggggagggggcggggcctgaactactgggaggacgtgcctgcgtgcaacgcgctggggggcggggcgctgcgagggggcggatctgtgcccatcgaagcggcccgaggcagctcgagttctgagatctcgctggctcttctcctctcggattttcggggtgctcccttagggaatctttcggtcccatctcagagaccccagaagggaagtgtattagtgcgttttcacgctgctgataaagacatacccgagattgggtaatttataaagataaaaagatttaatgcactcagagttccacgtggctggggaggcctcacaatcaagccagaaggggaaaggcacgtcttacatggcagcaggcaagagaggaaaatcagagccaaggaaaaagggaaaccccatataaaacaatcagctctcctg

SEQ ID NO: 44766 - DNA, 1049 bp, Homo sapiens
aaggtttagcattgctacgttaatttttataacagacattgtaagtacttctatacagatggagaaaccaagggttagagaagttgagtaacttaaacaaattcacatggctagtaaatggcagggtggaatttgtctgactttagacagtctgggccagaatgtaggtactacgttgcctccccagtatatttcctcagtaatgggtctactgtctccaatttgccattctccataccccctcagtccctaggtcctggggctgagctgctgtgtatagttgtctccctgaaggactcccatctatttgggacctggcctgcagcttatagcttgcaggaccacatccccatcactggagaaacaccagcaagaatgggccccaccaccttggtcttgttttctatcctgagcagtttcctctaacttgcttccaacctgctttcttctcccattcctgactgctggacacctaatccctagattcactgcccatttgtagacttatttgcccttcagatctgatatgtgaccagattccactggatcatttgtggatggctcatgttgattatggtttgcacttaccccttttgttttgctgtttccagtttctttgagtaaacacttcatctgggaaatcccatcctctgaaccctgcccgctatgataggctccatgaggatgtccatgccaaaatcaacataactgaaggagagatggaaccatggcatggtctgaacccctagatcccgccatgtcagaggtcaaatatcccctggccagtgccactgtgttgcttgcctccagaatcactgaacagtgctccctggagttaggcaacatgctaaccctgtcctagcctctcggatatatgaacaaacacatccgtcttccaacgctttttgttttttgtttaggccaatttgagttggatttcattcattgctatcaaaagatttctgacaaatagtaaacaaacataacatatacaaagtgaggtcagcactaggaagaagaaacacatatgcttttaagggtgtgcaaca

SEQ ID NO: 44767 - DNA, 4346 bp, Homo sapiens
aagtgttacttgatgtgaaagccagaggaggagcagttaattaggaagtgagtagagcaaggaggaggagtccaggtagaagtaaacactgtttcctaaggacatgtcttgaagtgagaaaaaactcagtgcactgtgaaagcaaatagaaagccaacacgtgtggagtattgtgaataagagggagatgtggaccccccaagctagaggcaggtaggaaccagaccatgcagtccacagaactctgtaatcatggagtatccagactagtgatgaatgcaaagtgtttttcacttggcagagaaataacttggtggtgaatgtaggagtggtggtgccaggtgacagagtttttcagatggtcccattaacccttccagactgaggcattagcctcctaacaggccttcctacaactgctcttgcctccttaaccaaatttcccccagctactcagagagaaaggcacatatgtcatgaggctcctttagattcagcagcttctccctgctcttagggaaaagtttacaaatattcatgtggtttccaaagcccgccaggctctggcctgcacctgccccacatccttgattcgtacctctctcctccctgacaactcctcgctgccttattggtattgctttctgcctgcatgtcagactcttgctggttcctcggcttcaggccccacacacactcttttcctggccgatgcctaccttgccacgctaccactaggcctccacttaaatgcccctcatacttgccctaaccctaaggactaagttgggtcctagtttattctcatagtcctcagtctcctcactgttttcatgcctcattcactatctgtgaatctgtgagctctgtgggtcctttcctgtctctcagggccaggcagtagtaatgccaggaacctagcaataactgtcacatttcttttgttattctgtgcgctctgggaggtgggggtgggggagcggtgagaggaagttaaaggaagaaaggtttacaacagtttgtatgtactgttcatggagactgattttttgttttgttttgttttgttttgtttttattgtcaggaagtatgtgcatgaacaaagaattttgagaatgaattcttctgaagagaaggatataggtcatttctggacctttcaatgttaaacgctgtgttttccttgcctccaggccctaactgtgtccctgccatgtttctgtcatgttcttaaggccactgagtttaggtagttaacacatcatgccaggtgataagagcacaggctttagaagcagataattcagttcaacacacatgtattgcctgcagcaggttcagaataagacagagtcccacccctcatgacctcacagtctggtgtggatgacagacacataaacaggcaatttcaatatactgggtaaacaatgaaaaaagtgtgcagaatgctacagaggcaaccaccacttcctaattgtgtgtccttgggcaaataattacctttctcagagccccagtttcctcaactttcaaatagggccaaaagttcctacagccaaaggatttttttttgcgaacagaatgagataacatttgtaaagcaaataacacagtgttttacacacaggaggcacgtgataaatggtatccattagattatctaataaggtcagaatctggagtacttattctatttgtactgactaaatttgtgtgattctctcaccaaaaactgaattttcacataaccctatgcactgtagtaattgtaacaacagtccatatgatccttgcccttgttcataggagagactggacaagaaatgatgactatgttagcagaaatccacgagtactactcgtataatgcttcagagaacattctgtgctgacagcatgccagggccattgttttaatatacaaagaacaaaatgtccacattatcactgtaacttcttctatcatcttcttctcacttctgttcactagtccattttttattctattgctacccttatctctggctggttgttccaacaatattaacccctctattcagaaatcaaagattccctctgaatcaaaatcagacacctaactatgttctaggcttcaagtaccaggtcgtctttacctttgcccccgtgtctgccataattcattaaagattttctctctctctctcttttaattgatatataaatagctgtacaaaatttggggggtacatatgatattttgatatatctataaaatgtgtaatgattaaatcagggtaattgggatattcatcaccacaaacattcatcatttatttgtattgagaatattatagttcttttcttctagctattttgataaatgcaataaattattgttaactgtagtcttttctttctctctttggtcatgtcagccttcttatgactttgtccaagatagctttacatagaagcggtatccaagtgtgcatgatttaaatgccactcccaaaattcctccaaagagtcttccatgtgctggacattttacctagattaagtcttagggatccctttcatattaagatccattttatattaagaaattgactaccaaagtgatatctggttggctttttcttattgatgacacttaactattcttagagaaaacttagcttgaaaaaaatgccaatagactttgtttaaaaaaatttattgtgaccttttttctcagttctttgatttcctcatgcttaattattgagatcatcatctatgagatcaccattaccaatggaggccccatagttttagaagtcaacacttatgagatcactgctagagaataactaacagacttattcataatgtggcatctggtggttgacactgtcattcttaaaaattgcagtgtcatttcattagctttataaacatttgagttataccatacttgtcactatatcatgtgttcctatgtatctgccataaattctttaagatatatgaaacatgggctacacaaaaaatagaatcattgctatggtaggcagaattctaagaatgacccccagtaaccctctccagaaggcaaaaccaagatcctgggtggggaaagccaagagcctagagaatgaagtagagagtcagggataattattcccaagctttgaaatccaatggagttggtacagctacatgccaaaacttctttggactgataagttatttgtaccttcttttttgaattggaatgcctgtaactgtcatcttatgcctgtcccactattgtacgttgatagtgtgggacaggtaacttgtctctttagtttcacagtccatgaataatgaggaattgtgcccagaattaattatacacaggagccacatcaacacctggtttagatgatgatattttggacttttgagctgatcatgtttagatgagatttttggactttgaactgatgatatagagagaaaagacccatgggaacctttgaggggcatgtgttttgcatgtgtcacaggtggatcattgggggtaagggggtggagagtagcagtcagaattctgccccaatgactctcaaccttgtacaattgtcttgcttttgagtgtggcaggaacctgtaaatatgaaatatcagcccaatgagtatgttatgttatatgtcaaaaggggaataatccaactagactcacaaaatttaattgcatgagccttttaaaaacaaagagttttccctggcctgtggcagcagagggataaataaagttagagggattcaaactcaagagagattctcttactggactcaaagtcttctgttactgtcatgttgcaagagggcctgtgagaaggaatggcctccaggcatagagagtaatccccagctgaaggcaaggaaacagggacctcagtcctacaatcacaagaaactgaattatgccaacagcttgaatgagctttgaagctgattgattactccctagttgagccgacagtggagaatataacccactaacacttgattttagcctctgagactctgagcagggagcccagttctgctatgccagatgttgacagaactgtgagctaataaatggctgtcattttaagccactaagtttgtaataatttattataaagcaagagaaaactgatacaattcctaaatatttatagactatttcaatgtatgtcccatgtaagtggaagtcaattactattcaaatcatcagttgctcattgtcttattagttatgatgaatcaaccactaacaattcacatatctcagctttaaaacgcaatcaaatcaaacacttgtattttccttgaacccccaaca

SEQ ID NO: 44768 - DNA, 1248 bp, Homo sapiens
tttacctccagatcatatagcctttcccacccttgcttttcaaaattaaaaggataaattaaaaaataataataaatatgagaatattttaaaatactttctttaagaagtttactaccgtggaaagctggagaggtcctaatacactgaaaactagctcacagctgccagtcaaattatttttatccaaattagctttgcacaaaaagccaagtaggaaaacccatgccaaaacctccagcactggctctgtgtgcctggcaggggctcatgcagagcctttagagcatttaagactctgggctatttgcttatggttctgaggtgtcttttcgaaaatgggttttctagtcaaaatgaaacaaaaaggcagacagctgtgtggattttcccttcagagtaagccaagtgacggaaaggcctgcccgccccgctggggacaacagcgccagcacccgcgccgtcgggtcgggtaggctggggaggtagcgcaggcggcctggcccccagaccaccccgcgcccctggcggcctggccccagcccaccccgcgcccccggcggcggcccccgccctagcgcccggtacttgcctgcaggcgagcgccaccacagtcagcccgcggcttttctgtcttcctttctggcccagcgagagcgcccagggggtgggcgtcttgccccgggcgtcgagagtttggggccgtcccgtacgcggcgcgccgcaacccagtccccgcgaccacagcagcctgctccccaccgcgcttgcagagcccggacgcgcgtgagtcgggggcccgcagaggcctcacccttggaggtcgccgcttgtcaggcctgactgctgttggcgcccaccccgccgcccccgaggggccgctcgaggccggactgctgctttgccgtggcaggccccacccgggacgtggcgctgcgggccggggcggtccagctgtgagtcaggggttaatgtggcgggataactctctgcagagggaaggagctcgcaaagaagggtggaggaggggaaaccgcaatggggaactgtcaccgaggctagtggactctccctgcgcttttttttttttttttttttttggcatgtaccccaaaagccagaggtcgaggcccagaaaaatctggaaaggaattccaccgtgtttgctccttacagaccagacaaaccgtagatctttcagaggtacagcgactctcctggttccctaagatagtctcgacttttcct

SEQ ID NO: 44769 - DNA, 1818 bp, Homo sapiens
agctcttccaatgacaaggaccgtattaaccaacagtcctaatattggtaaaactgaaaagcaatgaagttagacattggcagcactccaaatccaattaaattggaggtgtggattagagagtagagggttgacactgggtactacagagtataaatgattttctttaagggaatcttttaaggaagaaagttcaataggccttaaaaatgagatggaaagaaatgctaaagggagcatttctggaattcatatattttaacacccggtcttaacatctctcacccaaggtttattagaggaaagtcaaatgctgggcatcagctacctagaagcgatttttgaattagcctaagaacggggaaacacggacaggaaagtgccatccctcaagttacacccccaatcctggagccgcgagttggggcccagggactgctaggcccctgatacctggaactccagggtgcacttggtgccctgagcgatgtcctcgtagaagcactgcttggcgttgtcaggaagctcgaaggtgatctcagaggcgccgccgggtccaggcaccagtagcagcagtgcgagcagcctgcacccccaacggcccgcgacggccgcccagcgctgcgcggaccccggccgcggcatcccgagaaggcggcggcggcctcaaccgagctgcgagacgcagggtcaggtctgcgcggactcaccgcgcgcggcaggcctcagcgcaggccaccccgcaaagatacacagcagagcaggttcacgcctgtgggagattcgggatcagagcgaccctccggcttcctgtgaggggcgcagacgggcggacctggggaggtaaaagagaagcggaaaaggcctgagagggtcggaagtggggattagcctttcggggggtgaaggggcggagcctgagacaccggctcccgtgacccggatgcgttcttctccgggaacacgcgttggagtgcgtacgtggaagcccgcgaggcgttggctctgcctccgttgcagcctgggacgaggggcggggccagagtcgtgggcggagaggggcgagaccaggaaacggggcgtggcggccgccgtggttacaggcggttggcgagggtaattacgctccaatcactggctttttttgttgtttttttttttttttttttgagacaagagtctcgccctgtcacccaggctggagtgcagtggcgcgatctgcgctcactgcaacctccgctgggaacttagcgctggggagcatctagggagtggtaaagggctcattttgccctagggtgctaatcgttggtggtagagcgctttgcaatttgcggagttttctcataagtaataataaatatttgggggaagcagctgggcaaggagcgcgaattctaagagcagactgcaggagtgcttaatccctgctttgccacgtactggctgtgtgacgtccggccacttgcttaaattctctgcctcagtgtgtatctgtagaatggagataatagcacctaccatagagaattattacaaagtaccaatatttggaaaaagtacctagaagtggttggtacatagcaagcactagatgaacttttgttaaattaaacgtcacagtgcaatcaatacattacataccacaagataggcaaaaattttaagtgtaacaataacagatattggtcgacttatagagccacaaaacctcttatacactgctagtgaaaaagtaaattggttaatcaagttggaaaacaatgtgccattatctaataaagtagaatatatgtatacacacacagaacacacaca

SEQ ID NO: 44770 - DNA, 1255 bp, Homo sapiens
ttcacagttccttaatctgtttgaagagatggacacaaaaatatacacaaaggacacattttcagacctttgtgaattcccaaatctatgagtacttctgcagcatatgatttttctacagcaggcaatgcatttgaagtttaaaaattaatgtgaaattttcagagccttactaagagtgattgccaacttgatagtgtattgaatagaaagcaaaaccacaaggaaaccctgatgttggccagtaacgcaaatcatatttgtgtctcaagaaaagaacaaattcagaagccactagtcctcaaaagccacttaccacttaccagtttcagtttcagctgaaactgaaaacgcgaaatctctggaaaccaggaatccaggctactagattgtcagctcctcagaaacctctgtagttggaccatgttgctcaccttcctgcagaaattcctcaacattataaagatttcagattataaacataatattacggggcaatattttaaatcctcatttaaaatggaagttgaagacagtaacaaacacaccaccttccttaagaaaaccagttttgcattctccaaaatgtagggagcaacagagaaagaagtttctcttgtaaatgaccagtgaaccggaaaccacgctgtggctttcatattcatcggctccctttcaactctccctcctaccccaccaacaccaagctggccactaggcggtgctgctcccattctaatattactgcccaggcaccaataatggattgttcctttttcatctgagatttatagtagcacagctactatattttgtgaaaatataaaatatttttaaaatacttaaaatattttaaatattttataaataatttgtataaaatattttaatttatttatatattaaatatatttaatatacttataactatctaaatatttataaatatatttagtgatatatttataaatatgttgtaaatatataatatttaaaatattttataaaatattttgaaaataaaatttttttttgaaatatttgagcgaaattttgctgaaagcaccaggataaaaaaaatagagatgagaatgaaaagttattagtgaatggatcacaaaattacattgacaactacttctgaaaggtcatgttgtaggacatttgggcattttcctagggcagtgcagaaccatggaataacctaacttctattatcaaaagagcattctggctggcatataaagactaaatt

SEQ ID NO: 44771 - DNA, 2236 bp, Homo sapiens
ttggatttttctaaacaatagacctaaatcccattttacctttcttttcttatttatattttatttactttatttatttgtttttatggtaggggtcttgttctctcacccggacagtagtggagtggcgcaatcacagctcaatgcatcttcgaactcctgggctcaagtgatcctcctacctcaccctgagtaactgggattacaggcatgagctatcatgcccagctctcattttacctttttgaatcttagaaagaggaaccagaatccatatagccaattgaagcaatgtgacacatataagaactcaatttaggaattcaaggttattgcctggaatcattgtactgaggtttatagccaatcatagatcaaagatcaccagaaggaccatgtcagaagactgggcagtaaataatttgcagttgtttgttccaatacattctaatgtgccctttgatcttaaaaagttcatggacagatgatggtgagggaaataaaggacagcagagttcagtgatgggaggttgggatggggaaaagctgcaatgccgtgtgatgccctcagttccacagggcacattgtgtaaccactttgctttcccctcagcaggacatgcactctggcctcacgttgagttgcataagtagggatttcaattttttaaaaaaatttactttatcaatgaggatgctgtttatgacagcaaggacatcaagcccctttgtttggacataaggtctagggaaaaacccctaactcctccctcttctcccttctcagcagtctgagtttgccccaagttgcagtgcatttcaggttataatagaacaggaggagagtctcatctgggaagaaaaatgggaaggaccaagtggaaaactatcagggcttaggtattcaaaagtatggcatcaactggcagatatgctacatgttttttgaggtttctctacttctgaccattttggctccataagccatatttatcaataaacaaggagtaatctaccagacatattcaaagtgtggcccatgggcaggaggcattatctgggagcttctgggagaaatgcagattctcagactctaacctagagctgctaaatcagaatctccaggggtgggacccaggaatctgtgttttaataatccttccagatgattcttaggcaacctaggcaaccctctgcagattcctcttctgagggaggaggacgtcgctgtgtcactgagcaacagcagtgttatgtgggtgtttattaactggccaaagccccacaatgaagagcagcaaagccatgacttcatggcacacagactgaggggaaaaaccattagtttctgtttaatttgcccatgctaaatccacgccaataagtttgcaaaacattacacacctccctgtgactaactgttttgaaattatactcaagtgtttgggttgtttggggaattaaggtagaacatgttgtttagggaatctgagaactttttctcattttttccacagactttctataaatatgttgagagcttggactgggtcttactcatgcttttcttaccagcactggctcagagcctgcttcattagagctgattaataaatgtttggaaaatgaataaatgagtaataaatgaatgaaattcaatgaaggttttgtctttacctgtgtttataggttttatattgctctcagtataaattaccactaatgtagtagttcaaacaacaaacatttattatctcatagttttctatgtccaaagtccaactgggtctcattgggctgatcaagggttctgcaggtctgcatttctttctggagactctaagggacaatccattttcttgtccataaaagtggttggtagaattcagctctttatagctatagggctgaggtttccattcccttgctgagtgtgagctgagggcctttccccggttatagagttcactgcattccttggatcctggctctcttcctccatcttcaaagccagcaatcaagggttaagtacctctcaaacattgaatctcccctctttcttgttctcccacatcgctctaactctctaccttcctcttctacttttaagggcttatatggctacatgaaacttacccatatatacagaaaaatctcatatcaagattcataaccttcattatgtatgcaaagtccttttgctgtgtaagttaacatactcaaggattctgggaat

SEQ ID NO: 44772 - DNA, 1008 bp, Homo sapiens
catttagcatgagtgtctattttggtttggtctgatctgttggggcctattgcatgagctcaatccaaaacaatggcctcccataattttgtttaaaaaattcttcccttctggtcaagttctcatttagttgagagtatgaccaaaacttagggccttagtgccactcttactgtcattttgggttttcagtgtcagcatatcattcataggttccagtgccctcatggtcacacatttctttcagctcgtcattccagttgaaaagagacaatttgacattctagagatggctgcgtgcaaacatttaaggcttttaagagaatacaacacaccagggagactactatgactatcagcagaataataccaagggtttggagtatgctctttagctgggatacccattaaccaaagcaactaaaattaaacagatcaaagaatgagctgggtaaacagtctatttactttaaccaagcagtctgttcattaatcctctatgactgaatccccatagtatacaatttatttctccatgggcaacaagacatgccagcaactgcacggctacttctccatttagccagtaagtaatctagagcaattttaatatttagcataactttcacaacagaatttaaagtctgttgtgtaaccacagcctttactatagaatctgctagagatgctatcatgagagattaatttttaatcattacctaatttactctaaatcatgaaaaagaagacctaaaaatgacgctcatccaaaagaatgaagacgtcctggcaattttctctctctctctctctttttttttttcttgacagggtcttgctcggtcacacaggctggagtgcagtggcacaatctcggctcattgccacctctgtctcccaggctcaagcaatcctcccagctcagcctcctgagtagctgggactacagatgcatgccaccgtgcccggctaatttttggttagagactggatttcaccatgttgccc

SEQ ID NO: 44773 - DNA, 1521 bp, Homo sapiens
gtttgttaaaggaaaaaaggatgggagggaggggagaagggaagaggagaatttggctccccactttgcagataggcaactaagacaacagtcatacagccaattagtgatggagtcagatttctactccccatctggttaaagtccaaacctgtaataaggacactgctcttctgtgtcccccactctatactaggtgctaaaggagaagacacatatgtaaaagacaaaggttctgccctccaggactatataatttagtaagggagttaactacatgaataactataatataagttaggatataattatgggtccacaatctccaaaatgatttgttcagtatctagcttctgggtaaataattttaatgtgtaacagaataaaacaagttagtaaacagtctccatatagaaggttctcctttcccctggagccttgtggttgcccttaagaacaagaatcttaaaatttaaacaaagaggacactctctaacacaagtcagatccagaggctcaggttaatgaagatgcctgtatagttccgagactgacaacagattcaaagtcctgagaaacaattcttcactgctggctcataaaagccaaaatagtgtcattaaaatgtgatgtagtttattatctttcataagttggctcaaaagaggaaacttctttatggcttggaaaagatagaaagtgaattcatttttaaaagactagagtagacaaataatgtagtctctcgtgcataccacaccatctaattctcaatacagttcctcctttaaggaaaaataaatatgagtatttatatagttccaggaagtatctttctattacagggatggtggctcatggaaccaaaaggaaaatatgagtcacttgcaagggacctggttgaaaagctacaggttgagacttgtttgttgataggagtatttgtgacacctatgatttggaccaagtgtttactctgaggattgagaccttgtaataagatgagatttatatttctcccagagtattagtaaggagataagtaaagatctctctaagttccttggagcactcctattttatcttttcctcctttggctgttgtttttccttctgttaattttcagcaatctttttttaaagtggccatttttttcaataattgcaacttggagggttagatctgtccagaggtttattgggtatattttggcagtccagactgggtgagtaattatttcagctgcagattcataatcttcttagctttattttttggtctagtctctttccctttttcatttttaattaaagtacaagacaacttttcagcaagattaatcaaattgtgagtgtgagaagtagcccagctagggcaatgtctctttactattagagctaattttttgcgtagcccatttataaacttggagttcaggagagtctcattttgatgattagcagaactcacctcagataaacctgaatattgtctaaaagtcttttcaaatctttcaaaat

SEQ ID NO: 44774 - DNA, 502 bp, Homo sapiens
atgatatgtatcaaaatattaccacgtgccttaagagtatgtacaattatcacttgttaattttaaaaaatgaaattaatttttaaaattgtcttgccacaactcaatgcaagaattggtacctcaggaacgtattaactcataccagagcaaacacaaactaattcctgtaacagagcagaatgtggcaagtgctataagaaagtgaaaataaaattctatgggagcccaaaggtagacagattgcctcccactgaggcaacttctgaaataattgatatttgagctgggccttggaaaggagccgctatgtccccagagggcagggaactggggcagagtgcattttagacagaatgaggaggcagagcagaaccagtgaggtagcaaagttctatttgtccagagtacggggtgggcaagctgtgtgtgtttgtggaggattgaggggtgctaagatctaagtgcaaacctggctctattgggcaggagaagggggaag

SEQ ID NO: 44775 - DNA, 915 bp, Homo sapiens
tattcatacattcaacaaatatgatttggtggaattggttccaccttcgactccagaggccaacactggactctggccaggccagagatcacaccctgttggccataatgaatgggtcggggatagtcattgatgcactcagcacccataaagctaaattcctttcaacatctatggaaagattgtgaataaatgatcccttatcttgccaaaattgaaatagagagcttgggtcataagcctgcaggtttggggagtcatcttaacacacacaggtagactttaggatcaggaaatatggagagcatgatagagtcctaataagctgtttgaactccttggcacatgcttgcctgattacttacccttggactttacagtaacatgagcttgctttgttcgggtcagtttgggtcacattttgtcacttgcaactgagcaaaccctaactgaaacaacctggaatactggtctggtgccatggaatatagccatgaacatggtccccaaagttgatcacctttgccctgtcaaataagtaggaataaagcacagcccagtctcagcctctgctatgatgcaatcattagttggatctattcaggaaaaacaaaactactatctattccattgggcctgagtatctcatgaatatattttgtaaactatgaagtcagaaaccagtcgacagatatcaaacaggaaaatcataatcacaattgtgctggccacattgtttactttctgtccctgcttaatagtttttcttttttgtcaaaggtccaatgtcctgggcagaattgatgtctattttgttttttccattatgaagctgtgtgtccttgggcaaaacatttcatgtatgtgtggctaagtgttctcattgctgaaatggagcagggagaaataatatct

SEQ ID NO: 44776 - DNA, 2317 bp, Homo sapiens
ctcacacttcggggtgattaaattttacctctggccccggaggattggtagagagattcgacttaatcaccaagccggggctgcaaaaaagccagcttaccagggcacctcactcaagtacatctgggaagtaggggtctttaatttacattacagatcgtcagaagcaaggataagataaatcagatcatttgggggctgaaaaaaacgacggtcgaatatttaatctgcgaaacttggcagtggatttgaataaacccacagtcggggaagttagttaaattggtttgggaaagggaacagcagaaattccgtagtggcagctgacggccacaagacgctattttacatgagtaaaaatgcttgctataaggtgcccggttgcaggcgaccgaaggcgcagtgatggagaactgacgcgggtgacttgtcttcttcaacatcacacacttctcccgatggctgatgtagtgctcccctgggagcaccctctgctagtccggccagacggttccttaaggtgtcaggagggcccgaacctgagtgcggtctctccgcatctccgcgcccggggttaacgatggcttgggagtgtgggcattgctcccgaggccaggggcaggaggactggtggtttagaagcagaggggtttgcgggagagaagagaacagaaaatctcgcagacgcgcggtggcctcccttcccggcgcctgtccgccgttcccggccggaggtcagcaaggccagtaggatccaccttccgcctgcgctgtggccgcggagccccaagcgagtcgtgccagccccgcggctggccagcgagggggcgagcggcggacgcagcgcggcccgagcttcccgagccagtcactttgggctgcgtcccccacgtccattcctcctcagacggggcgagtgggcgccgcctggcattgaagctgcagcgcgctcacctgtactggtcgaacttggcgtacattgcccactcggtggggtcgctctcgtaggcttccatgatggcctgcacctcctctacattgacctcatcgccggcaaagagctggtgcaggatgcggatcagatcagccagggtccgtggcttcagcacttcggtctgttccatctcgtggggagctggctgcgcgcgcgtctcactgctgggctgcggtggaggagctgagcgagccaaggagctgggggcgagggagcctaacagcccgctagaccgctaagcagacacacacgcacaaacccagcattagagtgccgaaacgtaaggatgtcgtcgcagagacagcaagagacccacccccaggcccctggcagcgcagtggatccgggatcgctggagacgcggtgcacacacaaatcaggttcagatctgtggggttcatcctcccgggccccttttaagcgcttggagtcactaggaatgtaccaacggccctcggagggaggacgaggcggagagccacccaagaaaggtggcggaggcggggagaccctgcgggcacggctcacgcgcacatccccggcttccccgggctccgcgccttcccaagagccccgttgtctccggcgtcccagggatcgcgtgggctccgcgcaatctctcccccactttaacggcgcgttttagccgcccggcctaacgcctctccccgctccacctccgccgctgtggttcgcgacgctgggacgtagacaaaaagggtcggaggagatggctgcggggactgacgctgagtaaaggaggaaaagaaaagggaaggagagggacacttcttccaaatagagaattgtgaggagcctgcgaaaattgaggatggattccactcctaggccagagagtgcctgttttgtcgattgaaactatccacgatatgccccaggctaggtgaaaataagtccaagactttatatatatatatatttaagtatacacacacacatattttttaaaatgcgtactgaaatatattttgacaaaggagactcgggtctctagtaagacaattagtgaaatgatggaaaaccaagaactctttgattttaaaatcaaatattttcttttaaaaaatatccagtgcaaataacctgatatttcatttgatggtgtaaaagggggctttttctgaggggatagggcgggctctgacgcaataatttaagaggctataattatatttgaatctttcaaccttaggcatgtgcttgaaggagcctgctagtacatacatataaggaaacacgtttctacgtcatgcatagcacctagtacgttgggaacaacacaaatcaagtacagtaggattt

SEQ ID NO: 44777 - DNA, 2410 bp, Homo sapiens
catcttaagacagaacggggaaaacgtctaaggacgaaatcagcctctctgaatcgaggatgcttatatgctgcttttcccataggcaactctaactctaaacagagtgctttagaacacgtaattttagcaatctcttttacaaagggaaacattctcaagcaataaagggttgaggatagctgactcaagcaatgaaataactcacaaaggttccaaaatgtgtttcttaaaaaggtaacatctatgcctttagctttcccttagcagtcttcattctgcataagaatttggtttttggtttaaggagtgaattcacaaccaactgggagggggaaaaaagcaaaagcgagttaagttggaaggcatgaattctaatccaggctttgccaatgaccacccctaccaccataaaacattactcaaataattagctcctgtgttaagtacctggaattaccgagacccccctccccccgccccactcagctccctccctccttcaaagagctcgcagtctggccaactcaaaaaaatacagtataaaaataagtgtggcagccaagtatcaggccctacaccgatagacagagatggtattttaacactcaacttaaaggccttaaaaatcaaaaagtacacttcttttcttctgatgactggtcaaaatgcaggtctaggacaggcgctcctctaaattttgcttctttactggccgccacccctactcggatgcaatctgaacctcccgcctctctgcccggaaataaattcagttactttttttcttggtgtcgccagcaggttcctctgttcccggggaaactgcagcggaagacgggggctccggggtggttgtttctggggagacatccgtaagtccttcccctccagcagcaattgaagtaggaagctgcaacacagactgcggctcctccgccatcttgcttggagacactcgagagcggaagtagcgactgagcgcgtgcagtgggcgtgcttttctccagggagcgtcgcaaaggaggcgccggagtagggggacgcaattacacagtgaaacttggtgttcccggctagtcattcaaatcgaagctgtcgcagacctctgaacgttagtaacgcaacatgtgtttctccgcgactacagacctcgggagaggagcggtgggcaacgtgtctgtgctcggtcgaatgcgcacactccagttaggccgctggctcggacctagaaatgtttccgctttccttagtgcctgccccgcccaggccccgccccttgggccccgcccgacggctcgggagcgcgcgcggtcgcgtgcgggagggggcgggtggggaaggatcgcaggcgagattacgaggcgaggctcgcgcgcccgcccccgccctggcccccagtgcccacccggtcggcccggcacagccatgatcaaggcgatcctaatcttcaacaaccacgggaagccgcggctctccaagttctaccagccctacgtgagtatccagccgccgctgatccgggcgagggggagtcgttggcgacgggcagcgcccagcgcggctttctcagagcgaccccctccggcgcgctgcggcccttgtcccgtcccggccgcctggcgctcgccagctgtcagcctcctggtgggtgtggacagggtgcccacctccctgccgcgcggtcagccaccgacgtggctttgcccgggcggttcctccgcccgtcggtgggctgcatgctttcctggctgcgcgggcgaggccctggagacttcccggggcccggccctcgccgatcgggcagccgcagcccagccgcgccgcggagccctgcgcccagtccccaagagcccaccccgcgcggctgccttcctgccgcccgcggctgcagttagcccgggaggaggaagacggcgtggaactcgttcttctcgcccccctccgccgactcccatcctttccaggtggacttctttctgttctttggacagatgggctaccgtttttcactgtggtcctctcatagcacaggaactttggcttcctgcgtttgataactgcacgttctgtacagtctctcttctgcatgtttcgatacgtgacagactgcccagtgtgactttcaggtgtctccttattgaaaaggaagatatgtgaggacctaatatttttatcaggctttttaccagctggctgcaaattatttaccctcgaagtaaccggcgacgtttgtagttgactgattggagctgtggttctatacctaaaagttatgatttcagcttctggtttggcatttttccacgtatgggaatttgccctcatttatagtttttttctatttatgaagaatagtagcatttgtagaacttctcttttaacgtgtaaatactgtttagtatggaca

SEQ ID NO: 44778 - DNA, 1893 bp, Homo sapiens
ctgcactgtcagactctaaagaagggtgcaacaaatacttgtccatttagactgccggcaaaccctgagggcaggaattttggccttttgtatctccagtgcctagaacagtgcttggtacacagtaggcactcattcattgaacgttgctgaaggaattgaacgtacatactacaagccctgcagatgcagatacaggaggggttgacggcacagtgcttagggtggaactggaggcaccacctctcctgaggggtgatgcgccgcttcctgggcaggctcgggggagctcgctcaaatgcctgcctctctgtagcccaaacgctggaaaaaaaaatactcacaaatcacctatccaagtatgtacacacaggctcacttaaacccgccctattaaaaaaatatacacacgcacacaccatttatccaagtatgtatacacgggcttgcttaaacctgccctattaaaaataataatgtatatatttatgcacgaacatacacacatatatctatacaggtctgtacatagacttgcttaaacctgccctattaaatacagacacacacccctatccaggtatgtacatacatatataatatataaatataaagacatatatatgcacagacttaactccaacacgattggagtgtcgggagggcaactgggctgccctctccgccctccaggactgcgggacaagtctcccggcgcccgggtcgcaggagacccggagccctaaaacggcccctgcgcggcttgggccttccggctttccgtccgccgcggccgccattggctgggttcggcgcagctaacagacggcggcagtgcgagaaagccgaagatggcggtccccgcggcgctgatcctacgggagagccccaggtagctgatccgttaagctcttgcggtagccgcgcccaggaaggcccagatcgggctcgcacaaggctgtccttgctgcctgccgcctgggcgccgcggcgggcccggttgagtggggtggggtggggtgggctgccgaggttgcgacgctgcgtctgcggagtgcgtggggccgtgtagcgcctctacagtcacggtggtccacctgtggggctcacagtgcgcctggcagctgaggtctgtacggaagcgtgtggtctgcaagcgtggggtctgcgtcactgttcgcggagtttggtatcagaagttcccgggtgctgccttcagtgctgccgaatcacgtggaacggtattccgtttccgatttcagttccggttcagacactctggtgggaaaggctcacgctgctgctggagggtctttaatagccaacatgtgttaataccccttttaaatcagtatcgaataggggaccgaatttttggttggtagaagaatctagcctggctttggtagcatttgcttttatttgcattttaaacagatttttagttaatttctacttatggtagataaagttggttgtccatggtagtgatataaagctcccctttaacattatttaagtaaaaaaagactcaatttgtgaaaaaataagcaatagtgcaggtagcgtgtggatacagaaaaagtactgaagtatataggcaaaatagtgttcggaagtaatttctttgtgcttggattgggtagaaatctttcagaagaaaagagttattttaaagtttttccttctttctggattccttttgttaccagtggagggtgtccaggttcttggcgtcttgaacaaagaactggagaagacgcacaaagaaagcgaggaaagaatgaagaagacatttattgaaaatgaaactaccctccacagtgtgggagctgcttgagcataggggctgaagggcccctacagaatttttgggaatttaaataccctcta

SEQ ID NO: 44779 - DNA, 709 bp, Homo sapiens
cagatgttatcattctttggcctcccagaaagtcagtaggcaaaatgacttgaacatcccagaacactgttgccatagcctttgctcgtgactggaccactttcatctcttggtagccattgttctgactgtgctttgtcttcaggatcatactggtaatgccatattacatatcctgttaccattcttggaagaaatgcttcggaatctttatcccactcatttaaattttcattgaaagctctgttcttgtctgcagttgatctgggtgttgtaagagttttggcatccatctagtggacagtttgctgaacttatttctcaatcacaatcgtgtaagctgaaccaattgagatgtctgtggtgttggctctggtttctgctcttaatttcggttctcttagggcatgaacaagattatttttttcctctcaaatggatgtggatggtctgtcactgtgggcttcatcttcaatgttgtctcgtcccttcttaaaacaagttatccatttggaaactgctcatttcttttgggcattgtctccatcaagtctttataaaacatcaatgatttcaccacatttcacccacaattcatcttaaatgtgatgcttgttcttgcttcacttttagaagaattcagtttgctctgataggggctatttttaaatgaatgtcctatccttcttagtgcctcaaactagatcct

SEQ ID NO: 44780 - DNA, 433 bp, Homo sapiens
ccagtcctataaaacaattctacaaaacaatttcaagttcaaaattattattgagaacttttaaacaggatatttagaagtttgttttattaacttggcctaggtcacaaaactcattaatattaatgactagactacagaggcatgtagcctgtctaaacattaacagatacaaaacattaaaccaaattgtgaagcttcgttatgctatgagtcatttcaggcaaagaccaatatagcaagcaaaagctgaacagtccagttgaaatgtttctgatctaagcctttgacttctgtttgtagatgaactggagttttgaaactgacactcaaattttttattgacttcatatgaataaatgattcattaaaatataatacttggaactaaagtcatcattcaaaaaaggcatttattattaataaactacag

SEQ ID NO: 44781 - DNA, 1428 bp, Homo sapiens
attcttattttgcatacgacccttaatgcacctgcctcaccttctctttggaatgtaaattgtcagattattcatgggtttttgacataaagttcatttggctctggccaccttggaaaagggagacttgtttaattttttttttcttttaagttctacatgctctctggggcatttggaaagggtggttgagtagaattcggtatatttgtaagactttaaaaaacatcataggatgaaaaggaaggccacaaaaaggaaatactctttgcataaaattgacgttcctgactttgccagattttgttccagaggttaataaccttctgtttcaaaacaggaaagaagctgaatcacagggagtcacctccacatgggctttgctagataattattcagctgacagtttagagagctttataaaccttgcttcatggtctctgaagactgaattcattatgtcttaaaccaaaaaaaaaaatcccattggcattttcagatcttcatactttgtttaaatatgtggtttacctgtttaaagacttggcaaagaggattaaaaaaaatgcctttcttaacagttacatctcagactttaattattcctatttttgatcttctagctgtagatctagaattaaacagtcttcctttaatgtgggtagctgctttaaaaaaaaagaaagcgtttttcaacttgtagacttaaatttttttgtctgtatgaacagcttgggtggagagagaaaagaaagtgccaatttatggcctttttttttactgggaagccgatgggtaactttttggaaatgtctggagtatcttgtgctatacagactggtaaaggcaagaggagtgcttagagttgcccatgtctctcaccagagctttacatgaagatggactttgctcccaagaggctgtgtgggccgggagggctgaggtctgatagggagagggtattgtgtggtgcttgtaagttttacctaagtggcaaaagagacaattttaccttagagaactctcttaactcatctcccttgttgttgtagctttaaaaagatagctgttgaggggaaatattttaaaagcccaaagcagtctcctaggcaccagccatatttagggagaattaagaacatagcagagctgcccttttccttgggtgatattggtggggttggcatatatgagtatttgggtttcttatagttaagtttatatctgtttgtaaaatgtgaatatgtatttctctctgtgtggggaagggtggatatacagaaatgtgagtaaacagatagttccagaaaaagaggaactgtcccaagaacaggaaggatggagccactctaggatcacaataaacagacaggaagagagtccaactgtgtgttgcaagatgatggattaactcaatgtcctgagcaa

SEQ ID NO: 44782 - DNA, 499 bp, Homo sapiens
ggatcagatgctctatgctgtgttatagctattgggtcaatgacaaggaaacaaggaaaccatttttctactagcacaagtattttaggtaaagatctagacaatggcatctctgaactcttcatttttcttatcttgtttttgccattagtttgatatttattttgcatgtctgcccatttgcctatctagacaattctttattcctggagcaaggacaaaagtttatcttctctgtgactaactcaaccctgatcactttgtaaacatggcctttgaagtctgggttgtttaagaaaatatttattcagcacctactgtgtgccaggcatgttcccgacactgagtattccccatgaacagaagaggtctctgctttcatggagcttatattctagtgggcttccaccctagtccttccattagtggctgagtggccttgggttatttaatctgtgtaaggctcaggtttctgtgctctaaagtgggataatgatgt

SEQ ID NO: 44783 - DNA, 1619 bp, Homo sapiens
attcaagcagtaaagatcttcaaccatattcagtccttctgttccccttcttggaatgcttttcccctggctggattcttctcatctttcaaatctcagagatagttcatgacaccattgagctattttctacagtagcaacccattcctttccttcactgcttttttcccagtttgtaattacatatttgattgcttgtttgctggtttattatccgtatccagtaagagaatactctacaaaaacatgaactccactgcattgtcagtgattaccaaagcactcaataaacacctgataaattaatgcacaggtctggtgttccgaagaaaggtctgagctagacacactgggatatagatgataatttaccatgaaaactgattttataaattaccagtgggacgtatgtagggtttgaagagaacctagaatgaacacctgaaaaggccctatatttagagttctggtaggataggtaaaggagactgtctctctcctccaatccactttatgctttttaactgtgatataactatgccacttaaatatgactgtgtaactattttacaagtattactgtcatcaccccttacttcccctattggacgcttaagtttcttggaaacagaactgatgtctgctcatcccatgatacgctcagcatattgcaggaagtaaggttagataatcatgaacctggaaaaagggcttcttactaggtagctgtgcctggcatttccgagatttccaacgtgcacccgccaactccgccgccctaatcgcagagctgcccgagccgccgactccccggcagggggcgccgcaccctcctccgaaggccgctgccggctgcagtccccgcccccagccccgcggtcacctgcagcgggtgcactcaggcctccgctcggccggctccaccggcagctcccacagcccgtccgcactgtcgtcgtccgcctctgcgcccagggcagccgccgccggcactgcgccgccctcccgccgctccttgtcgttcggcgtctgagagcttgaggccccagaaggccgcgcaacgggctcctggagtgttcgtgcctctttctgcgactccatggcggacactccggtcaggccgtggcattgaagcccggctgccgccggggggcgccacgcgctgtagaaaccggcccgcgccgcgtagcgcaatgcccgcacgccacgtacggggggcgggtctccgaagcccaggctggaggtcccaccctgccgctgggaaggaacgagcccattggtccgtgcccagtgggaccgttcacctagaactgggtaggcaagtgtgggcagtgttggagtgctggtgaggttaagtagcgtcattgggagaggtaagggaaacctccccgagaggaccccagtaccaagcccgaatttaactcctttaaaagttaaaataaaatggaattctgcattttccgccttgggatggcagtttaagaatttgcaggatttccacgcgtgcatgcatcgcaggtgcggcagctgatgcacttattatttaaaggccaacaaaggagaggttatatccactgggaactactcacagctggtccgtttccttatgtgaatttcc

SEQ ID NO: 44784 - DNA, 1361 bp, Homo sapiens
gcaaaataattttttcttatttgagaataggaaagaaaaaaaaatttaatgaaaggtaatgagtgggtcctgtcaaaaagcaaactcagacttagtaaggagactttgttggaaggattattctaagaggaaaagggtctctttcaataggagaaggggagctattgcaataacaggaactctttgaccataatacctgcaagcttctcaagagttaggtgaaaagagtttttcttttatagagaggagtaaactagattagaaagatttggatgtgggcaggtgggataagagaatgggattaaagaatgttttacccagaagccagccttctctccagagatgctgttgaagaagggttacatgctgactcagactgaggatgggccaaggttcagagacctggcggatagatagaatcttaaccaaagtgtgattaacaagcattttgttcccattgatcattagtacaaacaagcttagttaatcatttatgaggcaaagagtgggaatttggagtctgtttctggccttgtcataggtaaacaaggcagtatacatgagttttatctaaattatatgggaaagggtgcttctttgcagcaaggcctttctgaaacacaaaagggtgggggatttctccatcttgctcttttccaggagcacagaacttaggtgaaattcaacactgtcaatttcttctaaacaaggctgccatgttgcacaattctagagagcattttattatttcccagataggcatgtaaagatatgataattaagactaatcaactgaaaaaaatagataactgttgaagagaattcattacagtacatagaagaacctaaaacatgataaaaaatgtaatagccatcaatgaaaaaaatcacacattattaaaagtaagacattgccgggacgcccacctcacacgtgcgagggtggcgggagccatgggggctatggggatgagccacatgctggcctctttctttgacctggacagcatgctcatcgacatggccagggtgagcaggagagacctgttggaggtgataaagctcttacaatcaaaatatcattttaagaaaaggctgaaatcatctgtgataaagttcaagttaaactcaggaaggaatgttttcatccttacagtacatgcattactgatctaaggacttcaattgggaagaagcagtccaggaaacaaaagatggtgccgccaatagaaaattgactggagaatgtcacttcctttggaaatctacacgtttacagcttatgacactagcagaaaatatcaaagtcatgctcaccgaactttgaaagaaggtctgcctatttttattaaggaatgggg

SEQ ID NO: 44785 - DNA, 1218 bp, Homo sapiens
aatgaatgtgaataatagagaaagtggtatggggtatatgggaatactgtactatcttctcaatttttctgtaaatctataagtgttctttaaaaagtctatcatttttaaaaagttttcagttattctaataaaagcatatcatttccacattaaatcatactttctgttagttgaagtcattttaggaggctaatatttctgaatctttaaaaatttatgctactgataggcttaattctactttaaagtgaaataggcaactgatttaattaatctaacttatggtatgctttggatattgtgtggatttttttaattagcaaaaaaactaaattaaattcaacaagaaatccttctttcaatttattttatttaacacaatgaccagaaacctacagaagctataaaatttcttaacgaaacatttcatatgggaggaaaagtttttatcccctacataaaaaggttattacagaattgatctataccaaaattaaaacatttttgaagttttataaaactacatgttaacataagactctccaaccttgtaattttctagcaccttttatctgtgcagtcaggcatttcacagcaccttatgatacatttatagtgacttttcctaaatgggagaagcagatgagtcaaatgacttatactagattctccatgagtcagaggtacgactgttccaatgagtcattacctatcagttctaaagtaattgtcaggagaatcatttaaacataaaccccagaaatcatagaaggaaagaacattttaaaacatagctattttcctactagtttttaacaataacttgtttgagaataaatttagaaggattcaaatacctaaagacattgttaaaatgcaatgcaaagacatagatttttgtttgcttgtttgttttgaaacggagtctcactctgtcacccaggttggcgtacagtggcatgatctcggctcactgcaacctctgcctcccaggttccagctattctcgtgcctcagtctcccaagtagctgggactacaggcgcatgccaccacgccccgctaatttttgtatttttagtagagaaagggttttgccatattggccaggctggtctcaaactcctgacttcaggtgattcgcccaccttggcctcccaagatatactgatatctgttgcatttatgatagcctacataggaagtacattagaca

SEQ ID NO: 44786 - DNA, 1154 bp, Homo sapiens
cccgccaccacgcccagctgatttttgcatttttagcaaagacggggtttcaccatgttggccaggctggtcacaaactcctgacctcaggtgatctgcacgcctcagcctcccaaagtgctgggattacaggcgtgagccactacgcccggtgacaagtcaatagttttctactaattccgtcattactatctggtatcctggcttgtaagataaccaccttataagtaatctaacaaataacactgtggcagaaaatataattataaaattattagatgttataaaacaagaacatctgatcacagagtttttgctactttgtcctttagtgataaagtttcttacgaaaacacataccagaaataaagcactaatattttgtatacaagtctaaacttttataataattagttctcacatagactaaaaaataggttgggcccagatacccttgttttcaaattatgaaatgtaagattgtgctagtaagagacgtatttcagacaacccatttaaagcagtgtggttttaaaaagtgaataagtagaaaaaaacttgatctaaagcccactgggaaaaagatacgttaccataagagatccagtaattctagaacagtatgatgttggcacaggaatctctaaccttgttggtggaggcctatgaggtcagtaagattgtgtgccaagcaaacagcagattctaatcaaattcctggttgcctggttacagtatttgataatgaaaaatgaaaaccttgttctttttagttagtacatgttctgttagtataaatttatagtgacagaactaataaaactctgggaccttgccctaagagtacatgtaacataatgtaaggtaagtccttgttgaatccagcaaaatggtattaactacatgaaatacccaaaagccctcattagaaaggaatcttggctaggcgcgggggctcacgcctgtaatcccagcactttcggaggccgacgcaggaggatcacctgaggtcaggaatttgagaccaacctgaccaacgtggtgaaaccctgtctctactgaaaatacaaaaattagccgggcggggtggtggtgcctgtaatcccagctactccagaggccgaggctggagaatcgcttgaacccaggaggcg

SEQ ID NO: 44787 - DNA, 1065 bp, Homo sapiens
accttgctgtgtctaccaattctaaactataaatccatttaattcatgtaatgatctatatctaatcctagtcaacaccatcacacatactggaattaaaaggtttgccttaaatcaaatttcaacatctcaataaatatcccaactctgttcttccttctctgagacactattaagactgttgaagtagtgttctctctcactacagtaagcaataaacaactttgtcttattaacaggttgattaggtgatttgggggagccagctttcgacagtccctgaagatcaaggattatttcttatttatttccgtgttttataacatctagtaaagcataagatgcttactaaacatttatttatttatttactgagacagggtctcaatctgttgcccttgctggagtgcggtggtgtgatcatggctcactgctgccacagcctcccaggctcaagtgatcctcccactttagccacccaagtagctaggaatacagacacgtgccaccatgcctggctaattttttattttttgtagagacagggtctctctatgttgctcaggctggtctcaaactcctgggctcaaacgatcctcctgtcttggcctcccaaagtgctggaatttacaggcatgcaccaacatgcccaaccagtaaataccgtaaaatgttgcaaatcagtatttgctgaatgaatggatgattgcaacattttgagctctagaatgttgagcaagttggcaaggctttctgagaggagttggttctcctaagaggtgttaccactctaggaagcctaaggattacagttgttagatttaacatatgaaaatatagcaagttggagcaaagaggatttttagggaagtgatattaccctgcatgatgctgtaacagtgggtatattatcattatactgtcgatgaaaagagtcaaactatgtaacatatttgaagagatttattctgagccaagtatgagtgaccatggcccatggcatagcccttaggagatcctgagaacatatgccccaggtggttggggcacagcttgcttttatac

SEQ ID NO: 44788 - DNA, 2626 bp, Homo sapiens
cagcttcccagtagctgggattacaggcgcgtgccaccatgccaggctaattttttaatttttagtagaaactgggtttcacaatgttagccaggctggtctcgaactcccaacctcaggtgatccccccgcccccacctcgacttaccaaagtgctgggattacaggcgtgagccatcgtgcctggcctattggagagttttgagggttgtttgttttgagacgggatctcactctgtcacccaggctggagtgcaacgggggtcttggctcactacaacctctgcctcccgggttcaagtgattctcctgcctcaacctcccgagtagctgggattacaggtgggagccaccacgcccggctaatttttgtatttttagtagagaagggggtttcactatgttggccaggctggtctcgaactcctgacctcgtgattcaccctcctcggcctcccaaagttctggaataataggcgtgagtcaccgtgcctggcctatttggagagtttctatacacattcatgcaacatttacagaacaccctgaatgggtgggactggtgcggtgctagacattaaggacagacttgtgtcctgttcctctgtattccaaagaggcttacggtatacagggggagacatataaacagatgtttgtcaattataatacaaaacttgtgtcaaaatacaatgagagttgaatctcagtttgtagctgtgactctgatcattctggaattcctaggttcttttccaaaacaaacgctcaatgcagggctggtgtgttgttattaccagcactatttcaaatcacgtgttaagataacttaggctaagaaaataccactttcctacttgtcaagtgttcgagcctttcaaaaaccatcccgtttagggacttggaaacacgcgcaaggctggagaaaccattaagctgctaacgtagacgtttcaagggtcacatttactcaagagacactcaggtcgcccgggggagcggtgcatattgggacttgtagtcctaccagaaccgaggaaactgcaactccctttaggatgcacttctcccctttaaattttctggcccaacagttagatgacgccctaacctaaagcacaacttaccacatctcactcattctgggttcatcaggcttctgccaggcttatcaggttcaagctcaaacgcacggcgttctcctgtagaagcctcaaagagattggcttattctcggtggtgggcggagccctaggtggaccgggggtcgggattggccagtttctgactagaagaggcgtttttatgttcacttgctgatacgcacgctgtggtaaaaaagtgaattctttaccacagtagcagctgccccgagcgaagtctcgcgatatttcggccgcagggatccagaggcgcgtagtgagtggcggaggactgtgggggtggcgggcaccggagccgggaagggacaggtcaggcggggagtgcgagcgcgtactgcttgcgccactcgggctgggtcaggagcggctgcccgaggtccagaggaagtgtgtggacagcgcggccttcctggccggtgagtcggccccgggtcgtggccggtgaggggaccctgagcttcacctgggctagcgcggggagtgacaggtgcgcgaaggagcgcggcgctccgccctctcgccgacccgccccctccgggcctcgccctccggggctcgggatgagtcgcgggccccagctgagcggctccggctccaggcgcctgtcgctgcttctgccgtcgccaccgaagagcggccgccgcccctgagggaaggagggagggaagcagccgctgacccgtggcatgagctggatgcggtgtccgttgcaggactagggcgccgacatgaacctgcaccaggtgctgaccggggctgtgaaccctggcgaccactgcttctccgtgggcagcattggcgaccagcgcttcacggtgagtgagggaggccctcgcgtcgcccgtggcccggcctttgcccgtcattctgggccgagcttggcccagaacgacgggcagaggcgcgaggtcttgtctccccaggggggtccttaccacccagaacccagcagacctggcccttgagaactaaggaagcaaaaccatgtcggtcagtgaggtactgtatggagcctgaactcaagttagaatattttgtaggatttttaaagtttttggtctgtctgccttgggccagggtgctttgccaaagtcgtttgttcaaaaatctttgttgagtaacgagttgggggcttttttataccattctataggttcaaattgtcaaatttaggaatagtggagattggtttcattttgtattctaagttaaggtcaagtatctttgtagttaaaaagtgggtgtctcaaaacaattaccaattgtttgccatcaacaactagccttgagaacagtgtttttcatttattttcttttctaattccctgagaaataacttcggaaagaaaaaaaagccttttcatttttaaaaatatttcttggatattttacaataacctggtaatcccaggttaaggttgcttaacttgcttttcattggtcacatattgacaagaagaggg

SEQ ID NO: 44789 - DNA, 1145 bp, Homo sapiens
gctatttttaatatccttactaaatttgcagctgagaaataatacctcttgctttaagttgcatttttttaaatgccattgagattttttttgccatttgtttagttgggaactacctgtgtcaaaaactatgaagggtctcagattttaccttaaattaaaactaacagttagctttctgtttctgttgccacagaaacagttctgtttgaggcaggcagtggattgtttaaacagtccatttaattgatccattaaacattttagtggatgctgttagaagacatacgactcttggatcagagacaaaggacagtttatgtctaacagcaaaagcaataaccagaaaatcagcactttacactggttgcctgagccacaatttccagagaatgacgggaagagggccagatgatacctaccttacctacacacatagtaggttatattacaggagaggatctctgagtttaggggacccaaatcttttataatcgatagtaagcatacttgccctttgctctggagggagagacgatagttatacaaacatcctggcaattatactgcagaaaaaagggcagacatgactcacttataaaacatgcagaatttgggatacccatggagaataaccacccaataatctagctatatcattttttcatttatttctaaggtctcagttttttcttaatagtttgtgttaaaatctaacataacagtaatggtaatcctattttctctttgctgtcaatatcttcctgttttctgtttcaaagatacacatttaattaattaattaatttatttatttatttatttattgagacagggtatcatgcctggtgcccagtgctgtggtgcaatgtcagctcactgcagcctcgacctcctgggctcaagcaatcgtttcacctcattctcccaagtagctgggactgcaggtgcatgccaccatgcccaactaatttttgtattttttgtagagacagtgttttgccatgttgcccaggctactatcgaactcctgagctcaagctgtctgcctgcttcagcctcctaaagtgctaggattatagacgtgagccactgcccccagccaagatgtacatttttgattcataggcatttaaaatttcatg

SEQ ID NO: 44790 - DNA, 1846 bp, Homo sapiens
cctctgccccccgctgccatgtactaggtgcttaatggatgtttattgtatggatggattcatcgtactcccaccaaggtccctcgcccttgaaaatggctaccccgggccagggctcctcaacagactgaaggtccagatcctactccatcctggcggtctcgggtggcccctgaggagggcaagccttctgctccacaggcaaggacagtcacagctaagtccgcggggggcggcagagagcgagggctttccaggagccaatgagtctttaactccaagaggaagccctgcattctccgcaaatggaaaccaggaatcgggagcgcgtcagctatcgtagggtagacttaaggcccgcagaaaattaaaagcaaaagagcaggcggaattcaggggctttcacggatcatcatcataatagtcaataatgatggcagcagacactaacattcacgcgttcttgttaagtgcaaggcacagtgcaaatgtgtatggccccatttaaccatctcaacacactacgaggttggcgtctcatttttacaacggaagaaactgagaggctcaggaataccgtatcctatgcacatctcccaagagggtcctgttctccagcgcccagcgatctgggcctcgcggtccgagtccggctcccgggccgccgcccagcccttctccgcgctctcctgcgcctgggccacttccgactcctgctgtccggtccccagctcctcctcacccactccgccccgccatgccccgccccagccgctcggctcctccttccctgcacgctccgcccccgacctcccggctcctccccggcctgcccgccacacccttggtccctcctgcaagttccgcccctggcctctgcctccttttctcccgccggctctaacccgcgcttggctaaggtccgcgggaacccgtgagccaccgagagagcagagaactcggcgccgccaaacagcccagctcgcgcttcagcgtcccggcgccgtcgcgccactcctccgagtaagtggctcctgggcgcgcccgtcccgcgcacactccagcgcgcctctcccgccgctgggctgcgggctgctctcggggagcgcctccggctcagagagtttctgaagcgagtgtgagtgagtgtgagtgggtgcgtttgaacaacttgtttaggtgggtgtgcgtacgagtgtgtgcaggagcgcacagcctcggaaactccgcgaaattttactcggttccagtgccgcactgaggatccaagaccccttttaggaacccttacctattcagggcgacctcttaaccacctcctgccgtgagcctcattccttccctccctttgtaactgggttcccgctatttgtcacgtcctcctgtaaccgcacatactggcgaaagcactgcccgggttatcagggtgccccagattgcagactgagatgctggcctgagattgtaatccaaccttgcattgtaaaacgggcagagaccagagccctgctttgagatcattcggtggagacttcctttgaggaagaaaatgtgtgtgtgtgtgtgtatgtgtgtgtgtgtacatgactgcacatgtcgcactggagccctcagcacctgctgcaaagacacctgatgagcgcccaggctccacggactcctcgcgactgataggcacgttcaagaccaggctgacccaacaggcttaggcaccttgaatatgtttattgcttcagtgacactgtatttctaaaccaacagattttcgaaaacacagaagctctaagtagaaaaagcagtatccctagaggaatcatggaaggaatcaaacagtagttcagtgccc

SEQ ID NO: 44791 - DNA, 1670 bp, Homo sapiens
aaaaataggggagacagagattgtggtgtgtgctatgtagacctaactacactcgtctttcctgtcctgagctctcttctgactgtgttcagaccctcacacacatgcagacacgaaaaaaaatgccagtcttctgagaaaaaaatgcatggacagtgttggcaacagtgcaagtttcagaacaaactttggtcacgtaaatctttgggaagtaagtccagtacctcattccatcattctgtggtcaggaaactactcttttatttttccttcttcactctttaaagggttgagattgttttctggaaaatggcaggtgtttggttaaatactgttttgctacacttgaagggcagagcagtcctcacttagtgatggaattccttttgccttgaggcagaattaggctgctagtgactcatgaggtatacctggaagaggtgagtgaactcaggccttcccaacatccggtgatgacctctgtttgcacacacgtagccactttgctcctttgcttttatgacctggaatgactgatagtgcctgaaggaacaggctgctattacttttcaaggtaagagaccctgtgtaaatagggagcctcctgaggaagcaaggattccctgccctgtgtacctgtggtgcttatcacctccctggcagggaagctctgcccaggtagggtagtttgagaacatcattatctgggcagctacaaaagtgatacaccaaatgaaactttgaacttatccaatgtgctgtattttagggctcatctgggactattcctgtgaacctgactgttaagtcagaatcaccagtgaagcttgatgcaaattgagaacccctagcctgggagacttatgtgactcattttcctgtcttgttctagaaagaagcttattcaggcagcagctagctgtagggatttttttttaattttttttttttttttggcagtggaaagagctcttgaaagtacagagtggctttaaagtttaaagaagattaaaatgaacacaacatataaaataaacacaacatataaaatgaacacctatgtacccatcttaagaaataacaaagttgtttttataggtcttcactgggtggaaaaatattaacaagcaaccaggtcaagaacaaaaaataacaaccaaaacaattagtggtgtcccacaaatagatccagaaattgaaggccatgaaacagagacattggagagtctgcccagtgttcattagttgaaaatctagacttgagtcaccaacaatgctgacatcataaatccagtatgccagctgacttaaggataactcaggtggtttgtagatactgaactgggatgggcatccttatttcaacagcggcgcatgtttggaagagcacgggcccaactcaggactcggagttgccaagcggaccgtttcccctaacccaggcctgtttcctgtcctgaggtcctggtacctccaggaatctattctgttctcagagtgtccctctcattttgtaatggtagaaaatgagaaaatgaaaaacagaccatttttttctttgaagccatgttctgtaacttcctcctgcttcttttgcattttgggttttgccagtacttgagacttccctttttctgaattttagtcagtttttaatttatcattctaat

SEQ ID NO: 44792 - DNA, 2779 bp, Homo sapiens
atgaaagtctaggaactagagaggtgtgaaacagatgttcctaagaattttctagtttatcttcaggaatgaaggtaccactttgattacataatttccaaggtcctgtcatgctctgaaatagttttagttgtttcagtccccatctcttagcaaataagggaggagttggttattcactcaccagatattttgaatcataggaccattatttagttgtcctagttggggtcaggctaactggccagtgcattgaacttgaccttcaaaccacctgttgaatttggttttaaggtatagcttccctgtaactgctcactggtactttatgagatagaagatctgtgctctcaagggtgacaacctcaagaaacttacattccaagagagagaatccagaaatatggacatccttttattagagaaaatgatttctagagaacactaaatagtttttttctcctctatttttagtatgtttcctgctagaatcccattttctcctctgcttctagtatgttttcagctagtcactgggtaaatgtaaaagtaaaaattcacctgtctttgggaaggatgttttgaaaatgatttatttttctcttgagaattggctctgctgaactgtcaaattattcacctttatcatattgaataacatcatcttctgccactccttttaccccacagtctttcagtggacatttcgtgagctcatctggagggtgttgctcacttgaccatcatcttttcattaggttagctggatcagtgcgttaatttccattcataattaacacttaaagcttatgacctaagatcgttcacctgccaaaacaagcaaaaacaccaaacagcaaactctcttatcatatgctgagatgaaaaggagaatgctttttatatattcctgggctttctctctgccctaattttgcatcattgttgaaggagagatgcttcctaattgagatttcccattcctgagtggagacattattgcgaattgttacgcagtcagccattagaagtacaatttctgccgtcattcatttgattttatcatgtgttagaactttgcttggaaggacctttcatgtctgacacactcttcagctcctcctccctgttagaaagactcccttcatgtgcctagtgccctgaaaaaaccacacactaggaaatgaggaaaccagagcctggtttccccacagattcctttaggggagcagctatgcagccagtgtaaacattccaattcaattagagataacttcttggttttccattacccatgccagtgaggtcatgaagaatatgcttactttaatgagtactgtgttttgtttaaagtgtatgtcatctagaaaatgctcagagtttggaagtcagaggcttgggtcccagttaatgttttgccactgacaacatgttatgcagaaggtgtttcacctccttccttctccctctgctgtctcattcctggtacagtatgagcagtgctgtgtgctctgtaatgggctcagttagatggacctgtgcctcttgtgggtcagtaaagctacataccttgacttgcacctcagagctctcaaaggttggtgacagggcttttgcttcccttatcatttgggtagaagtgggtgtagtagatccaaaaagatgtgtaatggcatattaaccggaaaggttgaatgcttgcttcagacaagtagaacataaaataaaaacaagttgaattcaagtagaagtttcatgcagtaaccatgagcagcaacacaaacaacagggagacagagagagcctcttccaagcagggccacacagattcatgagatggttccccttcccagttctttagtcacattgtttaagtgaaccctatagtaagaagtaaatatgaaacagccacacttagtttctagaaccttgtgcgatagctccccactattgtaaaggggtgaaatattttacctaagtaaacatacccggtaagtgagttctaaatgtcagtatttgaatggaggttttctcagccttttctccctctgtcttctgagtataaatggagtgactgccctcctgagtctcctttcttatggcttgagcgatctttctacgatacagatcggatcctgtcattccccagcttgaaattctttctgattttcttttttcctttttttcaaatttaagtttaatttttattttttgtagagatacggtcttgctctgttgcccaggctggagtgtagtggcatgatcatagctcactgcagccccaaatacctggcctcaagtgatcctcctgccgcagcctcctgtgtagctgggattacaggtggcttggctaacccagcctgaaattcttaaaagtgctcctcctgctttcagaatcaagttcaaactccttcaccaaacatattaaaggcctctttatctggttcctgtccagctttgcagcctcatttcctcctgcttttccaaaggcactcactctgtgcttttgccattctgaactgtttcttacctctaaactaaacacacaattccctataatggtccctcagtgacccacagggaaacctgatccccttccctgataccatgcacacaccataggcaaagtccttaaaacttgcaccttagaattacctgaatatgatgcctagtcctcacagttactctctggttgggaatgttgtgcaaagaccacgattgcatgagctcacttctatgagatgaaagtaacataactgttcctgttttctttccagag

SEQ ID NO: 44793 - DNA, 2424 bp, Homo sapiens
tgcccaatcagttgtcagtatagtcagttctcccgtgaatagctgtacactctatatactgcctgtcactgtgcactgccaccaactaagaccaagccactgctgccatctctttcctaggttacttaaagggcagttgcaccccctacactttctccagtctaacatcctatgctgctattggcctcataaaatgtccatctgattgcatcatcctttgcttaaaatgcctcattagagttttgataaaatctaaactttttaacagggcttataagatccttaataacctgttcccaagctggctgcatttcttggagtttctcggaaatatctgcctccctcaagcacattcccaccccaccctgcatacatacacatctctggccacttgtttgtcatttaccctagagtctaacatagggcacagtaaggcctcaataaatatttgttaaataaaggtaggaaggcagtggtcctggattttaattgtatgtcctcacattttaatttaatttaccttaaaaatgtaaatgattccagagtcaaaagttgctgttttgttttatagtgctctgtatgtttccctccactctgtagtttccagagggttattaaaaatggactaaaagaagcatgtgggcttctgttagcaaatcagttgtaatctgtgttctttggctgagtgctgagcttaggaggctgccagatggggacacaggaaccaaatcatctttgcttcccagtggggaacaggggcataaattggctgaatgggcttctgcagtaaaactccttcaatttgagcttgtgtaagccaggatcaaaatacctgagacttgttgagacttgtctagaatgtttgttaaactttcaaacctgtttgggaagaaggcttggaacaacagtgggtttgggtcttgtgaagtaaatcttatttaaaggaaatagacaaaagcttaatcatgtttaatttgtaacattataggtaagactgttggttgctgttgtaatgactctaaaaaagaatagagaatatttttttccttagaagttccaggttcaatgatgaaaccccatctctaccaaaaattcaaaaattagccaggtgtgttggccagtgtctataatcccagctactcgagaggctgaggcaggaaaatcacctgaacccaggaggtggaggctgcagtgagccgagatcgcgccactgcactccagcctgagccacaaagcaagacgccatctcaaaaaaaaaaaaaaaaaaaaaaaaaaaaaaaaaaaaaaaagaagaagttccaagttcaacattcccaacttccccctcggggctgggagctcctgggtgaggtttctaagtctccatcctctcagaactcctatctttaacttcttcgtgcatggatcagaggggcctccagtcactgctgagtcacagggataagcaaaaagggaatgacacacttcctgccccaagttctagggagtttttatggtttgtttttctgtttcgctttgaaaattccctgaaaagacagaagattgccccagccgcctcctgattggcagcctctatttatttatatgatttcatgggatatcctctctgctatgccttgtaactcacagggtttttgaaaccttttttccttatcacagcagtattacatgtttgtgtagtgtatttatcaactacaatttgaccaataaaaaaaaaagaggcactccttattgtcactacccagaaaaaaatatattgtgcatatcatcattccaggcgcttttctgtgtgcttatagttttctctttaaaaattatatatggcttaatataatttctttgcttttatatattgttttgtagcctttgtgaagagttctcatgttattaatactctgcaagatcggttttaaagattgcattactggccagccgcagtggctcacacctgtaatcctagccctttgggaggctgaggcaggagaattgcttgaggccaatggttcaagaccaacttggccaacatagcaagaccctgtctcttaaaaaataaaaaataaaaaaaaaaagactgcattacatgccatatatggatgtgccataatttacttaatcagtccccatgtggatagttaggctctaaaagttttcatatggggtcattgtcataaccccgcgcagtttccttgcacttgtccacacttctgtctatttcatgggatgtattcctgtaagtggttcaaagggcctgtggagttttaaggtttttgatctttattgtcactttgccttccagatgtttgtcctgttttacattcctgtcatataatataaactccttaccatgtcctatatggtctacatattctggcctttgcctaactcccagctgctctattttatttaattacttaatttgtttat

SEQ ID NO: 44794 - DNA, 634 bp, Homo sapiens
tgtgactgtatgtcattgcatatatagagttgagatcagagccagctttgcttgggaggattttgtggaagaagtgagttttgggtagagttccaaagggagggtaggtagcgtactttggcagaaagacgtgtacataaagcttccaaggctggagtgattaagtcataagcattcaagggtaagcatgaaccatttgagaacgaactgtaaattcgtggttgaaaatagccaggctagaagtgaaggggaggcaaggttgtgcgtgccaagctgagaaccgtagtggcagagtggcgcgtaggagcttgtctactctgttcctggtaaatttcactcttggatatcagcacatcctgaccatgttgccatctagtggaactggctgaattgcctgtgggagcatcaccaccttttcccaattcaggataaactctagtgtgatatcctggcaatagggaaacgtacttctcttttgcctaggaattttaaatgaacgagagagaggaggtgagtgctctccccaaatcacattaatttaaggaatttctcatagacagtgtctggagtccatggcatgactgctgagaatgctgggtgtaaatgtccatcagcttaaggtatggagcgagca

SEQ ID NO: 44795 - DNA, 626 bp, Homo sapiens
tacagtgtgctctgagatgagactttttttttctttttatacctttttttccgcccgtctggtgcgtttgccgacggttcttctcggccctgtgtctcgggagagtcggctgccgtctgggcctgtgccccacctgcgtgcgcccgggccgagccagccccgccaggtcgcctccgcccggctgccggcccgagcgcgcggctccgggggcggactcccgccgcccagctgacacgcgattcgtcactcttgcagaactttccccctgaaaatccctgcaccagaacccgctctcccgccccggggaggttttgattttagtggctttcttccttttattttccgtcgtgtgcggatttcgctgcagagcgaacttgcggctcgtccgagtacatgtgagcggtaatcgcccctgcagctggttatcctgacattatgcactccgaagcagaagaatccaaggaaggtaggattctggtttctcctgggggccggccaagttctgcggaggaatttggaggaaggcagtggtagaagaggatgggagttttaaagtgagcggtgggcactttgtccgcatgccctgcgccttcgaagccaagtcggagctggataagcggagcccg

SEQ ID NO: 44796 - DNA, 3380 bp, Homo sapiens
gttaagaactttgatcgtacagaaatattgcgttttaaactcttatataatagtatgccattcacaattatctggaaagttctttttctcccaccatgtgaatacacacacacacacacacacacacacaatttttaagcccccaaaggcttaaaatagtactttttgtggtctgtaccggtcagttggatttttactaagaattttaatttatccttgagatacttgatgagtgtatataagcagttgcaatttagcatacaaaacctgacaaatggtaaataaaagaatatgtttatccaaatgatgaaatatttgtagtaaaaagtgctattcaattgccaggaaattaaaatactccagtaaaatgaattaaattagcatgttaataagagtgataatatttaaaagttttagtcaatcttgcatttccatacttgcattatctaaactagttgaacttttcagtgttttacttgatatattgcattcttgagcattaggcttctaggtgatttgttaaactcatagcaggttttagtacacagtgctgtttatgacagaaaaaattttatcctacctctgaaataattgtactttctgtgattcagataaaaactttatagaaactccctaatgaaaatattgaagcattaaccagaaaatgagtcagctttttgtttccaaaatgatgcaacaggaaaacctttaactacttataatcccgtatagtcaccatcaccacgaagtattgaaaatctgttttctcttttactaagtgtctgcacggtcacttatgtatacccaaagccagaaagatatttttatctcagggaaattccagaaatggaaacatttttgtgtaatattgattcatttctgtctcaccaaagatgtgttttccacgtagcaaagaacatcagccccacgttatagggaacaagcgagtcccaaatcgtaccatctgctgagcactgagaaaggatatggacaagtcagtcagcattcacaattaagagaaaaacatctgtgctttggaaaatgttcttcaaggatagagaattgtgccctatgtccaccaaatttgcatgagatctttataagattagacagccagtggataaggccccttatctttcttcatggatggctgaggaaattctccgccttccctgacatcagctgcataactgtatttctgcctcgtggaaataaagtagatgatcaggcacttgcggtttgttcttaatacaagaaagacaatttgatttttaaaagttttgatttgtagaataatgtaagacaatatgtttctttctactttggtttttccattcaaaagcttacagatgaattcattcgtttaaaactgccaggctgagtgcggtggctcatgcctgtaatcccaacacttcgggagactgaggtgggcggatcacctgaggtccagagttcaagaccagcctgaccaacatggtgaaaccccatctctactaaaaatacaaaattagccgggtgcagtgccacatgcctgtaatcccagctacttgggaggctgaggcaggagaaccacttgaacccaggaggcagaggttgcagtgagccaagattacaccactgcactccagcctgggcaacaagagtgagactttgtctcaaaaaaaaaaaaagaaactctgtctcgaagtaaataaataaatttttaaaaaccaacctgatgtgaagttgaaacacaagacgcggaaataaaaactcagagtataaatatctatattgttaccattatctgggataattgatgatttataagaagctgaggtttcgtcttcctagaaatggacttttattaggccagcaagaatgaccacttagccatttaaatgatttgtcagcatcttttgctgctctcttctaagaccattggttttcactaaaggataaatacctgctaagcaaattataaaatactataagacatttaatctcctggaagaggacttgctgataattggatcaaagttccagcattattgctcttttcgaatcatatggacttagtgttctcatgaccgaggagtcacatttttagcttgctaaaatattcactggagaacatggtgaaatccacgagtggaaacgttccatggtattttcaaacgccacgtgtcaggaatttggcatgccttcctctgggagaggcactggagtgtggccagatggaacccagcagggtacagagggcatttgtgggagcagttaggaaaccaggacgtccagcttctgcctgccagggagctcgctcatgttgtctctgaaatttgcataagagcaattacctcatattctaattttaaagatacaatttttaaagacatggaaggctctgagacctcctgaaggctattcctatgtgaggtattgtttacgggtggcctttcactatttccaaatcagcgatgaaaagaagactgagtctaaaataaatgaagcaacagacttcagcagcctgagagaattttgttcaattccagtctccttaaaaaaaaatcggtttttgctttcaatttaggaaaattgttttgggttgcattgttgaaagtaatgatttctagcagctacttatgtataatctcttaaccaattaaattctgaatctcttaaatcacttgattattcatgctggttttagttatccactgctgtattataagccaccccaaaatttagtggtttaaaacaacaaccattttgttcccgctcacaattctgtgcgttgaatgtgctcacctgggcagttctctgatttggggtctatcatgtggttgtggtcagatcatggctgggactggagtcttacaaagatttggctgggacacctggatgactgggcctctcctctccccatggtctctacttactacttactaagagcaccccaaattgcaagagcagaagtttccaggcattcttaaggctgatgcccagaacaggcacaatatcatttctgcctcattctactggtcaaatcaaatcacaggctgtattggggtcaccaagacaccctcaggtttgatgattctctagaaggactcagaaatctcagaaaagctattgtactcatagttatggtttattatagcaaaaggatacagatgaaaatcagcaaaggaagaaggcacatagggcagaggccaggagagacgaaggtgcaagcttccagctgtcctcgaccagtagaattttatagacagcacaaaattttcctagcaatgatgtgtgacaacatgtacaaaatattgccaaccagggaagctcaccccagccttgggagtccagggttgttaatgaggcatggagcactcacatgactaaccttagtt

SEQ ID NO: 44797 - DNA, 1650 bp, Homo sapiens
gtcaaaatgtttttgccccttgagattctattttgggaggtaagcagtgggggtccaggactctgcattttgacagtcccctgatgtttgcatgtagaagtgcagggattattacactgacaaatctttaccatccctaagggggactttccttcccaggggctatctctggaagcccctcaaggataggggccgcatgctgtttctctaggtcagcaactaaacccagaaaacgtttattgagtgaatgatgaaacgacaggtgaatagatgaacgcaaggtgtcgagttaactattcttctacacaagtcctagcagctcccattgcttccagccgcagaaatggcccctggaaggcaagtcttccagcgagtggagtcactcttaactacatttcccaggattccaagggagccgcgcgctctgcgctcatcttcctaccagaaatcggcaagtcactgaccctcgtcccgcccccgccattccccgcctcctcctgtcccgcagtcggcgtccagcggctctgcttgttcgtgtgtgtgtcgttgcaggccttattcatgggctcaccgctgaggttcgacgggcgggtggtactggtcaccggcgcgggggcaggtgagcatgcgaaggttggaggccgcgccccttgctgaggcgcagctggctgctcttttcgggccggcatacgcgcgcagccgcagctgaggtcaccccgctgaggtggtggggaggggaatggttattcttgaggcaccgcatctcttgaggaggaaagagccggaaacacctggtctctcaagcaggtacagcccgcttctccccagcaccccggtgtgggcttcccaaggtcctgcctgagaggagaggccaggctgggctgctgattgcaaaactgggtgaaagttctccctgacccttatctgtgggcatcgattgttactcttcctgcaattaactctcttagatctttgcctagtcttttaaaggactgaaaagccgcgaggggcgggggctggaattcgccccctgaagcgcagagatgtcagctcctgaaaagtcattcggtcgttcagtgtttgtttccctctgtcgtaagattttaagttcgtgagaggaccttctttaaagagggcgtctgataagagcccttccccgttggagtttgtatgcttagcaagtcacaatctgttctcgaaatccactggagtcttggcagaggttgtaagctcaaatgcgcacaggggtcaggcgtatgatggagaaagaaaatgggagtaggatgggcacatctgaggaactggagagcagagaattccgaagtggaccggccagtgggaaagttgcctgtatttcaggagcggcaaaatggaaaattgttatgtgaaatagccccattttttaaagtacaaaaaattaaaacaaaccattcataccaacatagatgctgtgcagtgagattttacattagtttctcaccagtgggtgacctctgtaacctccaagtgcagggatcttgacattatgcacctttgattctccactggtagtaccttatacctggaaaggccctaatgcatgaattatttgagttatatattaaacgttacaaactggaattctgtcaattaattcctatgtactttcat

SEQ ID NO: 44798 - DNA, 720 bp, Homo sapiens
aaaagcacaaagcaacaacaaagcaataattcttatatactctttactttctttgaaagcaaagtgtttttaattttaaaattacttgactctcttttactgctttcctctatgtttattttctgcacaaccattttctttttttttttacaattttctgtataggcttctatgggaaaaagctctgtaactgtagtgtgtatttatagttgtgaaatagcttttctttttcttagtctttttgtttattccccaaaatgagtcactgatattgctcaacagttcttgggaaacagaggcctgtcccttgttaatgtcgtaagttgtcttttcctggaaatcaccaagtgagtaaaccagaagtccaactggaattaaataaacatatctttcaaaccgacagtaattagctaagattttataagaatatcatgtatttttggttcttttataggagtttgtatatatcctactgaagaaaaaacttcaaacctttttgtcatctttgttaatatactattttaaaaatacagattaaatcaaaatgaaaacagtttttcatttagtacttccaaaacccatattttgttcagtgttattttaatgtacttagttccagctgttctttcaaggtctacataatcatgcttgcagcacacttactttttctaggggaagatgtatcttttggcaatttacttaatagttagtctacagttt

SEQ ID NO: 44799 - DNA, 1852 bp, Homo sapiens
tgttggatttctgtggagatttggagctaatttatgtaaagctcttggaccaccatttgacacattttaatggtcaatactagaaggtgttgacaattatatattacctaattcaaacacactcccttacgtctcctatgcttgccggctaataaacagccattcccacaggcagtaccaaatgtgtatcctggttttgcttcaaatgtttattccctaaatttaaacccttctatagtgtgcaggaaaaaaatgtccgcacctcagctataatgtcaggttgtaacaaaaaactgcgaggatttaaaaaggtgtgcttgttagaaaagcagaaatcttcacaaatactagatttaaaaaaatggaagcaaaaaatcgttcattcaagtgatcatttcagaagagctctttcaccgccgttcagcgcccccctagccattagagagaaaaaccaaggccggtacaatgcgagcgcagtgtaccaagggaacacacacacacacacacacacacacacacacacacacacacacacacaaaccgaatcttgaaaaactagacgttgcccagctaccagcccccgtctggtttccataggaacgcgcaattccgttgcgtagccctctgcgccggtagttgttctgtctcagttccggttttcccttccaagcgtcaatgtttcttgttcccaggcggcagctagagcagaaggcggatgagttttggacagaagaggcttccgttgaggggcgtggcgacgcagccgcggtctgagagaccggttcacgtgcaggcagcggcggatcatattccttcatctaccatggctcagccgggaactctgaacctcaataacgaggtgagcgccgaggaacctatggggctgactttaagggtcctcaaaaccagctcttttgagacgcgtggtcggaggcgggcatagagggtgcggttggaggaactttcgtggtgggcccaggcgggtttcccgcaacttggagtttggcaaccggtaatttcccttttcggtctccaggtgactaaagtgagagacatgtgtcaggccccacgaatttatgtctgtgggactttgggaagaacctttagcctgtacgttcaatattctcgtctgtaaagcggaactcaagatagttcgtcccagggttgtgagattaactgagatacgtaaagtatttgcaagtgcctgacccttaataaactttcagtacacattacctgctctttattgcctgtcgaaaatgaaagagagaaagtaagagctgtagcttctaagaaattggtggtcttgaatgagactgtatgctcagtacttcgtttcctcttccagttagtgtcctatttctttgcttccgtttacagcagaacttcaataaagagctgtttatacttgctatcctcaattcttttttctgctttttcagtccattctcatcagacatttgttctcaccaccgtcacttccatagtgtgcggtgtcgacaaaataccatttctaccacttatccccctctggtttctgcttctattcaacaaaataatgtcatccaaagtcttaaagtaagctggaaacataaggatcgagtaaggacctcacagttagatacagaaaggaaattctttatcccgtttatgagcaagtcactgtttagattacacacagtagtgtaagggatatttcatattttctagtaacctatactcaagtaagagagctaagcaacactcacctgtgttacagaacaatgtgtgaagaatgcctccaaaacctagtaatgcagaaaagtttccaaaggcggcaaaatgaaatgggtgatacttgtccttggtcttt

SEQ ID NO: 44800 - DNA, 3424 bp, Homo sapiens
acctatctgggagaagttaatgtttgacccaaaggaataaacttttgaggtagttgggagagcaaaggcaggagttttgctagtttttccccagtcccatccaatggctgactctggacttgtaaggcagggcatgataccccactgaccactgatgactgtatctcccatgtttctagaagcaactggaatcagacagacctggattcagatcatagatgcacagttaaatcaaatacctttgaacaagttacttaacctccccaagcctcagtttctaccataagaggttggaatgagaggatgactgcaaaggacctgggatggtgcctaacaaaactttatctgtcagcttctccctgccacttcacaggagacccaactctctgcaacagaaaccagcttttccacttagtaatcactgtgtgctttagtttcctggtttataaaataggggcattgagctctgcccagagggttattatgagaacaaatgaaataaagcatgtaaagtgtttagtacagggcctgttagtcagtaaatgctgataattagttgccattatgccacttggtcagacatgtttaatattgcaacatacacaaggatttataaaagaggttttagcctttttcaccaagcatggagggaggggaacgctcactcttacttcctccatccaaacttcctgcattctatgatatgccctgtgcacttaccacagaaatctcaattatttggcttaatggaaggaatcaggagtgtggaaaatctaaaacagaagctaaggcccaaatttttagtttaattttatcatggagaaagagaaacactcattgatggaatgacacacattcaaatagctacacaatcacataattccctcagaccttggcaagatgtgccctgtttttgacagcctgggatccagctgggagcagggaaagcaaaaatcccccagagagtaaatgactcaaggattacccatgcttactgtgtgcacagcgtcttggaaatcggtctcatgccttaaagtacagcttcttttgcctaaggataggcttcaagcctcttgtcaagttctgttgtaattgttatcatgtttaaattcaaaaagagcaaggaatcttcaatgtgacaatctctgtgtcacctttttttttttctctctaaaatacctctcctactacctggcaagttttgttttaattcctcagtcaatgactcagtctttcgagtgaaaacactgactctgcaggagatctcagctaaaatgcaaagattcccttttagtcactggcacattaatgtgaattaacaataaggttagttcatttcttagaaatgagatataaggaaaataccttttattggggatatgagtgaggagagggattagaaaaataggcagctcagagtcacaagctcaaatgctttcaggggcagaacaggctgcatagagggcaacagggagtggtagagcttgtggtatactagagagtaagcctcacctaaagatattcacatttaaaacttttaagaacattgtgctgaccaagtaaaacatgcctgttggttgaaatggctgttggtccatcagcttgccacctgaaatccagagtataaagccaagaggaggcagtagcattgggtagaccaggtgagatgctgtaaagacctatgcctgggccaggagaagacagctgcggatgcttaaggagccacatgtttgtgtgatagctgtgtgcagggaccaggggcatgcacacttcatacctgagcatagggtaactcaccccagcagccaactaccatttggatcacctgtgggagtctctggaacgatgaagctattcttctggatcagacaccttggagccaaaccttctgataatttttaaggaccaaaagtccaggatcctagggaggctgcacatctggagagtagttttcaaaactaatcagtctgagttcaaacatgttagagggcagagaagtcagaatgcttcctccactcagcaggtccccttctcaccctgcctctgtatcttgagtaatttaaagtgaatgggctcagcacaagccaaatagggatctgtcaacctgatactgtctcagagatagagctttggacaaagctaaaaaatgttttctaaataaaggggttggactgagatgaaaggggcaaaaagaaaagaaagtaaataaagtgagttcaatatggtcattcccactgttagggcaagttctcagttctgtacccagcacagtccctggcacattgtcagtaatcagaaaatacttctgagcaacaacatctgggcttcaattaaatcacctattgagggacagccctttcctccagatgcatctgcatttagtgtgggcctcacgtgaatcagtctcagctgtgtttccagcagaggtctctggtttatctctgctcacaatggaaatgcagtatcaaaatctagaatcctattgttttattggcttttgaaattgaaaagcatctgattcatcccagatatttatggactagcaaactatactggttaccattcacactccatctgagagacaaagtacacattgacatatatggtcagttctaggcccagttgtgagacagggtaaggattgtcatgtctatctcccccgtggtcaccattttttaattctacatgttgtgacttgtgttattacagattaatgattacaaccgtatggttggaaagtgtctgaaggtaggagtgcctttttctgatttgctccaagtcacggttcaggcttacaggggctatttcccttgcaggatgttctattacctctgggtgccctgagttctctttgactcttaggttaatgaataacctcaaatgaacacagggaatatggctattttgatgtagggatgatgcaacctacaaaatgtaggtttgatgtacggatgatgcaacctacaaaaaaaaaaaaaagaccattaaactttctgcatttaaaaaaatatttccaaggaatgtacaaagcatgttacttgggagaaggacacaggcgtttcatttgcatacatatttagtaataacatagtttacattttgatgtggctctttggcaaaggcccactaaaatgacctcatcaaaaagaacaggcttactgcttttgtaatggttacagataaatccagcaaattactgccttccaatgtgtgaatgcaggaggcttcctttattccctggtagcagatgggtaattgttcttgtgcccttctagagccaaagttctcagctctctctttttgagctgaatgaccctaaagaaaataattgtaggctggagggtagacaagggcaagcacaaggaaaatataaaggaataaatggtgtgacacaaggggagcctttcagtatccctaaaatcaa

SEQ ID NO: 44801 - DNA, 2053 bp, Homo sapiens
ccaagattgaaaggagaaagaagttgagggatagcgagggaggttggagaagagagtaaaaagaggccgcttaccggatttgaaattggtgagatgtttcttgggctggtcggtctgaggacctgaggccataggtggatgtttctcacggagcaaagagcaggaggacaggggattgatctcccaagggaggtcccccgatccgagtcacggcaccaaatttcatgcgcgtccatgtgaagagaccaccaaacaggctttgtgtgagcaataaagctgtttatttcacctgggtgcaggtgggctgagtccgaaaagagagtcagcccaggtagtcttaatgacaaattcatatccaaaaaccagcactatcagaccacaagttacagatatctttgaatgaatttagttaaccattaattaagtttagcacacactaaacctagtttagattcacctcccctcctccaagtccccacaaagatcaattacacaggagttacctggtttatttccatattaatgcttgatatctaatatggcttgttaacatagcttaccatattttctgggcataagtgtttatgggaaaaacttcagatttatacaaggttttggacatgtgactcatataaactggaataacagcattgttgctaaaacttgccgcttgctttgaagcctcatcatactgttcttgggaaaccattaagcaaaatgccctgaagggtaggagaaattgcattgagcaataaaatgtcaacaaactgcagaatttgaacatcaagcactttcatctaaatatgcccttctctcctttcacttggcaggggtttggtttttgaaaagtaataaactctagcactctagttgacctgggatgtgtttaagaaatcaaatcttagagccagaagcagtataacctttaatgtggactccccacctcggaaaaaccatagaatgagaaatataaacagaaaagtagaacagaaatatatatctcaattgtctagatatttaatttttttaaagagggtacacaccaaaaccctaggccagaagaaacaatcttaaatctgtttaaacaggtgctcagttcttactatcatcaacagcaaatgactataatcatagcacaaaataagaagtatatgaacaaggaaaacctattcataagtctgcataacttttataaacctgggatggacacagctcaatctcagagcaggtttgcagtcaagaaacagctgcccacagccaaaagtaatttcaaaacaactgaaacccttcacttatgtttcttaagaaccataaaggggatctacattcaaagaccataccaatatttattaaaacccctttcgtcttctacccttcccccgcaaacttgctgccaatccaacacattacaattcatgattccccataacttgtctcaacactttattctattttctgtctgtctttaccctctcttttctatatcactttattattcagactgaccttacctctctcctagcagaaaagaatccctacttacaggaagaaaaaggatctagaaattgatctggtaaatagagaattcccttaggcttggtagggtagaggaatagatggaaaacaacccacgtgatgaatatgatcccaacttatatatttaactgtatcatgaattaaaaactcctgaagggtaagagctgtaacttcagtgtaccctaaaactgagacctaaaaaatctgggagacattatatggatacatgctgtttgcatagttctagtgataatgaatgtttgccttgaatgactcatgttgattaaagtacagagaaggacatctctgtttcgtacctcaaaagagtcaagtttccttttggaactataaatctaataggttaccaaatggaggtctagaatttcttggagaaggaaggggcaggagccataacagaatgccagtcatggacaatgggaaatgttcatacctgcatgtagagaacattgtctcatggtttggaatattaaatcagggattgcatatacatgactag

SEQ ID NO: 44802 - DNA, 1390 bp, Homo sapiens
ggacagttctagagagatctaagagacagtacgtgtctctcgctcaccaatactccatctcgcctcagcctgcgtgcaatccaagcccagagactggtgcccaggctctaccacttcctacagaagatttaaaaactggtagtgccaacagaaattatttagcctagtcccgccaagaaggtgatgtggtaataaagtccaagattctgccacataagtcgggtcagcaagtcggtggcgaaaagagggccacgtcccagactttctgggaggaggcgggacaaaggggcggggcgagcgcagcgccctccgggtgggcgccgtcaagaggccgggggcggggccgagcgcggctgggcggggccttgagaggccggccgggggcggggaggctggcgggtcggcgcgggcccagccgtgcgtgctcacgtgacgggtccgcgaggcccagctcgcgcagtcgttcgggtgagcgaagatggcggccgagagggaacctcctccgctgggggacgggaagcccaccgactttgaggatctggaggacggagaggacctgttcaccagcactgtctccaccctagaggtgagaccgcgtcgctgcgggtgctgcgctgcgtagctgccgcgcgtctcacctttcccctgccccgacttgtccctccccatcccccgtgtttgcaaggaccgtcttggggtgacacctgtgacgcgagccccacctccggtgcctgtcagagggatgtgcttgggctgagcgcagggcctcctcaggagagcagcctgcggcccgcgggtgccgacctaatcctcagaggggccagaaccgaaccgagcattgcagcggcgctttcccagctcagctggccttcctcggtgtctcttgcacgtcctcctcttcaagccggagaagggcttgctctgcatcccagtaaacctccaccgagctcttttgaaggggtgctcgcttttcctttccagagggagggtgtgccgctgccaggggagcgcaatgaagtgagcgctgaggggccgagggtctgtggggaacgaatgggtgcactttcccaggaatggcccttcacggactgctggttcctcttgagggagctgcttctgatttggactgttaaataggtaaatgcatttgcctctttttgtttgtctttagttcctagacttttaaaaggtcatagtatttataaaatgtaaagctgaaggcaggattagtccaggaaactgctgttgtgtgtgtgtgtgttttcgaagttaccaagggagaaatagaaacagatctccactcctttttcctcttttctcgcttgatcagcgatctctgaagctgtgtgttcctgtttttgtcaaaggaagcaccctctataaacttaac

SEQ ID NO: 44803 - DNA, 2167 bp, Homo sapiens
gtgctgggttaggaggacggatcttcagatgagactaatgtagaggggtccacatcaggtaagttcctaaaacgagaagctgccttatccctctgttgcacggctcagggtcccatcataaagtctagagtttgctaagctgaaatgtcctctgcactcaaggacaaacggagttaagtgcaattgtttacagtccaagaaagctcgctggctggttttttcctggatggctgaggtcacttctcagtgacctacaagtcacgtccacgtttctattctgctcggtgcgctaacctaaagaagaaacccaacgtttacttgactaacttgataatcaagcctcccccgccgggacacttaatcttttaggtaccttcagcctactagaccctggtccgaggcacgggttcagtcctttttttttccgtattctatttttccctcacagttaaaaagtacttcacagttaaaggcggcattttagaactgcagcgtgaagccagagcgtttgtcttagtgaccggccaactttcgggctcactttcgagctctgtggtacaccaccattctcagattcgacgtctaactcaggagacgctgaccttcgaatcgaagggaattcggagagtcttggtataagccggctggttcaccgctgttaatgccagccgagagggaaaaaaaaaattcaaccaaccaaaacaaaagttaaaagcgccactctttctattctttgctgtctggcaatctcttaatggtggcgtctagcaaactgcaaatcaagctccagccggagtccgcagggcagggagcgccgggtgcggcccagtccccgcgcccagcgcgttggcgcgcacaccccgtttctgcagactcaggttttctggccccgcctctttcgggcccagctgatctccaccgcccgttaggcccgaaacccaggcgcctggagccctgcgccctctgcttccggcccccggcacgcccagggcgcgggagcggccgggtcagcccgcagacctgagtccggcccgcagcctcggggccccgcgggcgcagcggggcgggaggcggggcggcccggccgtgggcggagcggcggccgcggccgtgagcctgcccccaactcgccctcagccggctggccggcgcggccatggaggtctacatcccgtcctttcgctatgaagagagcgacctggagcggggatacacggtaggcgcgggccgcgggcggacagggccccgcgagccaggcctgcggctgctgcgcccaggaaacacccttggccgccgccgccttggcgcagggggtcccctcgttttctctcccctcccccggcccagaggaagggctgcgcccttggcgcggttgtcaaggaaacgggcgcccctcccgggcacggcggctgcgggcgcccctagcccctcggggtccaaccctctcctcccggacgagctgcagtcctcggacgcggcactagccattctccccgccgcccgccttcgggagcccaggatgggctgcgttcctttctggcacagctgccccctcagtccagacagtagtagcttcgcggcagattcacgctggcttccaagttctgtacaattagttcagctggaaaacctgttttttttttttaaatcataatttgcagctgtttattagccaaactaaacacgtgtattgattttagatgatttccaaagatttttctttttgagttgtgcagttccatgaaatggcaaaattacttgctgagcacctgtttcatacctaggactgtggtcaccgagaagtgtgaaacaggacccctgctctcaagagtgaaggggagggcagagaccagggcatgggccctttgagcaacacgtttactaagtgaattgttggtggagatttcccaatgaattcaaaacattctttcctggacagtcattgctagtgggagaaatgtctgagtgtgtgtacaccttggaagaatttacttccagttgttaaagaacctgtagggttgaagaaagattgcagggcagtctgaaagatttgttattttatttacatcaatcacacacttgctaaacaccagttacattactttgatggagaatattttaacccctctcccctcctctaaatattactggtatttggtgacagtct

SEQ ID NO: 44804 - DNA, 2121 bp, Homo sapiens
gtaagcattctactcgttgattagtatcgtttccattgacaaaccccagactgatgaagaccactttcagctgcagcccgccccctccagcttcagcttcgaagacactattgccagtgggttttctagaagtggtgatcatgggcaccaaattatcccctccctctccctgcattctcccattatcgtctacccttggttaaatacgctgaaaaaagaactgaagcggagttaagtacgaggaagccttaaagacgcactttctggcagccccccgccccctttccccgcagtggaggctgccccaggtctacaggtgccgccttcgcccggcctcgcgtagcccacagcaggggccgcccgcccgccgaagttgaaggcgcacctccccttcccgggaaggacgacggttccccaaaagaggcggagggtagtctctcatctgaaccaggcgctttaatgcctgcctgaagccaccgcggccagcgtggagaccacgcagcgggcgggcggctgcaagccctgggctccgagcgcctctcctgtgcgggtcccgcccccctccccgcattcctctcgttctgctcccgagcccaggccacgctgaaggaagtacttgggcagtctctttcctggagaacgggcccgccggttccggaagcctctcctacccccaggctggtcacctcggactaccgacccgggacaagaagtccaagcagactgcggcggaggtaggctggcctcagcccagctcccccagggtctcccccggagcgccggcctcccagcacgcgagcagccccctcccacccagtcccgcggccgcctccagtccccctgcgcccgggaagcctccacctcgcccgccctgacaccgaggtcccagtatccaaagcgcccccagggccccgcccgcaacaggggaagttgcagcccgccgctctcggtcaccttggccgtcaccgaggggcctcgcttgcggaagccctcggcccccgaagaaaacacaagtgcgccgagccccacgcaaagcacgagaggtagcagcagccgaggacccgggcccatggtgagcggtggcagcggcgctaccggcacgggcgctaccggcacgggcgcgacacaggctctgggacagctgacgggactgccggccggctgcgcctgcgcgctcccggttgcgggggatggggatcgggcagtccgggaagggcggggacccggggcgcgttcctcccaagttcagactcgcgacccgaacttgggattcggaggagcgcgcccacagggcgcagccagggctcgaccgccgcgccttaggcgggtgcggagggcgccagggacgggagggagcccgggttgcccaggcgcggagccgggcgcagcgggctaggctgggagcacctccaggaatttaccgcgtaggcgcggattaaacttggacgggaagaccaggactctcgggcttccgcgtccgcccggcagctagcgctccgcgggactgggaactctgcagccggtcccggtgtgattgctgccgccttgggagcagcctccgccgcggccgccgagttccaatggcccattggaaccttttgctaggttttggacgcttagcagaactttgacatcgctggaggcgtggagccctgttgcactcgaataatggcctctctttgagatgattcacgtctagggaacactggaaaatgctggattcacagtgcccctttgccttcgaaaaacttttacattggctttaagtactttatttggaggatgattctgtgatcttatctacactgttcacaaggcagcacttacacaggcccagaaccatggtcatgtaggattctttcctggggaaacaaagtaaataaactgacttttaggtgtatctgtaggatggattttttacaaacttaagaattatgtttaggaagattaatgactggggaagtaagttcttattatatttttaaatggaaaattcgggttgcaaaaccacaaattctgatctcaaccgtgaaaataaatatatcaaggcacttaaatattgaaagagatgtaccacaacgtttacagtagctatagatagaattgatagctattgataga

SEQ ID NO: 44805 - DNA, 373 bp, Homo sapiens
cattcttttttattctaaaaaaaaaaaaaaaaaaaaggaggatgcctgaggcaaataatgcccatttgagttcacttcaggaaactataaaactaacagtgggttgtgctttctaactcttgtttggagactaatgatgcaaggttccaggagggcatgccaaatgaggacatgaaatttaaagagtaacttcccaattttacccaataatcatgaacaaagtttacagaattctgagtggcttctgccaaggtgccacatttcaggtattttttgattctcaaatttttttaagtaaagcattgttgacattcaaagaagttagataaggtacctacagaacatagagattaaaccttgctacggagaagga

SEQ ID NO: 44806 - DNA, 2381 bp, Homo sapiens
tccacatcctgatgaattatttgctgacacactctccttgctacatccttagctttttagaatcaggactgtttcattcttacattcccagcacagtgtctgacactcaatgagtcccaataaaccaatgtcattcatccaaaacacaccttttaaggaatgtataatacaccctcttaagaactgtagtcccctgagtcctccagcaagacgtgtaaagggaattgcctccggaacacttctggaatcgcaggaagcctgtattcaagtcaaagctcttacaagtgctattattgggaaccgctgatcagaacgcgcttctcaggaccacgttcagctcatatataaaagccatcgacgtgctgctttggatgaaaatcgttttctctagattctctggggctacggctagtcacgctaaatatcacttatccctaatagcgctcatatccctggagagatttttaaatcaattgcctaacagacctcactacgtacaactttgaacaagtctgtggggaccacaaaagcacagatgacagggttcttaaggttaacaaggcctcggtcccacactaagcttttaaaactcgggaggcagcagttgcaaaagcaagcctcaggctgctcaccttctaggatggacacgacgatgagcaattggtcggatttggagaccatggttgcggtgagcggtccgggggcgaaggcggctggggggaagtgaggtccagttgagtcgcgggtaatccgggacccccggcgggacccccactgcccgcccccggtccctgatgcccggaccccgctccgcagccaggtcccaccgccgtctgctgcagcgcgcccggctcctctgcctcgggccgccagcccagatcctaactgtgccccgactcaaggaaaaagccacgctgcagccctgccagtctgcaagcagagacaagcccgccacccgaggaccttttgccgcctgcgtagccgcttttcaaacgcccgggcggccgcagcggccgccgccgcgcccagcttccgcctagcaaccaggcccgcaggcccagtgcccaggggaggttggaggacaacgggtgatagagacagagcagtcaaggctagaacgcccgtcagcgagcttcgcctcccgcccttttacgctctgttccagagccctaaggaggacgccttcattacctcacagcgccctctgctagccggacgaggagaggcgggcgacttggtgtgggaccagctgcgcaagcgcactactgctgtaaacgcttcctgaagctgcgtagcctttaaggagcgtgagtgtagcgtattacctgctttatgcttcagccacaacctgagagttatattagtggggattaaaaaaacaaaaaaacctagcttagttgacgtacccagtgtcaacactgcttaaaaaattaaatcacaaaaaaataatgacttaaatctaaactctaaagtccctaaatcgtgctcacgcggcacctcaaatttccgacctttgaaaacaagtagcttcaatacggtaattactgtacttgttaaagctgacgtaaactccccgagaatttcctgtcccttagaaattacccctaaaacaaaaacactgtcacgtgggcaatgaaatataaaggttcttccacccccgatgacaaagttattagcaaactcaaaaccaaaaataaacaaggcattgaggtgctgtctgccgaccctttccccttaacgtctcccaaattcagatttaagaaacggttcaagacttgtaaagggaacggcctcctaaacactactcaaattgcaagaagcatgtattcaagtcaaaggcaaagttcttttggaggttatctagcttgaaacttaaataaccgaattggttggagcgatcgtggacactattaagtttgggaaaaattctgcttcggaaaacaaaagtaaatcataataaaataaagctgcagagatagcactaggtagtggacataagtgcggcttctcctattactttctggttttgtaaattgagaagttgttttgagagcaaatataatatctcgctgttttctttttcttctattgcttccttgttttggaaatttagaagttattttgagagcaaataatataatatcactattgttttcttcttcctcttctttattcttccttctttgctttctgcccaaaagaaaaggaggaatatgtagagattggactaattacttctaaggccctttcaggtcctatcacaggcattcttaaaatgaagcactattcaatgtaaaatcaaagtaatgatctactttggattcatcattgaacaatgcattatttttgtggaagatgtcaaacatactttaaagaaagca

SEQ ID NO: 44807 - DNA, 1806 bp, Homo sapiens
ggccaaaccccatctctatgaaatatacaaaaattagctgggcgtggtgacacacacctgtagtcccagctactcaggaagctgaggcatgagaattgcttgaacctgggaggcaaggttgcagtgagccaagattgcatcactgcattccagcctgggtgatagagcaaggctctgtctcaaaaaaaatcaccaaacacttctgccagccacaggttagttaccttcagccaaattcattgagatggttgtgatagatgtcagggcagagaaaagacggcagtaaataaaagagattgcctaaagctaggaagaaacaggatgaaggaaagtgtagtggggaccaacattccactctttggcagagccttgggcagggaacagacacagaaagtggccccgtgggaaccctagagaagtgagaccataggtcctggtttattatccttggcatagattcttatgccctaatttgacagactcagcaggttggcttgggtattagcttatcagtgaccagtaaggcaagagccagcaaggcctcccccaatatttgctctgtgtgagaactccagcacctttgcccagcactttgtatgtggagagggaagacccagtgattactgagattgaatttcctgttgattggcagaaggagattggggttgaatttgagtataaagaaaagcaacatttcttgcacactgtcctttgtgttgtaagcttcatgggattactttagactgagatgagcgttgagccactctgttgtggtgtgtgtcacagtggctctccctgaggcaaggtatagagtggagggtgggagaatgctccctactccatggaggaaaggcagaggtagggacattctggaactacagcaaagggtttcaggccaacaaaaaatgctgctcaggtttgctttgaaaaaactatgccattggtaaaatgaccacattctagagacagatgacttgtgaatgggcttcattttaggagtagagattggaacagatggtagatgctggaatccctctctgtaacactgtgacattgaggaacattatatgacattgtgggactttgattcacttattgtgtaatgtctgatgtgtgtggattttttttcatccaaaaatctttcttttgacaccccggagccaatagcagaggaagagctggtgccggcctactcagctgtctgctaaagaaattccccaggctctggttgagtgttttggcccataaaagtctgaccccagtaaatgataacacagaatcttctgtactacaggctatctctggcagaagagttctatttaatgctgacattacaagtacacctgaaggttataaaactatcccctacttctctgtgtttcaaggaacaaaatagataaataaataaattataacaacagtcaatagtaacccccctcccctttgaattcagaggaaggttctaaacatacaacctgggttcagagaaaagaaaagcctccatcatatattaagcaactgcacaagaagtttccgcagccagcagctagtaagctgagtcacccatttcacaaggggtataacaaagctctatcccttgactattgcatcagccacaaaactgttcttcctgaattatggtatgtgtttctgctgccaacataatgctttgtatttgcataaatgtgtatgtttctaagcaggttctagcaagtgtaacagttaacagcaagttgaatggtgacttttatttattgccttagtgttactgacaggtgacagcgtgctggcagtcctcacagccct

SEQ ID NO: 44808 - DNA, 533 bp, Homo sapiens
caagcatgcacttaagccaatgggttattttgtatttgaagatgtcccaccaaattaataacttattatttattgagggtttttttccaccaaaggtgtactagattttcacctaataatctatatacacttattcagttcctgcctgtgaccaaaggccaattttttttttttatcaggtgcttacccagggcatggagtacaatgtatgatcacgtggacagatattctccataaagtaagaggaaaatcacatggagagtgaatctttgacctaagactcataaatacaaagcacttgccaactgaactagtggctaaagagaaagaaagcatttccaattaggaaataaacctggtttcacaatactgtctatcaaatattaagggattctcagcacttttgtcccaggtcaaataattctaaacttttattctttactcagaaagctctcatttccagagactaaacaaccaagcacatctgtgaatcttgattaaatccttattttaaaaattgtaaagacattttt

SEQ ID NO: 44809 - DNA, 604 bp, Homo sapiens
gccttgtcactggcctcaaaactctgtgattaattaggtctcaatttacctctctagatttatctatcaccactcatacctcaaaatctatcactttagattaaattcttttccattttccatcttgctatactccttcttacttttggggtttgcacatgacactccctctgcttgaatcatattctccaccccaatcctcttctatctttgcctgtttacttcttacaagcccttcaggtctcctattatgcgtcactgcaggaagctttccttgacctttgaagtcatgccttgacgatagcacctcctactttccctggcattccccttatcacaccacatcataactgccagtttaatagcctagtcagtgtttaaaaattagcatgctgcacttctcactgtgaactctggcataattgttaagatacaggtaataacattgactggaaacattaaatggatatgagaagagtgtaaagttatctgtatatgggtaaacttcaagtaatggttatgtcagagccaaaggaaagcttcccttcaccctctgaaggtttgctgaaaatcactgacaagaggcagattactaagaggaaag

SEQ ID NO: 44810 - DNA, 510 bp, Homo sapiens
tatagacagaccaagttgatttatcttggctgatatgaatcagcaatatcagaggagcatagatagtattgtaaagggaatgagatagaggactatattggattttattattatgaatataaattgacagatatacactaatagatactaaagtaacagttctagaaagcaagcattggcatttggttgaaatttgctgtcagttagatcaggtcaccgaagctggcagaacacaaagcattaagtcacagtacaaagggttaggtctgcaactggcagagtttcagcaagaagctgaggtagggctgcctggtgacagaaggcagctgcgctgagatacaaagctttggtagggtgtagctagctttgtcaattaggagaacacaaacctgaagctagagagcctcacaacagtgagacagtcaaagattatgttagggtgaagccaaagaagttaaacagggtcaaactacagctttgaatttaaatgttcacgtgggcacagagcca

SEQ ID NO: 44811 - DNA, 2360 bp, Homo sapiens
ccaggctgattcttcttcctgcacaccttaatgcctaacttttgaaaggacttgagacataagaatcacaattttaaaaaattatagtttccatgccttcatggtggatcaatttccatagaagtctaccaaaatgacttatctccatcccagggaagcaactgcaagagggaaaatgaaaggaatgcagtctttctatgtaggcagagtggacttaagtgtgagtcagaaacaccgatttcagtttgtgcgctgcaacttgataacttgggtgatgtttggcttctcagaactttgggaggtgaatttgaaaaacaggtaatgccacactatatagttcagaggattacctcagcttacaaacagcaaatgagacgcaaatgtgagccataattcacatttctaagcagttggagccctgatatggcactggggttacaaacaagcggggaaaaatgtcaacccagtgatgtcatactcctaggccgggccctaagatttttttggaacctggcgggctgagcacaacagggaaagcctcagcaccctgacttggcacaatggtacccttaaggctctttgctcactcagttcttagtagctctcctaaagcatggtggtgttctcttccagttctctgcgtagactttgctatgcttctccgcccactgcttcatccagagaaacactcgtatccacagcctctccccactttccctcacgcacggctctagaaagacggggatagggcgcggcttaggctttatacaccttgccagccaatgaccgcgccgtctcctttccggtcggcgatccgaccaatccaagaaggttggtgcaatcttcggctctactcggctgttttcgctgatgcgggcagcttgggggccgccgccgctaaacagacgctttcctttttaattttttttccatgtgttcacttccgggtccggcgtcgatccggatgcccgaggcagaaggatgtttgacctccggataagcgaggcgctgctgtgcattcattccgggctgcatcggtggcgacagcagaggctcgggcggcgactctccggccagcggcggcggtaggaggcaccagcggcagtgcagggaccgaatccgagcagcgctgcgttacctctctctctcgctccttcccccctacctcgctcgctcgctcgctcgctccctgcgtggctcgctttcctcctccggccgccggcgggtgtgatgtgccgccgccgctgcccccgccggcgctgacggactgggggcgccgcccgcgcccgggaccgacccctctgctcgcggccgcgcctttgaggtaaagccccctgcgcgtaggtgctccgctgccagccccggcccggcggctgcctcggcgcggccgcggcgccctccctcccgggtggggctggggtcccgggcgggtggggtggggtgcggcgggggcggcgccgcaggcgcgggtgtcgggggaggggtgggcgaggaccatggcgggtggcccggaggcgtgggcaggagggggccgcggtcggaggctgagggcgcggagggctagggggcagcgggggccgcgggtggcgggtcgggctgggtgcaaaagttgccggagtggtgcggcgcgactggggcggcgagggaggtgggccaactgggccggcgggggcttccttaggagagattgggaggtggggagtgtcgcccacggtgctccttgactgtgtccagacaattacctttggagtaggggcttcaggcaggaaggaggcatggataggctgggaggaggcgacgggggccagcgttcagctcagggataaacttcccgttggagtgtttaaggggttgggtggggggacacagggatttacctgtttcttagagctttgactcagctcaaaacttaaccaagacattagtcaaaggttagcaaaatcactctgatggttactctcatggtgccggtttgtttgtttatcccacatgcaggggaagtgacactgagaagcatcgggtctcttggtccacagcctccacatttcttttcagcaggatgaggagggagatgtgtgtctactcgtggggtgggggtagtgaggcctgtgtcatggtcattccccttctcccacctcatgttttagggaggaaaagttcagatgggggagagagtgagtgtgcctgtgtgtgtgggagacagctactgttgatacactgtgtgaattactttcaactcttttgtagtaagcacccaggctggtcagtggctccttttaaatcttctattaaaatatttactttaaattagagaattaaaaatgtacttatttttaatgaattaagaaaataagtcatta

SEQ ID NO: 44812 - DNA, 1085 bp, Homo sapiens
tcagtctttttttttcttttttcactgtatttactaatggaatatggagattctacatggccccatattttctgctccattgaaaaatggcttttgagaccagtgtaatttaagggtggccaagaggcagtaagatttttttaagccttccattccatttttacacataagaaggcagcttacaaaatggcaacgcaaacctattgcaagcaatgatgattgcgttccccatctagagcgctgctgagtctcagcagcctggacttcaaagttcatcgtttgcttatggactttagcctgttttatctctgactccagaaataaagccttttgaaagaattttgagaatgaggaaggcttttttgtctctctctatctcagaccagccctagtgttttattgcacccaatgtgctaactcagccataccagtattggaacaagctaaggattaagaaatccggttggaggcagtctgcagtagtgtgcagtatttactgccaggcagcttctatcaagagtgccagtgaaaaaatagccagcacatctattatagcaaaaaactcctggaagagagaccgggggtgtgggggtgcagggaaggaaccaagacattgccaatgttttaaatagctcagagtgcacacacactacttgtgtagcgatagaaaaatgagtaatattgatagttaggtaaaagcagcagcattcagaactgagtcagaaatgaggaaagagctggggcaaaatagtttcatgatcctttggtaaagagtcaaatcacctgttataaaagatttcatcattgagtagagaatacctacagccatcctgggagagtattagtgtggtctgttcataaattccctggcaaactatcctaggatgagtcaaccttggggatgtacagcattcttgcccccagaaagattcggaagcaatggtacaaattcaagaacatttggtttttaacatgaagttcctaggaaattagcaatttgcctgtgaccaagaaggacaactatgccaaatgatctgccacctcaagatctctgggactttcctacaaccctgggacagagtcag

SEQ ID NO: 44813 - DNA, 664 bp, Homo sapiens
tcacctgggctcatcctggcccttccccttgaggtgcttttccagcttgagagaacctcagaagaaggcatagcgagcccctgtcccatcaggcagcctttcccagcggggcaggcagggcttttctgaagccaagcagggtgccccgggcctcatttgcatggcaatgccctttcagcagtgcagtgatttcgttgctgggctggtctctgagctctgggaacaaacggaaaggtttgtgtgcgcttgtgaatgcatgccattctctttgctttgctttgctatctgtcacctcaaatggtgagggttagacaaacagttccttgaactgtttaaaggaaaactacccctgcctaaacaaggcagacttggattttctcatcccagggataatgataaagagattggactttggcctgtgaatccacattcagtgcctatagagggattgaaagtgaattcactttttcttaaaagtggccaccaaattaaatagagaaaaggctttgtttaggtttgggtttgtgtttcagctcctcacaagccaggctttcatgcattctgactgtccaggtcagcaaccagaatgtgcctggctccacagctgggcctctgcacggcttgtctggctaagtccaggcgcgcatattatcctatccaagca

SEQ ID NO: 44814 - DNA, 896 bp, Homo sapiens
aactttttttaagatttggtaaattttagaaaagtgggttcacagataacccaagtgggtgaagcactgcttgaaagatatattttttaaattgtttatctctaaaccctggtgaacatctttggcctggagctttgcatgcacaatccatggatcaacagtagtcaagctagcactagttctggaaaaggggtgaggagcaggaagaaggaagcagtctagacagtgatgccaaaaaccaaaaaacccaaaaacccacgagtttcataaacacacaagtcccccataaatcaactcaaatacccaggcatgcctcactcacccctacctcacagactgctctgtggcctgtctcagatcattgctttacctgatttcaccggagtaaatgctcagctgtggaaggggcagaccacatgactcatcctagacaaacagcctctgaagatttggacctcacttttcctaaccatgactcaacatattgaagctcattatttgtatttatctttgagctatgtttgaaatggagatcacagcctcaatttggtgatcttaaatgttagcagaaactaatctaaattcctagcgttaggaattcctggggaaatcaaaccagggaaattacatgacacatggccaagaatgtatgtaagaagtaattacgctgaaattcctttgttatctattaatatcaactgcatggcactgtgtcagcatggggataaacaagtggccctgctggttcaattgttcaattctttcattcgaaaggagataagacaaaacaatagattcctctttggggagaaatggcctcttatttttgtggtaaacaaaatagctttttggataagtcctttcatcatttgatccattgacggctgaggttagaa

SEQ ID NO: 44815 - DNA, 1298 bp, Homo sapiens
aagggtaagtctgagtcttttttatttgttgacatatttaaagtgattttcatatgttcagatttcacaaatattgaattttacaaatggaaattaccttggagatcctccttgaaaagacagaaatccaataaagtataattgttagacctgggaaacaccctagctggtatgctacgcattagatatctgactttgagcaaagttcttagtttgctgagattccataggaaacagcaaagctaactgtatttacctttcagggcttttttgagggtatgatggagtattgcgtgtcaagcttgtaacactgcctggcacagaatacgggcttaataaacacaagctgttgtcatcagtatcatcaacaatagcttcgttaacctagaaaggttaagtgaggacttgaccatgatcaaacagctgtaatagtaaatggcagagttagggcttgcattaaggtttcctgaattttcatacagtgctattcccactaaaccacaactgccactgatgtttcatccagtttttaagatcacatttttaaaagactgattaatgtggtgtaccctgcagcttctgttcagcttcatttcaacttttcagtgaagccacgggaaccgtgtgtgatgtgagatgaaactgcagttgaacggggtctttaagcccgttagagaaatttctcttgtgttccattagtttaattatgacatagttaaacagacgctgagaaatttcaaacctgggaacatttgcccacagaggcacgcaggccctggcagtagctcttaatcacattcctcagtcaggtgtcaagcagaacagaggcacaagcacacaagcaagttttgtttagtatacctcaaaaagccagccaagtggcaaatgtggacatctgttctagactgtggctgtcctgttttttcagtctaatctgtcaagataaccatttccccattctcttaaacaaacacagacttccttgtttaaacactataacagttctaacagaacacacagcttttaatcattctgtgttaagtacactggcaagagtctgagaaaagaatcaaaacatcttaaatgtaaactggctgattttgctactttgcaaatcccaggaaacagaaaaaagaaacctgaaattccagataaaaggagtacaacattgtaggagagactgcagtgaattttacatttttaattgaattggaaatgcaattgtgaacccagttcagcttctaatgaaaagagcgatctgatcatgttttattttttcttcgaagttttgcaaattt

SEQ ID NO: 44816 - DNA, 840 bp, Homo sapiens
aaggtatgatttatcaccatttctttgttcaggactccctccccccattattatgttgtcgtcactctgtggtattcaatactggtactttgtaaaggctgaatcttgtatagcacaagcttcgctgttccagcctcggagcttataaccttcagacagatccttcttcaaatataattatttgggaaaatttaaaatgtacaactaaggttgctcataaaatacctgccagccaaaaatcagagggactttcccattacctgtgccaagtatatatagagcactaggacaggaaaagtaagtgttgtcacatgaccataaaatgcagtatgttttttttttaaagagccctaccgctgggctgaatgtttgaagagtcactttaaacacatcctgtaatcaaaccatctggaacacagtgctgcgattagtcaccctgaacatagggctttatctgaacaaatagtgtatggcaatggagcttgggagatagggcagtactaacaaaaggaagtgtaatgaaacactttatgccctagtgtgccgccaccccagtcataaaccccagagacacactgctctggtgttaatgtactactttatgaaagcacagtgagcttaaagattaaaggactgaagggctaaaaattgctggtttggatagatcttctctgtcagcggctggaatatgttggcatcactctatctgcgttaattataacctctcagatgacagttgagcattcctattagggtttggtgttattttcagggcattaggaacagggtttgtttatgggagggtagttacgattcttggtttgccagaggttaatctga

SEQ ID NO: 44817 - DNA, 2609 bp, Homo sapiens
tcccacattctggtagagaagccacagcatgtggctcaggttcagaatgcaatagggaaagctgaaaggatgaactctgcagtcatttctgaggagtaggaaggaagaaagaataaacagtggccatcaaatggagcaccctaagcacctgaaagcatgtctctggagacagaggcagactcacctgttcacaaccagctttgtagccgcttcatcttgagctaacctaaacctacctgagcctcagtttcctcatctataaaatgggagtaatatggatattaaataagatgtgatttatgtaaagtatttaacatgagcactggcataaagaagccactcagcatatgtactacggcgtcctcatcttttaaactctcctgtaactcacccaggtcataagctgaagaatggaaggagatgccaaaatgctatgaattccacactcagaaatgcagctggcagcaagccctcccgcattcctcccaggtgaagcaaactcagttatgcgcatctacactaattatcccacattgctggtgaccaggcttactataaatgtggcctatctttcttttagaatcttaagggctgcaaattccaacctgagggacttcttttattatttctatacccaccaccaatttcaaatgatataaaatttatctttcctaacccatccattgtttaaagcaaacatttcctctgactactcaatagtaaaggcaactgagaaatgcagttctaaatcactgaagcctcatctctggactatttcagggtaagaaaacctcatttcatgttttcaggaacagctaactgaatgcctgacatttgtctaaattacaaaagccaaaattaaagctccccagtaccgtgacaacagaaatgagactctgcagcaaggctctggggatgcagatggacagagcaggttaaacatgaactcatctttccaattcccatctggacccaccagttttcttgacagcactcagaggctgccttcccaccctcccccattccacattccaaagttcttatctttcagggaagaaaaaaaaaaaaaagccccacagagttacaagtatttcaataacgtgcttagagaccagctcttttctgtaaacaagcctaatgaagtgtgactaatagtgctctcctccagcacagggaaggtaaaagggcctttgttagcacttactggagcaaagtcgtcattttgctggagcagaacaaaacttagctggttattgattgaccagcctgctcggtgtcactgctttactgtctatttctatatactctgtgtgtaaatacgtgtgtttacacagacactgagatcgtctgtatacacacagtcacacacagccagctaacctttctctgcaaacaggatgaagtgttcaaggcatctaactgaaatctaattcctctccgatatttgtatctcttctagtccttgatatcacctaacatttctctccatgttgttagtatcatagtatcatgaacctcaatttcagggcctgtaaaccaaccctccccatggacacttaatagtttccgaagtcactctgatttaacctgacctggttattacattctagaggtgattttgttttttcatgaattcaaaattgctgctgtttcctttccccatttcactgatcaattctgaaactcctgaaatttggctccaaatgttaactgctaaataaatacttcatgatgacttaaattgtcttcttcaattgacgtttgtcttaagtattaatatacacagcagcgatgttagcaggaagatctgaagttggctctgacttctttcttggatgactgaggaattcaagtcaaaacctgctttccttgcgaatctgagcacaaatttccgtataaattattgactgcactttggcctcatctgaaacattagccccacaggctgataagttctgaccccaggtggcacatcagccctctcagaagaggcaggaacattagtgcttcgcactggggactaaggcgtgtgagccaatcaatcacactctctgacagcttttactgcctctgtgcattaggcccaagtcaacctccaagactcctattgttcgcattattctcttattctctggtctcatgaagttagggttaagtccaaggctttagcaagagaaaggctattgttagtaactcagtctttattgactctgacctgcagggcagccgacttcaagccttttccagaaagtaatgcactgttaattgctgctcatcatcagcgtgtgttttatacacctctcttcactgaaagaaaacctgaccaaatatttcagcatcctcccaggttgccttgtaattctctcaagagttacagacacacagacacacacacacacacagacacacacacttctggacaaaaatctgatttgtactcgccacagtccctgaaccagtaaatctaataccaatgcaaacagaatgtttggctggacaatgctaacacttgggggttgccacctggaacaataaataaattttttcatggcaaatatctgtggggattagtatatagggcaggaaaatgcctgatggaagaatgaggt

SEQ ID NO: 44818 - DNA, 783 bp, Homo sapiens
ttcaactacatttatgtgttaactctcgtgcatccaataaattctgtatttcacagtggtcttttgagcattctaaggaatcttaatacaaggtatatataagtagcactagaagtcactggatctggtacaggcacgttagaccaggggttccaaaacctgctaatgaaactggtaagactctaccacttaggaatcttatcagataatgtctttaatgggttcattcttctttggagtgtatcagagcataaaataaatgtcagtctactcaaaccagaccctgctttacctacagaagtgctactagtttaataaatgatgtgagtaaacagagtcctagaaacagatctatttttggagactcaagtcatggctactcattcaacaggactttgcactatggctaatgccatcagggctgactatttgctaataattttgtttagaattctttaagtctgaaacgatgctggcatgaagagcaccttaagatctttaccactcctttgctacctgattctgccatgaagaacactctaatatcttaacactcctttgctacctgaatttcaggtatcttcaagagattattatgtactccaacctccaccccttcactgtacacatgaggaaagtgaagccagagccaagaaaacacagccagagggtacgaaaagggaggttgcagccctgttctcttgacacctgatccagtgctttcttccagggttcttcttttcccttataacttatcaatcttacccataagtcctaaggcat

SEQ ID NO: 44819 - DNA, 1180 bp, Homo sapiens
ggctgtgctagtcataagcctataataaagcacagatttgatagcattatccatgtactgtggtgaaccacacacaaataaacagttctccatgaagaatgaaaacccaaggcttcaacccttccagttcaaacatttttgttgtttttaacatgagccatccataaaatcagccaaggaagtgacaggaaatccagaagtaaactggtctggctatgcacgctttggaaaaaaaagttagaagatgctttccaactcatcctgatgatgtgtgaggtgaataatggataaaactgtaaaatctaggtacaaaaacaaaaggtacttttatgccagctgaatccaaacacatgatgagtgtagtttaaaaaaaaaaaagtacatttcctccagcatggggaaaattttctaacctaactaggaacaacttagacacaacctttgaaccttcagtgactaatgcgaaggacaaaaaggtataccaaaagcggccagagggccagatgtgcttttcctaagaaactaaaccaggagttttctttaatcaaaaggacaaacagtgacttccaggagtttatgaaagtgtgaccaattggaactttgtcgtctgttgctaattgaggcatataaaagagtccacttcttaaaacatactactaacactttttttaaaaattctctgccacatgacaaaaaccagaatcgagttgactggtagaagatcagtgcaaccaaagaccaagctattatttcaaactgtcaggggaaggcagtaaaattgctaccaggtctccttaagttacccttcaatgaaaagaagccatcagggaaataagaggaaaagaaaacacatcaaaaccttaaaagtccctttaagtaaaattatacgtctgtggcaccatgccatctgctctctggttagcataataagccaattccacaacctaaatatctgctttctgaaatcattatgtacaacacaaaatataatcaatatatttttacttgctttttaaactgtaaaagctacattcatgtggcattattggaatatgcctaaatgtccctgcagacacatttttcttaaggtgctagctgacaatgaggattcccaggaggcagaaagctcagtagttgggttggaatagtcacagtgaatgatattcaaactaggtcgggg

SEQ ID NO: 44820 - DNA, 2241 bp, Homo sapiens
cattttacacagaaataattctccaaagacatattatcaccacttacaatcccaatcgccaactatagcaaaaaaaaatcaaaattatttaataaggatgttccccaacaaccatgccacaacccacatgacagaaagcttgcttctgcaaggcacaacctgtagaattaatatgaagattaatttcatagaaatatcacacacacacccctaactccttcccaacctgcctagtggacagaacaccttctgttcccaaacattagtcaatgtggtctatgactaagcagcaaaacatggtgtgggtgtcggggcaggcagttcttccaaggcagtgtctaactatagacttgtacaaagaaggggagaagggtccaaatggtctaaatcaaccatccacaccgtttaaatgcagcacataattctatattccaattcactcaaccgtctacatcccctttggctacattttcacatttcacgagtatcagtccagcaagtctgttttattcttcttagcagccgtccagctccccagtcaggtatccaagtgataacactcttaaatctctagctaagaactgggtgagggaacaggggtagagtgctaacagccaccaaaaccatcgagtttttctgcagttatgaaaccaatgacccaacacatcaagcttggggtttcattcaggaccaataacaagaactcattcaaggatatcctttcacagtactattttggagacagtaagaaaaaataaaagggatgaggtctgtagaatgtaaattcgaatcctcgacattcctctccagggagggaacttgaaccttgcacctaaggacacattacccgcaatactaggatgaataaattaaaatagaaaactgttccccttaaggaagaaagcaggacaagagtcaagagggtgcatgagcaggttttctattaaaagcacacggcaacctgctgactagtgaggaaccgatctacagggcaaaaggtacttagaacactcaggccctcccacctgggaacccaaacactagcatcacaagcagcagcagcagcagcagcagcagcaaggacagcagaagcaagagccaaacactgcacccaagtaggctcccccatatcaaattttaatataaaggatgcatatcatagaaatctcacaaagaaccagaaagcataaagtgtaaggcacacagaggcacacccccacacacccacacaaatgcacacagaggagagtaggacatctaggaaggcgactttatcctaccttctcagttttcagtttcttgattcgcctgtggctctcctcctcctcctcttccttctttaccaacatagagtttcccatgagccctgaatccggggcacttttgctaacttcccctgcagcggcgacgctgccactcccagtgcccccgcagtggaaggggctcgcgccacctccattgctcttggccccaaagccatagaggtgccccccggaaggggcctggctgccactgccattctggtggccctgaagcaggtcgtgcttgtccttcctggatttccccgcatccttatcccgcttggcgcctcggctgctctggcttttacctggcttctcctctttgcttttcccacaggagcctgcccccgcggtggcggcagaggtgctggtgctggtactattgctgtttgggttgccgctgccgccgctgctcacactttgacccagcgctgaattcatgccagttgcctctccagggcgcccttggacttcctgcctcttgccagtgctgctgatctcgggaatcccatacaaggcagcagaaggcagagatttattagcatccttagaagttttactccttttcacttttgatttgctggtctctttgtgtgaattcccctggggagcagaggcctgaacagaagcaaattttaggccatcagctaaggctgcggtagcaccagccccactggaggccggacctccacaatccttggagttgctgctactagtggtggtggtggaattattcatctcaaatttctgtctgtccttctccaaatcagcgtccaaatcaattattaaatttccaaccccgatttcccaatcatcgccactgtcataagtatcaactgtatttggatccacaccttttcctgcagtagaaatgttcactgacatcctgaagatgagctctctagaataaaaatccgatgaacttttctttggagatgag

SEQ ID NO: 44821 - DNA, 4186 bp, Homo sapiens
gaccagaccctggaagttctgaggctagttttcagaatagaatgttgctaaattttccttatttctaatttaggtttcagtacttctttttacaaattgtctgggcaatctgttttttgttcctagtaaggaacagaaaaaacaaccaataactgcccccaacacacacacatacctccctcctatcctcttttcccaaacagcttctacaatttcttttttgaaatatgcatgtcttttaagagcatttctctctagaaaagacagtgttatataaaaagttaaatacctgccttttgagaaaaaaatacatttaaacaattctaccatattcctaggtcagagaattgctcactctcttaaatacggtgctactgactgtacagaaaactgattaagacatacactttaagtgatctgcgccaaggtggcctcaatgaccgcaaatgagtgtgtttgacaaagagcagttaaaacggtttttaaagggatcagcccctttttaacagttgattgtcaagaaaaaaataaataaatatacatacacacacacatacacacacacagacattgcttaccttttaatcctttatcattttttaattaggccagcaaatcaaaatgcctttcccactccactcggcaaacaagcctgtgcctcattttacttaaacaccaaatgatcaagaaggaagaaaccaaataacacatctcagccagaataatcactcgataacattattccacctccccaccccccttttggcaaacgaatcagtccttttctccttaaaaaaaatgtgtcactgtacagctggaaaataatgtttcacattcacaacagaagcaccaaaggtttttttttcctcttaacaagcatcgagaataatagttttttaaaaaacagagagtttagagaaaaaagttttcccaacttctcattccgccttcagttccagacttcagagtcaccgtgatcagtaatgatcccatgtagcaaacctacaggcgtccgctagtaacgagacagaatgtgctaacatcgggataaattagtgaaagggaagaaagaataagaagaaaggactgaaaatctgggctggattccgcctgttagtcgggaagtggcatttttccgcccgtcctgacagatttgatttcttgaactaacttaagagaaaaggagggggggagtagagggaggaggaggagaagaaagggtgggatgagaaactgggcaagaggagaaaaagaaaggtgtggaggaggagacagcagatgattcagtgagctgataaaccagttataacagcattcgctcggggcggggggcggggggcttggggcggtggggtggggaaaataacggcgtttaaaatgggctcagtcttcgaaacctaaaggatgtgatgttttcctgtcttatgttgttttaagaaaaaggaactgagttcctagtatagctcccgaggggagtggaatcctctgtcgctcaggtcagccagtcatgtggtaattcgataattagagtcaaaataaggtttttgttttctttttttttttttttaaggcgacccttttcgggagtttttccctcttatactcgcagcaaacggtgtgtctcccttttatttattttttctctcctctcccttcgcccagcccctcctgtgtttagtcagatggccccggagcttggcttagtatttttaattagctggcgtttggaagctaaaagcagtaatgaattgttgatggattggaagtggagagtcgctttgctggaaatgtcggggctgggagagggggatgggcgagttagtaacaaccaaccatctaaaaggagcgattttgttacagtgcaagcctttcacatcacgtgaggatcaagggctcaattggttgtcgtgagaacaaaaatggtgacaagcgtatcaagaaaatactgatctggtctttaaaaaaaaaaaagctgaaagtctctcccctccccctgcacacactcccccaacctcctccccccgcccccccgcagtgggcgaagctacaagttatgaatgtgaaacatttctcggagatctaggatctccgaagttcggaaggagcgaaatgtaatgagcacaagagcaaagcagatgttttaaagaaacactttataaacctttcctcaacttatctccaatttgtcggctttcccaaggggccagggacggggacgcctgggggagggagaagggtatctccgagctacttggattttagggacccccacttcatgtattaaacaaagaaaaaccttttgcttgctccccagcctggtcctgtaataaatacaccattgttactatttgtgggtttgtttgggttgggtggggcttttattttttctcttaatggtatttttgttgcttgcttttttaaggagatggcgaatggtaattataaccattacatgtaatgagtgactattcccttgtttaatattaaattatcgggcactgggatctgacaggagacagaaatcggcttgttctgcccttgcccccattttcctggatcgctttgggaggggggtctgcccagctaggacagaagagggagggagtaaggtgagctagagaattgacactgcagaccaggatatgcaactgtgtcacttttattctcctttgggttagagcccaaaagctaatttcctctaagttaccccgagtgcccagtcaagcttaatttgtgtgaagttacaaatgcttcaccctccactgaataaaattcacccttcttgggttgttgttctaaatgcaaaagccaaaccctgtaactagttcctcatttctatgcataaaactcgcacattcccctgcatgaagtccccgctaagtgctatatagagacacaccacgcaaccgtacttacggtctgtattggatcgagttgaccttttccttctaactgcattgaatgtgtttggttgcagccgctttattttggaaattataatctcttcaacaaatttattattaaagaagatggaccatcaaatgtcacagaccgtcctgtgtattttttataaaagcaaaaattaaaatttaaaaaaagcaaaacaaaaatccccctggtgcacacacacaacaagcttgttctgcaacactaaatcaggactgaaacacaacacacacacagggggagtggagcaaaagaagctctcagcctctatacctgaaagggacttttctttgttcccagtgccctttcgcatcgggccaatcagagagcagcttttatgaaactgggctctctcattggctagctgctttctcttggctactgtagggggttgagatatacacacgtataaaacacacactgagagcgggtgggggtgctgtggggggtggttgtggagacaaagcgttttattttccaaccagattggggttgaggaacctcccgcagtaagaaggcaaaaaaatggtgcgcccctttcaattactacatcattcacataaaacacttatttattaaaacaaatctcaaacaggctgcgaggagaggatgtcggtaaatacaagtttgattgtgttatcttgggggaaataatgtatgtgatcgctcggtggcagagagaagccaaacgagccgctagcgcgtagcgaagagaaaagggaggctggctgtgtggaactgactgcgagcattttgccggcttcccttccttgttccaaggacttcgcagcccaactcccaagactgattttctgtattgcagcttctggctttcaaccctccccccaccactttgcccttcctgcagttttttttttttttcttccctgtgtctctctttttactcgctgattaaataagaaaaatcgatctgcgggtaaaggcgatggtggggaaacaagtaacccttttgtttccagggctctggtctacaggcactgaagtgtgaacgcaggcgaccatttaaccaacactatgtgaatggttcttccctggaattagtaacaaatcttttccacctggtgttatgtgactccaaaaaagaaaaacttaatattaaaataaggccccagctaaacatagtaacacctcgggccagcctcatcttttaaaaaatcgacttatgaaagttaaatgtactaggaagattaactgttaaacagtcccagtacacgtattt

SEQ ID NO: 44822 - DNA, 502 bp, Homo sapiens
gattactgtcttaagcctactaaattttgggctgttttgttacacagcaacaaataaataactgccagtgggaggtttgaagagttgctcacaatttcataggaagtaaagtgctggagccggaaatccaaccaagtctgctgactgcactggctgttattttgccaggacctacactacttcccccaacgtgtccccaaagaactgtccgcaaagttaaactatatgttggtgaaaattgtataattgcacatttagtgaaaatccaaactcaggggaacagttctcagaagaactgggtatgtggcaatgctgtttgtctgtgaaattgagcaatgtcttttaaaatgctctgccaaaaaataggtttgccctagatttggggaaaaaaatctctgactcacttttctgtgcctctagaaaacaaaatacctttgccagcagccttttcccattcttttatgaatcctccaaacaacaacacaggctttgggctaggaag

SEQ ID NO: 44823 - DNA, 1087 bp, Homo sapiens
ttcttcacaatatttatttagactactatcactgaagcaagggcaccaactcataaaaactcaactttctcagaagtaagacttcattaaagagaacactccaagaggaaagtactctggttaggaacattcctttacagtcaagaaaatcaattccaacttgagtttcaagtatttcaaaattactggatgagagagatatgttacttttattaaaaaattaatgctctttagaagaccatcacttaaatattagtgtaattcatgctacatcacagttaattgaaaatatcactgacatttgtagataagaatgacaataataactggaaaaatgcatttagttgccaatgcctgcaaataaatgccgattttgcttacggcagactagaaaaataaaagcagaccaaggtatgtttgttggttataagggtgggttggtctcatttaagtttacagtgggaaataatattcatttgatttaaaaaaaatctatgtgaatgatttaaagaaagaagaaaatctttggggtaagtgttgacatttagaatacagaatctgctttttaccttcagttgctgagaaactgatcacagcttggttaatcttttaccaggaaaatgtccactgattaggtaacttagaaacatgtttatatttcttagctactagggtagatctaccagctcaatttacacgttaagcctaggaagtggaaattcttaaccctggatatggatctgcccaaacgtctgtctttcattggtctccagactttgtttctatagcgaaagcagcctctaggggtgggtgtgtgggagagcgccccggcccccagcagacacagggagtgagatatgacagcactctttaataatgaagtgagcaccgtggcaagcccagattctgagcaaattctctttgaaaggcaagcagctgtgtaatcatttatctagtcttagtaggaaatggcttattttacacaattttctcaaaagcaaatttgaaatcctcattgtaatgtgacaccttctctatcctcaaagtgcaatgaggaagagaaaatttaatataggagtcagctttc

SEQ ID NO: 44824 - DNA, 836 bp, Homo sapiens
gctgcactgccacagccctatcaccacctgtcaggaactccttaacgacatttttgcatcccttctgcaactgacctcctggcttggctctccagcccctccccctccctttaaattggaaacaaaccacacttatgtcaaaacggcttctgaactagttccttcctgagcaatcccagaatataaaacatgttctgaaaagctgcaccattccctggagaaactttatgatttggttactgcagcagggcgcgctgctccttggctgtggtagccttgagtcagtgccaaacaatgaagcaatgctattattagcctttccattcaatggcgacaaaacagtccatgtttctattttcagactgttctcttctggtgcaatagatttgccagaaacctaagcctcagggctagcactggaccaacagggcaaagtaggcacctgaagccaaaacatgcacagtggcacaaatgtgaaaatgctttaatggtagtatttttaggcagaggcaaaatacagagctggccaaagttctgtctgctgaaacctgtgctggtttttacggaaagttactgctggggttgggatagaatacctgggatctctaccatgaagttgcccaatttaataattttcccaaattgcaactgtgtagtaacatttgtgactcagtcatttaaactggcctgttggccaggctcagtggctcatgtctgtaatcccagcacttggggaggcctaggcgggcagatccctgagctcaggagttcgagaccagcctgagcaacacggtgaaacccgtctgtattaaaaaatacaaaaattagccaggctt

SEQ ID NO: 44825 - DNA, 951 bp, Homo sapiens
atattattattactctaggccttgaaatttcttcattcttgtttcttttttttaaatagggtctctgtcacccaggctggaatgcagtggtgtgatcactgcttactgcagcctcgacctttccagctcaagtgatcctcccacctcagcctcccaagtagctgggactacaggcacgtgccaccatgcctagctgatgtttttttttttttttttaaagaaatgtgttgcccaggctggtctcaaacttttaggctcaagcaatcttcccacttccgtttcccgaagtgctaggtttacaggcatgagtcactgtgcctggcctcattatttcttgattcctatgtgaccccactctaagaagagaggccatgatgacattccatgtccccgagtttcagtgaccacttggactctttatctaataccccttaaagggtctggtcattcttaccatattatgtattcacttgaataaatggccataaatgcctttagagaagaacttggagtgtcagtgctctgtatatttgtctcagtgttggcagggttttccccctgggaacccagccacttctttggttaatagattccaggtctggaattgctcaggttcaggaactgggcaaatgatcatgacatttttattggagcaattgcattcaagctccagtgctgggtaaaaaaatattaaaaatgcccgttagaggggtcctgtgtttggtgaagatgggtaggcccttaaacaactgcctggctcagtcattggttgaggaccacccccaaaataatgtgccctcagctcaaaagctgaggcaaaacctgaaggaactgataactagaggccatcagctaaacacactcctactcactggacaggagttctttctggaaaggcaatctgagcaggtcacctcaatgtctgtcacacaatcatgaacaaaaatatcc

SEQ ID NO: 44826 - DNA, 953 bp, Homo sapiens
ttggcttctttgttatttttagcttctgaacacttaaacgtatttctttcatttttactaacccaggccattaagacaaaatgtgtataaggtagttttttgttttgttttgttttgcagcacaactgttggtatgcccattagtgtccagtggaaactttcactttcagatgtggaggccgtcttcatgaccacatggttctgagttgacctccttgatggtgcctgagttgatccttggaaatcagctacgtcctagtagctgaccacgaggcagcactctgcctagcaggcactagaccagcgttataagtagtgtgccacacagtatctagccattaacagaatagcaatgctccatctttgctagaggaccacttgggagaaacatattatccttagccattaagtacagacacaaagaggtggtccccagagggctccaggacaagttggaaaagcctttgctgaagacagaaccagctgcactgaaaacctgttttgctaaatttagtgcactttggaccttccttttaacttcagagttacctctctagacgctggtcagtccaacaatgtttatttagtgacatgaggctgagaagatgaatatcctcacgctcagttatttacataaagctaagtagcaaagcctgtaatgttataatcaggtacctatctgcaagacagttttgaatgacacagggtatgaaaaacatttactctagtttacactgtttttgaatactgtttagtctctatggtgaaaatattaatactttttaatgatgtatgtgatcaaacttttatttgattggcttcttatggcacaactcttacaaaaagatgggatgtcatcatgtgcattctctgcctttgagcctctgatgattccagtcatctcagaaagatagggctctgccctcttgcttctgatttgctggcaatagacc

SEQ ID NO: 44827 - DNA, 923 bp, Homo sapiens
catggtgtcatcgctgtaaatggtggtaaaatctagtaaggcttgatcagattcaagttcaatttttttccccaataatattttaattttaggctgtgataccaagtgctgtttctcatccttggtcttcagggtggactcttgctaagcttcaatctttagaactcagttcttacgttctttaggagtagtaatatgtacccaaattttagctatgatttctaaaaagtgagagaatgttggcctaagatgataacagaatttagcactgaaagaaaagttagacagcagtcaacgcagggctctgagaatggtgttttctaatctactttgtgaataatgagctcataggcaaataattttgggaaaaccccgagtaagtaaactaacacaattttctttacaatataaaggtacattgcaaatctaaggagggagatatggtaattagtgtttcctaaacttatttcaccatacaactacccttcgcatgatgatatttattgaagttctcttataaacagtgttttacactgagaatgctgaataattgggtcacagtgaaggtctaggactctcaacactgtttataatgtagtaagcagataagcagatgttttatctgaactgctttgtacagaataagacaatttacttaaaaaaaaaaaaaaaagaatctcccgccttcacctaagtttgagcgcttcccaccaccccccaccccgcccccgcccccagcaagcctgcctttccccttgggaatacactgtcaacaaaacacagcaatgaaatcagcttcatcactcttagtatctcttctccctttcttctgcagtaagataatacctgctttttaacaatggacttccagactaaaggttatatattctagcatagtagctgttgtttctcagtgtgtagta

SEQ ID NO: 44828 - DNA, 1687 bp, Homo sapiens
attattgttgtttcttgtttttctcttcttttttcaatgactcacattttcactagattaagaataatattaacctctttttggtgtaaagtatagcactgtgacatgtaatatctcattgtaactgagctttgcaatatatttgcaaggaaagtagaggtggtagcaatatctctgtttggcatatgaggaaactgaggcttagagagcctaagtgaatttcctaagctttcactgccaggaccaaaaagagctccagcttggttctcagtctcatatttcagatgctttttccaacatacttcattgcttttactgggcaactggctttcaaacatgtggtgtgcacagttggtatgtgtgggacattcaagtgaacttacctaaaggcaacagaataatcatttggaaggactgacccaaatagacacagctctctacccgtgtgagcagcaggttagaatgtgggcaggcagcccagaatgtgtctcctcccgggcagacagacaggaatctctctggagactggccaggaggccagaaggtctcccagagactcaagagggctgccaggaggaatctataatgattccattttaggtttaaaggacattatagtcacagcaggcgtatctagtactatacatgatgctgacacaaatgcacatatattggcgtctgatgtagatagatgatatcttgctgtgaagggtgaacgaacaggcagttttctacttttaactttcagtcaaaccaatcaacataaaccagccagcagcgtatgtgggatgacagatacttccagatctttgctgattgcactagccggataattaatttgggcataagtcatggttggactcctctgccactgcatgttcagatttttcccacgactgattgtggcagaggctgctaattttctacccaacatccacttcgttctcctttttcagtaataggactctgtttttgtagaggacagccagagtataattaaaagaccattttctacatttccactttgcagccaggagtggctgtgtgggtatgttttagtcagtgaaaggttagcagaaatatgtaggacttttgggagattttcttaaagagaagtggattgacctcccttcttgctgcctggaatgtgggtgtgctctagaagctatcttgtaagtgtggtgaccaggctgccatcgtaggaatctaagagtaggggacaggcaggagcttgagtcatccaaaactccatgaagctgctttgacagtcttggcctgctgacctccagacttattttgtgtgtagggaaatatgcttctagcttgcttaatacgctgtggttgttcgttatattgcagtggggaccttacaccaagtgatgcctagatgggcacatggtgctagaagagatctaaaatgcgataaaaatacaggtgaaaaaagattttaaaatataaaggaagaaataatttggggtctaataagaaaagaagcgagtgattgtagctgggtgatatttaactccgctgttttccaattctttctgctcctgccctttgccctactctttaggcaccactgccctgatggcagaaatgatacagagagcaaagtgtcaaattactggcttccaaaggtctgtgtaggctcttaatagtctatagaaaatatcataatgtttttaac

SEQ ID NO: 44829 - DNA, 721 bp, Homo sapiens
tgagaaagtagccaggactggttaagtttaactccccccatgaagttattttagatgtcagtttctacaagtgattcacaaacgggcagattagcagaaacatgttattccagaatggtcaggattggggagagctagagaaaaacactgactttattctttgatgtttgtggtggtgtgaatatttgtcttgtatttgctttggtgatctcattgtatgattttagaagaactatcaactgatctattttctctttctttgaataaacttaaaaatgtgacccaattgttttcagtcagagataataaaataatggatgttatcattgttttgaaataatcatttactgttgttactttcttcatggtgttcttgaacttaggtttgaaataattaattaattttgattccatgatctcatctgaatgtggcagaaggagaaatggaatttgtactctgaaaatctgtgttctgcggtgttcttagcttaggtaatgataaatccttggactgtggatgtgttcaaaatgtgccacatttagacatctctggtcactggcataaacctttagttattgcttaaatatagataagtgtctttcttttttaaaaagtcatattgtgtgtaaagaataaaataagtatatatattgaatggcctgagagcaaaacaaaacactgaaaaacttatgaaagtagaaaaatgagtattcttatgac

SEQ ID NO: 44830 - DNA, 675 bp, Homo sapiens
tgtgctagccatgtgatgtgcctgtttccccttcatcttctacccttattgtagtttcctgaggcctccccagcagctgagcagatgccagcaccatgcttcctatacaaactgcagaaccaagagccaattagacctcctttctttataaattacccagtctttggtatttctttatagcagtgcaagaatggcctaatacacctacattctgactgggctattcttatcctacctccatgcctttgctcttactcactcttcccccattcttatttgtttttctctgactaatcacatctgactcagccctgaaggtttattggaggaggcatattatagtgatttagagtgtaggtgctggagtgagactgcgtaggttcagatttagctctattgctatggaaatttgcaagttactaagccacagtcagccatgatttccttgaatttaaaatgagaatataatggtacctaagtcaagtgttgttgtgagcattaaatgagttaatatgtataaaagagttaggccaatgcctggcacttggcaagaagtcaataaacattggctattattttaatgcaccatgaaatcattccccaactagcccatgtctttccttcctttaaactactgtactgttttggcctgaactcctcattgcactcttgaac

SEQ ID NO: 44831 - DNA, 1027 bp, Homo sapiens
atcattgcacgttgcttcctgtctctctcatggtttgcatttatttagcatccaggcaggcctaacacggggtgattaaatctcctcctcagatcaggccatctgtgccattgagtaagtgagatacttcaaataagtgaatgatgaattctgttccagactgtcccataaaattataataaaaataataatgaagtgctctataataaaaagaaagtcattacaaataccgtgctattgatttcaaagggcagtaattttagaggagctctttcatctgtgttataaatctcggcaaccagcggagaaaatgtcaggattttaaaagcaaacaaatagaaaaaaaaaatgccttcctgctcatctttcatgctgttttgagtaaaactaaggtagcacaaatatttaaacagatggctcaatgatatgcttttttctttactaatcatagttattaaagcactcacttcatttttattgtgttttaaacgggcagagaaaatctgagtctgataatgacctttgtacatcatgctgcaaattgattttgatgacctttcactctccgataattaggctggcttcatctccctccctccctccactctccaagtgcgtggtgcggtgtttttcctgcctgcccctccaaaccctattcccctccccctagctttgtctctcccattgctggattgggtttctttctcctctctgaaagccacagattcttgaataaagaatgaatagaggtatttagaggctgacaaaaaagaagaatagttattttactgatgttttgaatgatcaaatatctgaattgtcatgtaattatgaccattacaatgatgtcattgccatagtcatttggcgattgtgtacattgtgttgaagacattaccacattgaattatacctcagtagtttaatgaattttataagggtgtttctttgtgactaatgtgaacagatggtagaagtggaaaagaaataaactatgcctcattttcctttacattttctttgtatt

SEQ ID NO: 44832 - DNA, 1275 bp, Homo sapiens
aggaacaataaggatggtgccatccaacccggctatgccacaggcaagactcacagaggtaaaatgagtgtgcaaagtcaggagcaaatccagggctggaatctggggcttttcccattatcctaggcttgatctaaggtcagcactgtctaagttaatgaacatacagttttgcagttctagcaacagagctcaataaaactacacttgttctggtgcacaccaatgagatcatccaaggtcattatttctgtcttccaagctctgcagatcagcacactactgaaacccaattaaaccacaagaggtggggaaacattaaaaatgaatcattgactgtttagggggaaataaaaagacaaggctttctgagtcagctgaaactttcatcagccactgggcgtaccctgtgagcaaaggaagtcacaggggcccaatgagatacctctgtcatatttttttctccagattgtgctttcttgaagagatactgaatttaaaatggagctatttggcaatgacaggagtttaaaggagagagttgggaattagaccttgcaccaaataatctacatccctgcaagtgagtgcgccgtatttcaagctattctggttggctgagcaaagccctgcatttttgttaactccctttaattaatcttgtcataagtcctatagtgaggtggatgaactttcaaacattaaacagtggaattactcaccgggtggcttttcccaaacactccaaccccaattaaagagctgtatttggtttgggtttcctcaaatggcgctcctgttaacactcatcaaacacaggaaaaataaaacagcaatttaactgtgcccgcagtgtgaaaggcttgtgcaaataatcagcacatttctaaccggttagtaataggcagagtgcaaaaaacaaatgaccagatttataccactgggcaggtctgaaagcaatgttacagctgaaatatattcatttacaatttaaagcaaggctttcagtgaataattgtttacataatagtgaacagtgcttgtgctgcacaactgggatccatttacaatgtgttaaccaaataatgcatgtttacaaaagatttagagtttgtttttggagaaaagaatcgtggtacccttgccaacaaaagcagagcagtatgtacagttagtaaatcttttcttagctgcaaaattagcgtcaagttgcttgagcccgtaaactacgtcagcataagtcactctcattaaattgatgtgtgaaggtagtat

SEQ ID NO: 44833 - DNA, 1219 bp, Homo sapiens
agtagagaataaaacaaacaaatccacacaaacacacaaatctagtttcatgctagatgtatctgttgtgaagcaatatgttggctgaatagggaaagtcaggtgagttaaagtcttgtggcagcctgatttaaaccatggctacacaaaccagagccctgtccagatctcaggaaagtgaattatatataataacacttacagtttcctactactattagatttgccttcttacataaatgcttaagttatgataaaaaacagggccatgtcagttcctttcagtctcagcacatttgctattagcataagaaatgctgcttatggcagagctagtcgggcttgaaatttctgaattaatggatttgatttcctcttgagacaaaccatcagccttgcagtaatggaaatagatatagttggtaaaacaaataaaaagctggcatgcagataaaatgggtttcggtttaaaatagtaatgttgtaattgaagtgaacaattacagggttgctcctaggcacaaaagaaataccatgaaaatgaagtaatgtttttgttaagtatagtcatttcatgaaaatgtagagctgcagatgtcattgtctgccaaagggaaaactatacttattcttctatacaaagatcatttaataacatttggctaattttaataataattgctaatattaaccctatatttcactgggagtttgaggacaaaggctccctcccccgccctgttctttccctgtcttggtagtgagccagggagagcaagttcctgtaaaaagccattggcaatgtgctatcaaatccccacccccagcagcagtctactcttttttaatgtcttatttctctttctttgtcaagcatctgttatcaggaatggagcctgttagctggcaattggaggtgcaggaggaactggaataaagaggggaaggagagtgggaacgccaggcaggacaggaaagtgggctctggaatgttcacatttgatcccctgcacattctttcttttttttttttcctttggtctgttgcaacttgtctgtgaaccatacgaaattcagaatagaaacttccatttttagaacttgaaatcttttcattttcatacacacacaaacggaggcagccaaggccacaggatatcacaagaaacataagtgtctcattgactctgaaaagacagtgacacaaatacactttcac

SEQ ID NO: 44834 - DNA, 906 bp, Homo sapiens
ggatgttagaatgaaaactaatacaggtcaatctaaagaatactaaataaatttaagttttgttaatggtttgtttagggactaagaaatgcattcatttgggaaatctgttctgaaattccttcatttaagagtacccccccaggatagagcaaagtcttctgtccccagtaacacattacttgtctttagaatcatacgcgatttaaatcatctcattgttattattgtcactccattgtccactggcaactcagagccacactgtctctgtgttcaaagcaaatgtttatcaaatcacgctccaaggtttcgtgaaggccctgaaagctgagagaggaggaactaaagatgaaatgggagtactgaatgtgagtctcaaaccaggagggaaaaaggtattgcccttgaattctggcccacactgaagtttccggttccaatgtctttgttgctttttctaattttttggctgagagctcgtgtgctttcctcctcccaggggttctgctgagcaggcctggttggaagagatcccaggcgagagcagaggtctgaggattattgaagtggttttctttttaatcacttataaaaacagagacaaagccaatcaccagccatgtgatttgctctaagtcactgggcctctaaattccctgaagaaagccagagtcagctctttcccaacaatgtgatattttgagcttctctcaatttgagagccttagacctctggaaaggggagggagagagagaaaaaaacataccttgaacacatgaacaaagtagggactatagtgaaactatcatgctcaagcacaggggataagcctgtgtgtctctgcccctttccagcactttgaaaattcattttcactttatttcctagttgataaaactcag

SEQ ID NO: 44835 - DNA, 931 bp, Homo sapiens
agttgcctacataagaatgactttgttacatattcataatatggagtaagagatagagtttttccttttttttggaaaaaaaaaagcacaaactgagtaatcaaactgttaccgtatttatggcctcatctccaataatacgtgggaccttggatccattcacctgaggtaaaatctctgaactttcatttgtctgcctgttattaagaaaggcagtaaaatggaagttaatatttgctaaacctttgacctataatgcagtttctaaatcagcagaaagtatctttgtagagttaagcaggaaagagaaaaaacagagctttgccaagtgccttttctcatcaccatttcgcagagaagaaaactggataacacaggcagtaaaccctcagcatgtccaagggcccttaacatgttaggcaaaaggcaagattggaagccaggtttgtctcacattaaaggtgtattgccccttcagtgaaaaaacctggagtgcagtcattagaatggtgagaagaagggcttcccatagacctgagaagagttgggtggtgagtactactctcaactttgcctggtgaccatggagggaagtggaagtacggaaggggaagtgggagatgaagtgggattgtagtggcaacagtttgtaggactaacaatacaatttttagatctttaatagatgtcatctaccctaccctaaagctacctttcctattctcatgatagcagacctctaaagcatatcagactttgatcccaggaagatccactgtattgcctaagttcatcctgctgacctactgaacctgaagaccctctcaaaattaccctcatttagctcaagtggttggcaacagttaaaacataattgcccctggagctattatcatcttactgcattagtgatatgaatataggatctgaa

SEQ ID NO: 44836 - DNA, 3282 bp, Homo sapiens
atggatttttctccaaagagaatacacaaatggccaataaggacatgcaaagatgctcagcatcattagtcattaggaaaatgcaaatcaagaccacaatgcaacgccacttcatacccactcgaatggctatatcaaaaacaaaaaaaaaagaagtgttggcaagcatgtggagaaactggaactctcatccactgctggtcagaaatgtaaaatgttacgaccattttggaaaaaaagtttgtcagttcctcaaaaagttaaatatagcaatttcattcctaggtatataatcaagggaattgaaaacatgtgtttgcataaaaacttgtacacaaatatccataatagcattatttttaatagccaaaaagtagaaacaatccaagtctccatcaactaaataatggataaatacaatgtggtatatccatacaatagaatatttttggtcacaaaatgagatgaactttgaaaacattgtaggtgaaagaagacagtcacaaaagatcacagatagtatgatcccatctatatatgaaatgtccagaataggtactttttctatatatacagatgagatatgaatgtctcatctctaaagagagaaagtaaattagtaggttagtggttgcttagggcagaatggaagaggaaaatagggaggatgggcagggactgctcttgggtacaaggtttcttttgagtcatgaaaatgttctaaaattagatggtggtgatggttgcacaattctgtaaatgtactaaagccactgaattgtacacttcgaacaagtgaactttgtattatgtaaattatatcttaataaggctttaaaaaaactctaaagtgatagttactttaaataagaccttatgattttattataagtattgatcaaaataaatataaaatttgctaaatccttattatgttcaaggcaatatttaaagtctttacaaatactagctattgtactttcttaacaaacctatttggtaggtactattattcccattttacagattaggaaactaaaatatagagattttcaaattccccagctattaagtagcacagtaagaatacaaacagaaagagtctgcattttttaaacaaagtatgtactgagtctggatctaattgcaaactatggggaggaaattcctgaaattcagaaaattgtggaaattttgaaatattataattaatgatggaacctaacacagctaatgcctcagagtaaatatctatctaattacttcacacaatagcagtggaaaatgaaagtgtaggttgtaggatcgcttcccgctcttgtcccgtacaaagacaacatttaacacagatggtctgttgctggtacgttttcattctctcaagagtcacaacagggaggaattctacaaagcagcatgatgtgaagaggatctagattaccaggtcaggagtggaacatgaatcaggaggcagccctagctctgccaccaactattcaagtgacctatccccactagtgatagatctataacaggaagtattttaagtacatgcattctaaggttcctattggctctaaaacctctccctctatatcctctatcatctagtttctagactaatctcaaaaacatcttggccagtggtatgttcattcccaaacaaatctttctgagatgtttcatagaattctccaaacatgtctttgattctgtttccactactctggcccctggtgctccaggtgtgggagggaacagagaagatgtgtcggtttctcactttgaagggtaaggcctcttgaaaataatgactgtatttagtgaatattggatatactttcagaattaccaaatgattttgataatcctttagagtaaaacataattttgatgatgataaaatgttcattgtgattatctctggtggctgaggattacagatgatatttttcttctttatattttattttcaaaatgtttgtaatgagtatacattttgttttgtaaactaaaaaagcagtatattttaaaaaccttagtggcacaaagttgtgaatgtagttcatgccactgaactatatactttaaactgactaaaatagtaaatttatgttatgtatcccttaggccagtaaaattaatacaaaaaataaccttatgggggacgctaataatcatactatcttcagaagtatttctctgaaaataattatcaatttgcataaaatcaaacaaaggcagaatatgcaataaccactatgcaatttgacagataataatgctattgaaatcaagaatgctgctttttaaaatctggtaactctgaggtcaaatgtgtatgttttatcaaacacccaaatgtgaatgtttaaatgtttacagcggtgtaagggagtcagctcatgcttgctcaactgtcagttcattacaggctcaattcccaaagtcacgttcagtgtatcatgtcagcagcttgaaatcagctgtggtaggagtatttacgctgtggaaattggccagtgctacaaatcagagcttttttttttttttcctggaaaaccggtttaccaatgcatcactgtttaaataataaacatatcaatcaacagaaagttctgcaaacaaaatttttaaaatcaactatctcaaatcattttataaatttaagcaaatatagttaaaagcactaaaaagacttacccaagctggtggataaactagaataggaacttgggttttcaaatttcttacctttatatcttaaagccccaaatgcacacaaaaaaagaaagattatctaaagtccaatcttgccatgtctacttacatgtttactgaagctgcaagatcaactttctaatcttctgggggcaaactccctctaaagtcatgagctgtggcagatagtaatagttctctgacaaggggataacatatatcctttctctgcatcctctcaaagggttcacaactttgggagagaaatcaaccccctcccctctttatcataaaaaccgtagaataaagaagtttgaaggagagaggaagggacttaagatatgctttagcccatgaattagactggaatattccaagctgcttggcaaggtcattatcaccagtgtcaacactccatgggcctagactgtcaatgcttgccctccctctaggattaggtcttccacaaaccacgtgcaaacacacagctgttgtcccattgagtaaagcaaatcatatctttcacttatatcatatgactccactcaacatgagtgaaag

SEQ ID NO: 44837 - DNA, 2971 bp, Homo sapiens
aaattatctagtagagatgctatattgactcaaaagatattagctagtacagagagtcaataaatattagcctaattcactgcctttctatcgcttttatttttagttaacttttcagttatgtagactgttttttcctagcttcattgttgaagcaaggacccattttttaaaactttttatatcactcgctgcagctagcaaagagctttgctaataaatatatatcagttgattgagtgagtacgaggaaagcttatctattgaaaaataagttcaaagactgttcactgacactggaatttcctcctttagagacattttgttctaagttaggaattgcccctgtttaatccaaacctgcatgagacagagagtaacagactacatttcactgaccattaacatctgtgccagtaagagttgtcttttgtttacaaggagcagaaactcccatgcaggttgttgctattgtatgaggcatggtgactggtttaattcagcaatttaatataacagcttatttaatgtctccaacatttcaactcaatttcagcacagagataagagaggaaagagaaatatagaccgtgctctgtcaaggaaggacagggaggaaagctgggggcggtgcaccttcagaactgtagcatgagggcgctcagcagtactaaggtgaccacctgccccagtttgcccagcactaaagatttcctggaatttagggcattcagtgctaaaaccaagaaaactcagcaggaaaatattgtccaaaataatgtaatatcactgaaagactcacttcaaaagtgttcttagggtcaatacagcatgtagagcagcacagacctgtccctgccaggttagcagttggttagagcaaaatgctaatgaggccaaggctaaaggtttgctttgatttcccaggaaactttgctctcttccacaatcagaaactgtgtacttctcttaagccagccattctgcaatgtcactgactaatcacaaggggaacaaggagagagagcatagctactgtggaacaaatctttcactggtgctagtaacgagggtggagggacactgatgttttccttgtgcatgaacatttgtcgcatgaagaaactcattttctgaacttatttgttagtaaaatgcatatctaggtaacaataatgacacataattgcaaatctctactgcatattctcctacgtatttcattctaatcctgtgaaatcagcataacagatatcaaacagagcagaactgggatcacctgcagttgcccagccagcaagcaagagacacattcgaactctcgcttcctactgtttgtttgtttgtatttgttgttactgtttgggtacaagtcacagcctcctataacccagcaaaatatgcaacctgaatattgagactcccttgactttgtgtatatcacttccataagaactccagaactcttcaggtcccaaggaccaaggaatgcagccttaaaactgctgtacatctgccaaacattggctgcaacacacacagtgtgctggtcatttcctgcgtgagtacaggcataaagcacatccacattgctcaccctgttggtcaggctcaggtggttagaaaaagcatcctgcttttaatgtttagatgctgccagtctctgcacctcattgttttgttttgtttaggtgtttacttttccatgcttttctgactaaattcagattcagtggtgttcatcttagtgaactaaaagttgaatttcccaaacacatttatttctttacagcaaacataggtaggatgaaaaccgccctgtgtcacactgatatgttaatcattaactgacttttaaaaacatagcctcagctagattgagtcacatgaagaaagagcttcctgcaattcaaggactgtacaaagctgaaacgcagagattttcatattatttgggagactcagaaatgagcttttaaggttgttccttgacttgcgggtcaataagcgcacaatggtgaagaaaaggctgccttctagtgacacggtgttccggtttgagactccgggcagcccaaggaaggccaacgtggaggcctcacgcagctccacagacagccccagctcggtgttcctcaggtgggtacagcctgggcctggccatccacgtctgtccccctggtggcctcagctacccaactggtgacccttggagagctcctttttcattcctggaggtagggatcagccatgggaagagaaggtgcagcctaggcatcctgaccagtggattcgaagggggtatgtaataagggatgggctcttctgagcaaatagaactattattactatgaaggaaaaataatttttagtgccttctttagtactttcttagtactggataactggtcactatgcaattcctcaattcttgactcactctcaggttcataagaagtgaaaacaaatcgttgaaccccaaatcgactttggtatcaaaattacatgaactattattaaaataataattattaaaatattaagataattgccttctttttgcctttccaatttaaatttaaaatagtagcaactgttctctggttcaagtacttactgcatagtgatttatagcagttttggccaatttcagaacatattcattttagctataaactcatcagtatccaaatcagcacattaatatccacatcaacaccactctaataactacatatttttcatgaaaatttatttttcaaattctttattcattttgtctcattatatttatctagcaatttatagaatgtagaaatttagtataagtggaaatcacatattcaaaagaaagtttttcatccaactttcatgtaaactttaacgtagcattcatgtaaacttctcagaataacccccacacccaaactttactttttgacagcaccatatccagaaattcaagagttaa

SEQ ID NO: 44838 - DNA, 1215 bp, Homo sapiens
atgggcaacaaagagacggcttgggaattatcaaacaccaattttgattttgatgagaacagtcataacccaatatttgaagattttgatggttgcttcttctttgcccctctaaccaccccccccaccccagaacgatgaagggttaaccaaaacaccaccaaaggcaactacttattacctttgttattcccacataaaaaattgagcagacctattgtttaagcagaagaggcagtccctcaatgaagcaatatcctgtttgaataatttaggatggggcataggccagcccacacagcgcatttgtgtgacagggcgtcccactcagacgtctccatttccggtatctagagccggctgccctctaaaaatccccctgttacagtcgggatagaaaacaaaaagcttaatttaccaggaggctaaacagattgtgccttcttaggcaaatgttccacctgcttggccaattagcttcctctcccgaaagactcgttcaacaggtttcctttttctcttctctgcctcctgggttggggaaagaggctgtcacttcgcttcgaccctccccttccctccctctcggcttttccacagtgggtcggaccaatcgcgcccgctccgacgtgtccaggtccgcggccccgggagcttggcgcggcccggcctggatgcgctgggcggagggtgcaggggagggcacggcgccgcttgcttggcctgcgcacccggacctagaagccgggacgagccggggcagagccaggcgcgcggaagtctgaaggtgccctccagacacggccccgatgactgaactacagcaagatgtggaagacacaaagcctgcgaaagtgctcgggaagagggagagcaaacttggctcagcccagtgagtattctcagctgggacccatccaaggaggtgggaggagcgcagcctaaacttctctgccccgggacgcattttgggtggatgcggatttctggagctcctatatggacaatcttgtggcgcgctctctctgtctctcactctctctctctgtctagatattcagttaaggagatggtttagattgattgaaaagtctactgtaggatttaaacaaattctcttaattcaaaactcactggatgttgggaaaataattttgtagaaaataagcctaaccacattgaagctcaaagtcccaacacagcccttcgtttaga

SEQ ID NO: 44839 - DNA, 783 bp, Homo sapiens
gcaaaaatgaccctaagactgaaagaaaaaagtcttcatcttccagccaggtaatttgagaatggaatttgtattgtcttagagggtgacagggctactgaagccagtgacaagaaggaacccaagtatgcaccttcctgctggtcaagactaatataggtatagagtttagagaatttagaagaacaaacaggcagcagttcctccagtccatttttcagcaacgttatattccacaactcatttttcagcacattgcatggtagtgagttccatgctgtggcctcgaactctgacagatacccagagatcagggaccaacacaaagtcatgtgcttatccaataattggcaggacaaggggagttgtgacatccttgtactgaaattgaagagtctgataaggcacctgcctgaatagtagtaggccagccaactgcacacagaggagttagacctttgaacagggtcaggattcttctccagaactaattttggttctgctttaaaatatacccagataggaaacaaagcctagttctatgtcatcagagagtgtgatgcatgtgctggggacaggagtttggggtttttcttaattcttcacccctctaaatacttgaatatgtgtttcctaagagctaaaccaaaaaccatcggcacacccaagaaatttaaatatgaaatgtattaaaatattattaatacaaaattcacttttgaatttccatagtagtcccagtaataaatatcctttataaaggtgtttttttcctcttcagga

SEQ ID NO: 44840 - DNA, 1518 bp, Homo sapiens
gcaggtgaaagtgttttacaagctgtaaattgctggctatccattgttattgtcacagttgtgaaaacagatcccttgaggatgaagtgatttacagctttcatggtcttgggccttctgctgccctggagagtgaagtctttgtatgaaatcctacttgtcttgtcagtagcctactactgcatcctactcctgtcactggctaaggaaatgccttcacaataatacagtaggaagagtggccatatgttgccttagactataggtcctttacatgtattatcccatttaagcctcatggcatcccttgaggctggcactgtttttgccctctggtacagaagaggaaaccaaggcccagggagattaagtgactaagccatggtcacacaacaagagctagagccactacagccaagacttcaactcaggtttacctgactacaaagctttgaaccactgtactcttctgagagtactcactggtacctttagtacctgggatccagtatcttccctaatgagattccttagaatttcatcccatttctcatcagggacatccttgtccagccctgttacctcggcagtaggctgaccagcagctgcatcattatatccaaccagcaaagcattaaacttgttagaaaatgaaactgtgtgcccagactttcactgtgttttactgaaggcttgtgtcagagactgtaagatcagtgagaaggaattcctaaagatactattaagggagggaaaatttgttgttgaagttgaatttgtgatgtttcacaagaaagtgagaatggtgatgcttgtattttgttctcattgtagtacaaggccaatatgcactttcacaagttgtttcttagtgtcccaacggaggaaccactgaagcaaagtaagttctgacctgtttgactttttaagctacatatttgaaaagttgatcattagttttggggaagaaaaagggcatagtccatggactgagtcaccaaggggatcaggtttctgaaagtaataacataacaataacaccagcttcagtcagctttcaccaggcagcgtgaaaagatcacagaggagaaaaagaaacagttctccatggggtatggagtcacccaagatggttccgtgatgcccttcccttctttatttattgctgaaatgcacatggttacattgctttaagatttaggataacaagcctggggcaagagaggccactagaagaaggctaaaagaaaactcacatccttagacatggacagacatgtgctgatgccactatgaagggtaagatagtcacctaaatatcttgcccagcatgctagttaagcacgcctactagactctgcagtggttcatcaaggggcccaaagttccattctagcctctcttgatgtgcaaaagttgaggcaagatgctgggttcctgccatgaccttcaaacaggaggtgtgggttatgtgctcttcccctagtgaggccatgtattttgaaaacagtcattcct

SEQ ID NO: 44841 - DNA, 1373 bp, Homo sapiens
aaggcatatgttttaatgaacattataaccaaaaaaaattgagtccttgtgctagaaacatgtagaagaaaaattataaatttgtttcaaagaaagctttcagaatcagttttacctaaaatctatagctaagattatcactcccacataccctcacccatgatttcttcctgccaaccttctctcaatagctatatcagtatttggcttgattcatgttcaatattgacaacagcatgtctagttaaatactgctcgcagctggccatgggacatattatgaatacctttgcttcccagatacatttataattgtttagtttttcatttgcttacttctctgggccataattcaaccccaaattatttgccatttgtccagatctctccacatcctgatggatcaggttgtctacaaatgtcatcttgttcaaaggcctctgctccattctaacctggcaggagtagaggggtgccatgcagaaggggagcagagaatgccaggaaggcaggagaacaggggcctctgggctgaaccagcccaaaggctcctgtgcagcttcccagtgagaaaaggtgagactgtcagcaaagagaaagtgaactttgcccagctctctatgaccacatgctgccacacacactgaggattgagaacagatccaagggcaaccgcagacgcctaaagctaaagaaggtggtctaaggttgtataaaaaaatccagatgcacttttttttttttttttttttgtagacaggatctcactgttgcccaggcagtggcacaatctaggctcactgcaacctctgcctcctgggttcacacaattctcctgcctcagcctccctaatagctgggattacaggtgcctgccaccacactgggctaatttttgtattttttggtaaagacggggtttcacgatatcggccaggctggtctcaaactcctagcctctactgatccacccgcctcggcctctcaaagtgctgggattataggcgtaagccaccttgcccagcctccagacgcattttctatacaactctgcacgggcaattttggcctcagagtcctccagcaggtggcagactccagcacaggaacaaaatctgtctaccccagaaatctcttccaagttgacacagccttcataagcaagagccataactgtgatgaatgcctgttgtcattttaagcactgcaagttattccacatgaatactgaactgtggtccaagcatacaggggaatgcatccccctttcaatcacacgacatccaacacatgccataggtgggtaatgtcaagcaatattcaccccccgcccctgaatccttcacttggtcaggagacaccctgtatctact

SEQ ID NO: 44842 - DNA, 1017 bp, Homo sapiens
tttaaatatgcgcgggaagtttagcccctacagctccaaaatgacgtcgattctgcatagcacacaaggacctaaaatctaagtttttgttttaaaggcaccctacacgagaaaacttttactgtggagcttcaaaatctcccatgctactaccgcatccagcgccagcggggagtcggtaggtcagtgcccgcccggcctcctcgagcgagccccggcggctgcagagatttcttgagcgcccgcgtacctctccccggcctccccagcttccattatacacgccctcgttttcctcgcggagccccagctctttcagccacgcatactggggctgattgatgaggagagtggacatgaaggcggcaggcctgctccaaggtccagagagcttgctggtctttgcagcgtgcacacacagcgcgcgaggaaggcgccacatactgagcccgggactcgggatgagcccaaggccctgagagctgctgaaatagagccccgccccccgcccgggagaacccattgggcagacccgacccctcccactgggcacgaccccgccaccgccccgtctgcccctggtcttccggaggagcctgcggctgaatcctgcctggaacaatgggagtgctacagggaggagtgggctgctgccatctggtgaaagactccgggagccacagttccagctgggaattcttttcagcaaaatattggcgctgaagtacagtaggctatagcaggggttctgaaactgtaaaatgcgtgtaatgacctggtcgtcgtggtaaatgcacattctgattcagtaagtctgggctagggtcggagagccgacattcctaaccagctcctcagcgatggtgacgcctcttgtccctggagtaggcaacggagggtttgtattggggggcgggggaagggttggttgttttcactgttttggtagattacaaattaaagttttctaattaatgataaatattagattgctgcatttcctctataaatatcctg

SEQ ID NO: 44843 - DNA, 1678 bp, Homo sapiens
ctttctgcagaaagtaaaaatggccttattcagtaagttaaatttatgttgctatttctttacgacaccggaaaacaaacatttcaaacaccatgctgagaactcagtccttgttttggggagggatgcacttggaagattcgagctaaggtacaatcctccctaggtatccgcgggtcattgttttcaggacccccacagataccaacatccgccatgctcaagccccttacattatgtgggggtgcacggtgggtccttcccatccgcaggttcggcatccgtggatggggagtggatacagagggcggactatacagcttgaaaggcttccctggaagcaatatgtagagtggattgtggaggagcaagaacagaagcggggaggcttgtccagagcatacaggggaaggatgtacggccaagggaggaatcccagacgaccgcgatacgtgacatatttatgtttgcacgaaaataaagtttggaagaaaagtgttgggggaacaagggattcattttcccggggtagttggaatgcaatgggacgcctcaggccgctgggacaggctggcctccgcgcgggggcgcccgagcagccgagccgccgggccttccggctgccccgccggaagtgctctcctgacccgccgctgtgcagcgcagcgcaccgcgggaagatggcgttggaggtcggcgatatggaagatgggcagctttccgactcggattccgacatgacggtcgcacccagcgacaggccgctgcaattgccagtgagtgtgaaaggagggtgggtgatcgtggctgggcgcgcggagcctgggccccggggagcgcgcaggcagcggtgagggtgaggggtgggagctaggagcccgggccagagcgaggagcccaggctgtcgggtcagtggccgcagaaggggcgagcagacgtcccccaggcgggctcacggagcccgggctgcgggggccgaggggcgaggggcgacggcggcagcggcagcggctggccgtgcgaaccccgaactggctgctccctgcgaggcggggcgcgcgagccctggcgcctcctggaggccggcttgcggcggcctcttagacgtctcacctccgcctaccgctctttcttttctaaacttggggcttccccactccatcgccgctaggtaaccataaaggggcagattttgccaaatatgtagcatctagggacatcagcctgaaacagcctgtgatgctcattttctccctgagccgaagggagactgaggcccaggaatgaagtttatcgctcactcaaagatctggttttccatgtttccaccgaacctagctttgtcatgcggtaccatggcactaggcttttgcattagcctctctgattttgtttgttgttttgaggtggtctcacgctgttgcccaggctggagtgcagtggcgcgatctcggctcactgcaacctccgcctcccgggttcaagcgattctcctgcctcagcctcccgagtagctgggattacatgcgcccgctgccacgcccggttaatttttgtatttttggtagacgcggggtttcaccatgttgcccaggctggtctcgaactcctgacctcaagtgatcggcctgcctcggcctccaaaagtgctgagattacaggtgtgaaccacggcgc

SEQ ID NO: 44844 - DNA, 1222 bp, Homo sapiens
ctacactagcttcttttttaaacctttgaaccgtctctgttttagtacaggttgacaatccctaatctgaaaatccaaaatgctccaaaactttttgactttttgttttggtttggttttgggttttttttttttttttttgagacacagtctcgctctgctgcccaggctggagtgcagtggcacagtctcggctcactgcaacctctgtctcctgggttcaaatgatcctcctgcctcagcctccctagtagctgagactacaggtgtgtgccaccacagccggctactttttgtatttttaggagagacagggtttcaccatgttggccaggctggtctgcaactcctgacctcaagtgaaccacccacctccgcctcccaaagtgctgggattacaggcatgagtcaccatgcccagccttcatttaggaaatttttaactgtagagatgatacattaaggtagaataagcatgggccctaaacctaacactaggctgggtttaaatcagtttcaatcttgcaatgagtacttacttaatatcttgaactccatcttaataatgagcctaataatacttgtattttttgtaagaaatggagataatgattttaaagggacagtcatggaataaacctttaataacgtggtagttcttgtttactaactttgttcctttattacaggacattttctacattgaaaaccaaaaggaatatgaaaataaaaaagctgctaggaagaggagaacacaagtgttggggaaaaagatgaaacaagctattaaaagtctaaattttcaagaagatgatgatacatcacgagaaacttttgcaagtgacacgaatgaggccttggcctctcttgatgagtcacaggaaggacatgcagaagccaagttggaggcagaggaagccattgaagttgatcattctcatgatttggacatcttttaagtacattttcaacagtttgaggactaagcctttctaaaataacattgtaataaaccatttttactgagattgcaacgttttgcactgataaacatgagaatctggaggaaagacaattgttttcttgtttaaaatatgtgtggaaaggaatgcaattgatagaacatttaaagatatatctgacaaaatacttaagagtatatagcacaggatttaatttctcaatctgttgcatgtgctaattatgagtattactagttgat

SEQ ID NO: 44845 - DNA, 1908 bp, Homo sapiens
atatttccttctttcctgttcctcaccctgatcacacttggtttattgatggcaattccaccaggcctaattgccacacaccagcaaaggcaggctatgctatagtatcttccacatctatcgttgaggctaccgctctgccccactccactacctctcagcaagccaaactcattgccttaactcgagccctcacccttgcaaaaggactgtgtgtcaatatttacactgactctcttttcggactctgcccacttacacccaagtgaaataaacagacttgttgctcacacaaagcctgttggtggactctcttcacacagactcgcataacatagaaaacataagtacggaccaaagaattagaagaaatactagactaattctctcttcttatttggcacgtactgaaacctaagtaaaggtatatgagaagagataaacagtgagctataatttacataactgtgccattctgtaacccaattcagtccaagacttgagaaataactgggagtacctcacagaggagttattttatacatttaaggaacaaaaagctggtagtcctgaatttctaaaagctatttaggataagtagatttttacttcttataatcccctaatactaccttaccactaaaatagaccagagccaattaagccacttctctttaagaggaagcagtatcggcactctgtgtctattaagaatctttccagggccaggcacggtggctcacaccagtaatcccagcactttaggaggctgaggaggacggatcacctgaggtcaggagtttgagaacagcctgaccaacatagagaaaccctgtctactaaaaatacaaaattagccaggcatggtgacacacatctgtaatcgcagctactcgggaggctgaggcaggagaattgattgaacccgggaggtggaggttgcagtgagcagagattgcaccattgcactctaacctgggcaatgaggaaaattctgtctcaaaaaaaaaagaatatttccattattttcccttccactgaaagggctaaaggtaaatttagctggtaatagaataatttccagcaaggtcttcgagtaaaattttgaggtatttcttatgtttataccactcaactagaattcaaaatccaaggtaattactgagaccagatttcctaggaatgaggaatgggaatgttgcagggcatcctaaaggggctacaccctctatgaacagataccttgcactccaggagctcattagagtaaaatttttgtacatttccagaattaaatgggaaaaaaaagaaggtgaacacaagagttgaactgaacaatgcacagtgctttgttctggccccacgaaaacatctgaatatatcatttgcatctaatcgtgctgtgaaagttatcaggaagaaaaatggagtacctaatgttaaaaataaaaccctgataaatagagccagggatggctgtgaagagaggattttcatgtttatatgcctgataacaaaaactatcacaaaaggctctgcaaaaaccaacctccattgcaaacttacacaaaaaaaaacttctgcaaggacatctgcctagtaactccttgtccaatttcagactgatgtcacccttgttattgatctctgtagccaagaataattatttcaaaacagttatgcaatcctcttcattaaaaacaaaacaaaacaaaaaaacctttgtcttgctttacttctctgaatacatacatactatggcatgtgtattctcattgcagtgctctagtcccaagtaaatatcattttcttttggagcgcctctctctatgtgttatttaaattgacatggtgtcagaaatgggacctgaaaaagatcactattggaagacgatggcaattcttgga

SEQ ID NO: 44846 - DNA, 2136 bp, Homo sapiens
aggaacttttcaaagggatgaatgtgctttctaatagaagtagctgccagtgacatcttgggagcctctttttaaaagcaaaaaattatttcatcttaaattttcacaagttcagatttttatgtacctgattttaacggagtatgaaacagcttgctctcgtagttactcaccgtcatatgttaatcgtatcatttctgagctgttttttgattttacaaacccttaaattaagaaacggattaggaaccgcccattaacactgttggcaaatgatttaaaatcagggttgctggtttttctgtgataatctatcggcttcaagacgcacagatctcactttcatggaaagaagttgcctgatacagttttccaccggagagaaaaataaaggctggtacttggaacctgcaagccgtgcatttggaacctcggactcaagtgcctattacgtaattccacagcgtcccggcctccaggccgtttcccgagccctccagcggagcgggggataaggttaccacgcccgcggtggccggggacactctgagtttcgcgtgtggcttttagggacgtttatatttgaatttccctgaaccgccgagtgtgggcggtggcgcagatccgtcccggaaacctccgggctccttcccgcctttctcaggcccggcccctccaaggggtccccgcggggcggcgggagggccctgggcccagagccgcgcgggtgggcagtcccaggcgtccttccttacagccctgagcctggtccgggaaccgcccagccgggagggccgagctgacggttgcccaagggccagattttaaatttacaggcccggcccccgaaccgccgaagcgcgctgcctgctccccattggcccatggtagtcacgtggaggcgccggggcgtgccggccatgttggggagtgcggcgccgcggcccgcgccacctccgccccccgcggcttgcctccagcccgcccctcccggccctcctccccccgcccgccgctccgtgcagcctgagaggaaacaaagtgctgcgagcaggagacggcggcggcgcgaaccctgctgggcctccagtcaccctcgtcttgcattttcccgcgtgcgtgtgtgagtgggtgtgtgtgttttcttacaaagggtatttcgcgatcgatcgattgattcgtagttcccccccgcgcgcctttgccctttgtgctgtaatcgagctcccgccatcccaggtgcttctccgttcctctaaacgccagcgtctggacgtgagcgcaggtcgccggtttgtgccttcggtccccgcttcgccccctgccgtcccctccttatcacggtcccgctcgcggcctcgccgccccgctgtctccgccgcccgccatggcgactgcgacccccgtgccgccgcggatgggcagccgcgctggcggccccaccacgccgctgagccccacgcgcctgtcgcggctccaggagaaggaggagctgcgcgagctcaatgaccggctggcggtgtacatcgacaaggtgcgcagcctggagacggagaacagcgcgctgcagctgcaggtgacggagcgcgaggaggtgcgcggccgtgagctcaccggcctcaaggcgctctacgagaccgagctggccgacgcgcgacgcgcgctcgacgacacggcccgcgagcgcgccaagctgcagatcgagctgggcaagtgcaaggcggaacacgaccagctgctcctcaagtgagtgctagctggcggccgcgttagcgccaaggaggggcgggggcgcaaccgcggcgaccagctcaccgggttctgccgtggggagggagcagaggccaggatgcacgcgtccttctgaaggaacagggtctcggtctccggaaaggagaaagaatctagagttcatagcggagcaggggtcgcggagggggctcgagctgtagcgctggggggccgtgatgcccatttctagattttggatacccgctgggacgtggtaagtgcgcgcctgggactgccgagaaggagctcccgctttcgcactcgaatccggggagccggcgcggagaggcggcccctcaggccccaggtgcggggagctggagcgcgagcgcgcgctcgcgtgcg

SEQ ID NO: 44847 - DNA, 1436 bp, Homo sapiens
tccagacgcggacgccgggtcttaccgtaccgcacagcgcgggtaatttttcaggaaccgcggtccgcacgccgcgggcgcggaggccgccccagcgctccatgtcgttgccgcagaggggcaggggacgcgtcccggccccacctacccatgtcaattacgccaagttggtgcggactggaaccgcgtcccgggcggagttgggatgctttgacaagaagaagttcgggagtggggatattggcacggagtaaatcccgcccagccctgacctccccacagcggtcacgctcggacgaacggaccgccgagcgccaggacgcgtcccgtcccctctcgccgccgccgaaccgcgccgagaggagccgctagcccggcgcgcggccactcaccgtcctcgccgagtcccgatagcaaaccgacgtccctgctgcggttctaagtgccaagttgcccccagtcggtggctgctcacggcccagtggaccagggcacattggttccggcgggcacctcagggggagtgcggcaagcctggcggccgccgcggccacacagtcgcccacagcgcgctgacaattcacggacctgctcaacgagtgaggcggaaagcagggctaagccgaccaggctctggaggggaggcggggctgccgctaggggcggagccagccccggggcgtcatcagcccatgactggcggagccgacagccagtcgtggtggcgctgggaccgccccgtaaccgccgtccagtcgcctgcggccgagggcaggctggcgggacgcgccggcggcggggaagttggttattgcgaagtgccgtggctgccggcgggcgctgcgggactctctgcaatgggacccgagcagctctagagggaggcggcggccccagaaggccgttggctgagagagaccaggagccctcggagccgccgcgcgcatagcgctgtggagcaagaagccaaccgcagcgcgggtcgacacgccagtatctggcaccggcaggaggcgcggaacttagctgccccatcggaaccccgcccggaggaagctgagggccgagaaaggatgaattccggaccgggtcgcccagccacaagtggaaacctgggctctctggaaaacgttctgatctcgatctggctatctctgaaacaaaactccagccccgcaaacctcccaaagttcagtacacgtccccgtcctcacccctgccctccgggccacctgcagcgggggacttaccggcgcctcgggtctcctcctcccgacccagcgcgtcgcggacacagctggcggccaacaggaggcttgggcgctcgacggcgccggaacctgtgagaccgtcgctctgggcgggctgccgtgcggggtggcatcctctgcggtgacttctgctgtcttttgggtccgccaggattccaaaatccc

SEQ ID NO: 44848 - DNA, 1462 bp, Homo sapiens
tggattttttttttaagggcactaaaatataaagtaccacatatacactatttattaataaacaagaataaagatcacccaagcaaaacattccctgtgaaagacagccttagaaacagtcacaagcctaactcacaatgacattttagtggggacttttctacccttggacttattaaaaaactgtatgagctgctatttgtcagaagtgaatatctgttgagaatgtacagtttctgatttattctctcattgttcagtacccagagggctgcttttgcccaataaggctgagaggagatccagacagctcatccagagagccccggcactcacaatgttccctgctgcacctttcaaccttttcaccccaattaaaggtcaacatggctgctcaaaaatatttatttaaaaaggcagtcagctcagcgggctcccaagtgtgattacactaccacttcatagaattcaattaaacccgggacggggcatcggcgaatcactggaggagtatgaagttgagatgttttctgctttctcgagatgttttctgctttctcttaaaaaaaaaaaaagcttccttttcccgcccgtcatttatttacttcccagagcgctatcacagacacacacacacgcgtttataatctcccccaagtagttcatggatttatggctcccggtttaattaaattccgtataacgactatccaaatgggcagcacgcggcacagcgaacccccgccagcctgcgcgtcagctcagaggcggagacccgcgagcgctcaccctcggcgcgggactaagggaacccacctgagcctcacgccgccaacgcctctgcttccgccctgcgccgggcacttccgcccgcacccaccaggcgccggccccaggccccgcacttccgccccacgccggcagcactgccgctgggcgttctatctcaggtggtgtcccgtctacgctctcaagggtggccgcgcctgaacctttactcgtgaagagtgacacacaaaccaaggccaaactaaaaaacaaaatacggaaaagtgaccccgcatgtttgggaaccatttaataagaggcctcaggtgcgggagccaactttttgaggctgcggagtccgagccattttaaccgctctgcatgcatccattctttcgttaatttaatatttactgcctcctccactaggtcttggctgaactaggttatggggaatgcgatgagcaaaactggcagccgtaccctcccgcaaactgaaaatcgtgtgagaaagcagatattaggaaattatcccttattaaataggccatgggtttattcagctaagtgctttgcagggaaggaatatgagaaaagacctgagtgggatctcgttgaagaggtagctttggggctgggatctgaagggcgtgggttggggacagagctctgcaggctgggggaagggtctggt

SEQ ID NO: 44849 - DNA, 1806 bp, Homo sapiens
cagactcaaatcaagacttctgatttgaagttccttattttcctctatcgcactccattaatttatttaatgtacattattgaacaccaactatttcaggtactgtgttaggtgcagcatataataagaaagttgataatctgtctattttacaattaaaaaaagaatgtgcaatacatgcacttggggaaaaattcagtacagtaactgctactcttctcccctctccctcttctcctaatccctctctcctgatataatcactgttatctggaaatctttgactatacaggctaagtcccctgtatctgccgcgaggtccttcctggaggtgctgactggactagctgatgttggctagatgaccgccaaccagatgaccttggctaactgatcttatcccttgggccgctgtggcacaggatgagtgagctacgcctggtaacaagagtgccactctcgtgtaagggggctgcgaagtagaaaggaggccagccctttggaagatgtttctagagggtgtgggcagaaccaagtctcggtagttaggaagatcttggctccaaagtttaacttgcagcgtcccggccgggttcacagcgcatgggacagggggggcggggcgatgcggaggcggagcggggcgatgcgatgcggggcggagcggggcggggcggcgacgcgcggcgcggtgcggcgcgcggccgacgtggcagccgcaggagcatgcgccgcccgtggccatcttgtaggcggggacacgccgaggtaacttccagggtgcgccttcgttgtcttctccaagctgtagttctacgtcccgacctccctatcataccacactcttcagcgaccacgcaggcactttcccggtccccaggtgagcgccaggtggctccgaggggcgtgtatgaggggggtggcatggcatggcatggcttgcaggcgccagagccagaccccgagggacggtgtccctggaaggtgggcgggccggccggcgccactggacgccgatgtcgtttgcgagccccctagtcccgtggtccaggctcagctgtggcggcgtgcggggtgcagcaggcaggagtgcacatcgcaaggtgagcagtttccgctggggatggcacggtgggcgcggttcgagggtctcgccccgcgacactttgctcctgtccaaggaccaaggcaggagcgctctggccccaccttccagggcgctgactttaggggagactggcgggagcgccggcggaccttagcccggccctgtctggcctggagacgtggcagagcctgaggggaagccgctgtctcctgaaacaggatttcggccgctctggccctggagaggcccaggaggctcgagagtcatcacaccaggacctgcaatgaaaggaagcttattttccctgaggttaccccatcggtgcttagcgccgcttgggagagtttttgcattctctcgtttctttgtttggtcttgggacctgcttcaggcaaatttgcagatagcacgtttcctagattgacagaatttatagccaatagtgtttttgtcattcgaagtagttattttgagagacaacatgtgcatttctgcgatcgtgacacatcttggcattcagtctttctcctgtgcagccagtgtttaattcagtgaaaatttataaaattttatttcggggtcagattaggctctaactagcgctcactgtttggtagtagagacaatcttgtggcacgagtaggtcagcaataattgctcttaatgctttaaagtttatcagagcttcactcttccat

SEQ ID NO: 44850 - DNA, 842 bp, Homo sapiens
attttcaaaaagaaaaatatttgtactacaatacaaaaaaaataagtgaatcatttatttcagagaatagccatttgcaaacgttcactgtaaaaatctagaggatagaaaacctaaaaagttttgtttaggtttgtcaatttaagtgggagggatatatttctaaagaatatgtcctaaagctgtgccaagtatgtgcaagtccaagtatggcaagagatgaccctggactctgtggtggttgcagacaaataatacataactttcaaaaccagccccatagtgagtcagagtagtgggcatttgtacagaggaggaagctgacattgtcttttaatccaaacagcaatcctgggtggctctggtggaatgaggtatttaatcacctcaccggtgatccttgttgggtctttcttgttgagtaaatacttggcagccttagtcattagcttgaaaggcagagggaaaagtaaaccttcatgagtgagtacccagctgaggtgtttgtttaggctaatcccaaatgccctttagggcctaactcagtgctgcccctcccctacttcactgtgaagctgcagctgtggagccaacattttatcttatttattctctatgtgcaggttcccaaacataattattggatgaatgaatgaacaagaagatgactatggaggatacttgggatctggctagcaacaagtatatttcccattgttagaggtagttgggtcagaaattagatcagtgcttctcagcatttctctgttcaatgcatactttttggtggcacccataaagaaatcaaaaggggaatatccctttttagcaagaagtattta

SEQ ID NO: 44851 - DNA, 733 bp, Homo sapiens
aacaagtagctacgacaaccctaggaggacctaaatctggtcctaccttggttggtgatttcacaaaggttatgacaatgagcaggtagccccttcctcttctgggtagagcgaggtcacagtgcaggcataccacctgaatcatctgtgtgccgaggtcaccaaggacacaggcattggggttagatagctgtttaggtcccagttggctatgtgacctttgggttgtttgtgcatttattcattcatgcatgcatgcatacgtcagtctacaagtatttattgagcgcctattatgtgccaaccattctagattttgagaaaacagcagtaaacaaaacaaattaggccatcacagagtctacatagtcagggaatgtaaaacattatgcctctactttcttcttgtgtgaagtggaagtaatagaactgccctcatgaggttgtgctaaagattaactaagttaatctgggattttttttttaactttaaaatgaaaacctttctctctagtacaaattgagctaaaatcaatataggtgataacagcgggactttttgtgtatagaaatggggtgagaaggaacaattgtcccccaaagtgccaggggtaatttcctgtcacatttagttgagaggagaagtctctaatgtgagctgctaggctaccattcatttaagtgctaatggaaatgtcaggctgaattgagggtctcattttcctgcaaattt

SEQ ID NO: 44852 - DNA, 2678 bp, Homo sapiens
gtgatggcgggcgcctgtagtcccaactactcaggaggctgaggcaggaggagaatggcgtgaacccaggaggcggagtttgcagtgagccaagatcgcacccctgcactacagcttgggcgacagagcgagactccgtctcaaaaaaaaaaaaaaaaagtacataaataaaaaccaagtaattggaggacgccattcattgattttacttaggactttgggcataatctataggtttaaaaatttctgctgctaagaaagtgggaacacagttatattcccttacattttaccgaagagaaactagacctgcagaggagtacctttctgtttctatataagcagaggaattctgcacaacccaaatcacgcagaaacctcctggtaaggactccacgggtagttattgccggcattgtattctgagagatgagctgcatatcacttttggaaatgccttaaattaaaactcgtcttgaaacaacatgacgtctcaaagaagctcccttctcaccttggaacatcagcttttaaaataaaggtgtcatcagaagtgtgtagacacccactgcatcacaactggaactgatctctggttatgccaatctaggtctgcctggcagggtgagtctaccgctcgaaagctgcacagaggaaatcctccctcctccaggttcaggcccggagttacgagcggagattcgcggcggcgggtcagagcccagagcaaaccaggctggggaacgcacctcgcccgcggctccggaagcggctgcggccccgaccggaaagcccccagcatcgcccgaaggaatcgcggctggcctgcggctccggcccggcctcgggtaccacgcgcctagtgggaagccgcactgacgcctgcagcatctcgcgagatttcgggctcagcccaagtactgcgagttcaccaaagcggggggaaaaaaaaaaagccagcgtgcgagagcctctgaagccgtggctggggcgctggggtggcagctgccgcgggagcatcagctaccggcgtgaggcgaggcagggcacgcgcgccgtccgcagccccgttgcctgggctgcaggtccactgacgcgcggcccctgggtggagagaggggaggtggcctgggagcccgctccttttcgccgcagagcgcggcgggggagggaggtgaaggcgtgggaggaaggcggcggaagaggaggtagccgcgcggagatcctcccggcgacatcactgaggcggagcgtagccgcgcctgctccccgatcgcgccgttcgtgctgcccgcactgcccgaggccctttgcggactggctggccgcgctcttcgcacggggcgcttttgcgtggggtcgcgcaggagccgcggagggccggatcgctgagggagcgtcagccgcgcgccgctgcgggaccgcgggtgggcgggctgaggggcggaggagcctccggccccgcctcccgcgtgctgctgccggagccgccgccgccgcagccccgccgaggctttaaacagcggggcccgccccgcgcccgccacactcgcgcgctcgctcggctgccggtggcctctgtggccgtccaggctagcggcggcccgcaggcggcggggagaaagactctctcacctggtcttgcggctgtggccaccgccggccaggggtgtggagggcgtgctgccggagacgtccgccgggctctgcagttccgccgggggtcgggcagctatggagccgcggcccacggcgccctcctccggcgccccgggactggccggggtcggggagacgccgtcagccgctgcgctggccgcagccagggtggaactgcccggcacggctgtgccctcggtgccggaggatgctgcgcccgcgagccgggacggcggcggggtccgcgatgagggccccgcggcggccggggacgggctgggcagacccttggggcccaccccgagccagagccgtttccaggtggacctggtttccgagaacgccgggcgggccgctgctgcggcggcggcggcggcggcggcagcggcggcggctggtgctggggcgggggccaagcagacccccgcggacggggaagccagcggcgagagcgagccggctaaaggcagcgaggaagccaagggccgcttccgcgtgaacttcgtggacccagctgcctcctcgtcggctgaagacagcctgtcagatgctgccggggtcggagtcgacgggcccaacgtgagcttccagaacggcggggacacggtgctgagcgagggcagcagcctgcactccggcggcggcggcggcagtgggcaccaccagcactactattatgatacccacaccaacacctactacctgcgcaccttcggccacaacaccatggacgctgtgcccaggatcgatcactaccggcacacagccgcgcagctgggcgagaagctgctccggcctagcctggcggagctccacgacgagctggaaaaggtgagctcgcccagccctcccttcttccccagcccctggtgcatgccgaccgcgggatgtggctgcagactcttcccgagttgaggtggcgggagtagtagacgtgcacgacttgctggcatctctggattcagctgtcaagggtggaattgccgaggaatgttaacttaatctctcaaaagtttgta

SEQ ID NO: 44853 - DNA, 649 bp, Homo sapiens
caccaagtagaattacccacgggaaactgggtaatgccctggtccccagtaaaggctttagtcccacaggttctctctctcttgctccccactccttggttgagtgcatgtgtcctggacagctcttctcatcccactggccctgtgaggcaaggcgtgctgccctcttctctctgggtctgtaggtaatgcactgcttttgttatttaatgtgtttgttgcactgcctcctctgtgtctcaccccacggacacagtcgaacctaactcttctccccgtcagagctctcctacagagtggctatcttggtaagaatgcactggacacaggtcagacaagagccacaagggtgtctgccaatataaacaagtttcctgtgagagggacacctggtcatgagtcagacacttaggcatgaggccattgaccagggtaaagtagtatcccatgaaaggcacactgtaaatactcatgaccgcctttcctgtagccccatcagggcaggactagaatttataacccctctccagggagagccctccagaccagattagaggaaagtacagcactcttcaagaagcagctcagaaagacctcctccaggaagttttctctgatgccacaggtctggattagggtccctctctgc

SEQ ID NO: 44854 - DNA, 1743 bp, Homo sapiens
gactggccctctaaggattaaattctgctgctcttcttagggtatctatcggactgtccctttggttgtaagataccactgccatctcgaggaggactgcatgcttctgcacagagccaacaggtaactcgtcctggcggctctgtgtacccaaccacaaccctagactgccaagaacactgctcattcgaaggcgagcgaagccgcgaagagggccagcgttaggggaagggtggtacaaacccttgtgtgagctgcagcaccggggcaagaacaacgggcagcccaggcgggtcttgggtctgcgagaccactaggcgttctgccggcagtcagaaccgcggcagaaagggcgcgagcggggaactgcgggaacgcagcggcccgggaagctggagggggcggacccggccggcgagcgcaggcgctccctggctcacgcgcgcaccccggccccaccacccacccttacgccgcggcccgccctccggggcgggtaagagagcgcgcgagcagcggtcgtcaggacacgccccttcgcctccgcgagctggcgggcgggctggcatcgccgggaggcggggccgcggcagccggctgggtgcgactgggcggcctcggagctcgcagacgctcgggggaacatggcggctgcggagccggcggtccttgcgctccccaacagcggcgccgggggcgcgggggcgccgtcgggcacagtcccggtgctcttctgtttctcagtcttcgcgcgaccctcgtcggtgccacacggggcgggctacgagctgctcatccagaagttcctcagcctgtacggcgaccagatcgacatgcaccgcaaattcgtggtgcagctgttcgccgaggagtggggccagtacgtggacttgcccaagggcttcgcggtgagcgagcgctgcaaggtgcgcctcgtgccgttgcagatccaggtgggtcctgcgggaggccgcgcgcttccctgttcccgagtcgtccccgtccccgtccctgtccccgccttcgccgcgctcctcaggtgccccgagccgcccgggacccgggccctgcgcgagtggctgagtccgaagggctgcgcgtctttcgcaagttccggggccggctggggaatgcccctgtccaaaggtgatggtcaccagctgtccccggcgggggcgtgggcctcgtagctggtttcagcgcccgcgaacgcccccacgtgtgtggtcctcggtcgcccgcatccgctttttatgccaggatcaggtcccagcctcctgcgtaaccaaagggctgtgctgtagtagctgtttttattttggggtgatgggtgatgcagaatggggggaaatgagattgtggggagtattggtcttagggtttgttcctagagttgtgttaaccacttgcggaaacgcaaactttgggagtcaaacccattcccccccgccttcccaggctctcaggtccttgggcttaagagttccctaaccttaagcaaataaccatttgcttagcctcctcttagtaaagtgtctactgacttgattacgttttgtcgtctgcattgaaaaagtcatttgactccatgattgtaattccttcttgaatacaaatacccaacttaagctagaccttgagttcctgggcctgctggctgggaaagttgttctacctgaggactacttaacagcatttattttaagctgtgctctcatgctaggcgggttaatcttccgccct

SEQ ID NO: 44855 - DNA, 571 bp, Homo sapiens
ggaaacatttaactatggaaatttacataaatgttgtatcatgctaccaccagtgcattttccagcctgtggccaggaaagacagagcctgcagagaagagaggaggaaatggacagtgtaagaaggatgccagtgaggggattttacttctgtacatagcagggaaggctttggcagctttctgtggccagaagataagggcgttccagggaaggttattttgaccttttcccaagatggttaactggcagggcattttgctccagctttcattttcttggaagtttattactattattattattttaaacaggggcatgaacattttatagctagaagagactgacaggttcatggtgggaagggagggaaggcaggaggaaaggaaccttgttcgcctttggcttgatagtttgaaggtagtggtttttgattacaaaacctttgcctcaggagcgtggcaggaagagggggtagatgagctaatgctcagagaggagacagctggatcctgaggtggttgtattgtctctaccccattggtttgatgtgtgtcacttaaaaaaaaat

SEQ ID NO: 44856 - DNA, 770 bp, Homo sapiens
tacatttgtcacaaccaaagaaccaacattggtacgttactattaactaaaccacactttattcatatttcactagcttttccctaatgtcctttttctgttccaaaatccaaactaggataccaattacattttgttgtcttgtctcctttggctcctctagtctatagcagtttctcaactttgtttttaatgaccttgacagttttgaggagcactggtcagatattttggtagaatgtccctcaattttgattcatttgatgtttttctcattgttggatcggggttgtgaaatttcaagaggaaggtcacaagggtcattctcattacatcatatcaaaggtacatgttattaacatgatgtcattaatgacattaatcttgatcacctggctgagacacagtcgtcaggtctctccattgtaaagttactcttccccctctatactctcctcataagaagcagagtactaagtgcagccacattcaagaggatgttgggagttaaacaccttacatagatactctccacatcatattcaacagcatgtggagaatgtctatgaaaggtagggtattttttattcagtaaattgtaacctgtactctgctttaaaaacatgccttgccactgtattctctatggtttctttgtttactgagtttgtggatggtaagttcctatactagagagatttcccagggcagtgaggattttagggctgtatttttgacctcctcaatgtgtgtctaatatgacacatctg

SEQ ID NO: 44857 - DNA, 1367 bp, Homo sapiens
attttggctaactggaatgtagaaatatttaattccaggtgcatagggatttatttatattaaaattgtccaacagcacaagatgctgtgtcaccgatagcctgtagaggcagaagttttaaaggactttagtacacaaaaaaacataatgcaggcaaactttagctaccaagagttctctagaatgagtatatggattcatttgtttatcctttcagtactgcattattgattacctacataagggaagccctctgctggagacagtctggataagagagagctactgtttctgaaggaactaagtctaatgagagagataaaataaaggccacctagggtggttagtgcaaagatgaggaactggacacaattacggaaagtcagatgacaaattcttctcagatagattagggcttttcagaccagagccttttcactttagcttttttttttttttctttcggttttggttttggttcatcagttgaatgtgtaaagtatttcctggccttttctttaacaggataggaaatcttccttcaagttgatcatctcttgaaggagcttacagtctaattatctaaaaacaactgttctacatacacggtttatgcagctcctatgcacaggtgaagagcatacaagatgggtaataaaagcagcttggcattgatcaaacactttactatgagccaggcactttgactagtgcttgacttatgttatctaatttaattctcagaactttttcagatagttcagaacacagaagttaagtatctagagtacccggctaggagttgccatatgtgaactgttttatgggctctgctactagctgtgtggccttaagaacgactgagtatcagccatgaagaaggatggcttgttaatacatgtcccagggcaatgtctaaaatttctgttgaagggtaatgatttatgtacagtcactcttgattaaagataactatgctggggagtttctagtcaggccaagtgacctggagtcaatgtgcagtaggcattgcttaacccagagctctcaaactcaattggccacggtgcaaggcagataatccaaacaaatgaaatgagacaggtggggcctggcacactggaaagtaagcatgtacatattaaacaggcaagttctactcagcgccacctggttgctgccaaaggaaaatgcagacccagtggttacagagactccaaatcttctaaagaaaatgacaatcctgacttttagatgttggtctgtaggccatgagaccagtctgaggtgcagctcatcaactgcaagtggtactcttctcattcttcctcattcatagtttaggaatctttgctccttccttcct

SEQ ID NO: 44858 - DNA, 575 bp, Homo sapiens
ccaagaaaaggtatcttttgtatttttgctttgtttttgtatattaggtgagtgtgtgggaggcctaaaagcaaatggtatattaaattttctttcaaaaaaaattccaactgtgcatactttttaaaagtgctcctcccagactcaacaggaggattaaagttttttttttaacataatccattaatggccgttccaattatattcatgctgctgtcacctagtggagagtttagtgagtggaaaacagaaaagggagcgtcctggatacgtttctccagagtgcactactgccatctggtggtgatatttactaggcctgccctcaactcatgaaaaagcattttaccaaagggatatgcctctgtaattacaatcagtgtgatggcatgactcacagctcctgcaaccactaattttgataccctctcatctttcaagaaaagaaatatgattggccttgagtcatactgacacttgaaggcagagctgtaaccctcagcatcaactcttgactctgaggcacatcttatgctaaagctaaaagctagaggaatgcctggaaattgccccat

SEQ ID NO: 44859 - DNA, 2099 bp, Homo sapiens
tgtgaaggactgaggagagctggtggacgatgcaggtaggagggaagttaggctgggaggagaggtgctgggatgggacgtttggtttcctgacaagtgaccgactagagagagaaggcgcggagtggcagcggtaagaacaacgtggaaaggacggaaaacgcgaagagtggcgccctggcggacctggggcggggcagagtggtaagggtcacgccaggacgtacccggctgtgggccgggggaggagagcacggtgggacagcaacgaacttgctgggggctcccggacccgagctccgccgatgaggtcagcggagcctaggcgccgggaggaggccagtagagcccccagacacgagtgtcgggaggccagcggaggggcgggacgggacgggaaatgggacgaagagcaagagctgggggaggagggaagagggggcgtcggcgctgcaagccggaggcggcccgacagggatcgtttccttccggagaggaggccggctctggactgaggcgcggacggggggcgtccaagggcgggtgacggggaaataccgcggcccgcgcttctctccggctggcagcggtgccgcctgcggctcctcctccgggccagctcggagcccggcggcggggggagcgggaggcgggagtgagggcgggggctcgggaaggagggaggagggagggcccaggcgcgccactgacagggtggcagcctaggagcggacgcgttgccgccgccgctgctcctcctcctcctcctgcagctcctccagctgccgctgctgccgccgctgccgccaccgccgccgccgggagaagtttcactcccgacccttgctcggagccccggcccagagctgagcgggagcccggcaggcagctgcagcccgcggcagtcgaggcgtccgcggcgcttcgacctccagccggtgtcggcgcctaggcggccggctgcggccgcggctgggggcgcaaaggcggaggaggggcgggtgtgagccggggaaaccgcgtgccgcgccgcgacagcccagcgagcgtccgcgcccgggacagccgcgatggctgtgcgctctcgccgcccgtggatgagcgtggcattagggctggtgctgggcttcaccgccgcgtcctggctcatcgcccccagggtggcggagctgagcgagaggaagagacgtggctccagcctctgctcctactacggtcgctctgctgctggcccccgcgccggcgctcagcagccgctcccccagccccagtcccgaccacggcaggagcagtcgccgccccccgcgcgccaggatctccaggggccaccgctgcccgaggcagcacccgggatcaccagttttcgaagcagcccctggcagcagccacctccgctgcagcagcggcggcgaggacgcgagcctgagggcgcgacggggcttcccggtgctccagcggccgagggggagcccgaggaggaggacgggggcgcggctgggcagcggagagacggccggccggggagtagccacaacggcagcggggacgggggcgctgccgccccgagcgcccgaccccgggacttcctgtacgtgggggtgatgaccgcgcagaagtacctgggcagccgcgcgctggccgcgcagcggacctgggcgcgtttcatcccgggccgcgtggagttcttttccagccagcagccccccaacgccggccagcccccgccacccctgcctgtcatcgcgctaccgggtgtggacgactcctatcctccccagaaaaagtccttcatgatgatcaagtacatgcacgaccactacctggacaagtatgagtggttcatgcgcgccgacgacgatgtctacatcaaaggtgacctccctgcgccggctttccagcctgccagtctccccgactcctttctctgtaaccggtcctagcccctgcccagcccctccgctgcttctctgccagcacgtgcttcgggctcccacaggccctggcccgccctccccaccccttgcatccgcccacaattcgtagcccgttcctcgtcttctgcaatctggaccctcctcacacctgcctggctttattcg

SEQ ID NO: 44860 - DNA, 1015 bp, Homo sapiens
ccctgctgatggtagtttccccaatcggtccagaggggcgtggtcttcaggaagggaagacggaggatgctagctacaactagtctggagatccagtgttctggctttggatcttgctcttttgtttaaactggatctagcgcacttttggaactgctcagattgaggaatcgtcttcgctgtcccggaccctttcctatgtgttcccttccctttggctcaactctccacatactgggagtccttggccatccccaccgtgccagcgcgctgctccttccagccgctacagttcagcaccaagccgtcccccatccccccgccacacctcaataaaaccctgagaggatgggcatgttgtaaggaattggtggtgggggaaaagaggaaagcacccgctaataagccagacccctgggaacagcagactgtactagcacacactagtattggttcctttccagtgcattttgttggccgcggtgataagcagaggctggaagtccttcccagaaccacaggcagccacagcaagaaaaaactttttttgtcagtttaaaagaggcgcggtctttttcccggaatgtgggcggctctggacagagaatttctaaactcagcggatcaaagttctttaggtcagagaagtgaatctttccagtccagccagttgctgagatggggagcaacgcaagggaagcagcagggttgtaccgaatgaggtttctctgtgttttccacatttccttgcttcccggtcaaaggggggcagcccttccttattttatgcctttctactcgtagcctcattgcttcctcctgattcggatagtacttttcacataatgcaagaaaaacgaacaaaaagccaaacaataaacccaaactgttgcattttggcacaaggaattagtgtaatcataataactagagatttcttggctttggattggaaggagggaagtcactctagagcaggttggaatagaaaatactgataattggatataaaaat

SEQ ID NO: 44861 - DNA, 2617 bp, Homo sapiens
aggctggtctcgaactcctgacctcaggtgatccacctgcctcggcctcccagagtgctgggattacaggcgtgagctactgcacccggactccatggaagtcttatgggaagaccaactttaaaagtataatcaccaaaggtcatacatgttacaaaggaaaaatatgaatgatcattacaggaaaagcctgatttagattaagtgtttaagaacaactctgaggcagtgacatttaaactgggagccaatgaatgcataaaaattggccatgctaatccttgcctgcctctccagatctcctgcaggtcttcacatggaactggccttctgagctctctgccctcagagctttttcaatgatcctctccccctccaaaccccaacttccgtctaatttaaactgctagtcattccgccattccattcccagcacatacatgatttctgggagaaaaaagaaaaaacagaaaaaaacctctgattgccctccccgtcccattactcccaggtcagagtcctagttgtgcaatttcctggttttttttttttctttatgatagcaatcagttttgtaactacatatttgtctgatacttgattaatatctattctcactttactcaactatttaagaaatatacctatccttttgtgtaaagctgaagagtatatatatgatattctttagcatttagactaattatttaaaacagtgtctgtaaatacacatatgacatgaatattttcgaatctcttgctcactgctgaagtgaaagctgttttaataaaacccatccacacttatttgtctcaggagtaattctactgggtactccctacaaaatgctgattcatttagaatgcttcctgccgttctacagttggacttcggtggttcaaatgtaaatttttcaagaaccatttctcaaaggcaactgcgaactttaaaaagaaatattttttctaaaaccaaagaatttcccctgagtagagacaaagtatttttttttttaatttacctagaggaacctaattaaatttttgataacgttttgaatctaaccgacattagtagaataaatgtttttcttagattttatatttcctaaatttaacaaaactgtttacaaaatttgttctatctaaatcagccaatctgcccagctttatctgagatccaatcccaaaaatacaactggccactaaataatttacacaagatatctcaaagtcacatcaactgggatttcacctacaagaagtcaacaaaaactacagtcttagtctcttggcataaaattacttcctgttgaatacaaaaagaatcattcagctgtttgtaagtccaaaatgttcagcgggagaggtcaacggaaagcaaatcccagacgcgggcccacttcttatctcaggagatcgcctcgctagcccagggtaggccttggggtggagatagggataggggtaggggtgagggtggcaagccgcaccccgcggaggaagccggcaggcccagacggcccgcgcacctcccagcgcccctggggccctcgagcacaatgccttgctgagcagcgcccaggaacgccgggccctggcaggccggctgtgcgcgggagatcgcggagattgggcctgagtcagggcgcgatcgggtttctctctgtcaggcagagcgctggcgagatttcgagattcctgatacaggcaaggtccgaggcagccggggaaccggcgggcttccacgcgggggccccagtgcgccccgacacgcgcccaggccccgcggtgcggcactcagggcgcccggcggcctggcccgcgcccggggcagataacgagtaaccggagcgccggcacgcgccggcaggccgcctcggagtgcccgggccctgtccgctggctgggggcccgctggaccagggcagccaggtcccctcccgtcgccgctacactcgcgacccctcctctccctccgcgagaaacccgaggatccgcggacgatacccacctcagcaggcgagagaggtggtgcccagtacctacccggtcatcctcaaaaatgattttggctggtatttccttgcggatgatcttcccaaagatcgtgtcgccaccaggccgagcgacctgagccttggcaatctcatctgccatctcggcctctctcccgcgcggcggccagaggagaggctcggaagaagggaggaacccgcagagcgtgcggcgcgagagggcgcagccaagcctgcgcaggtgccccggctctggcgccccacctaatcttgcgcgtgcgcactggcgacctgggctgcgagtgcggccagcgcgctagagcgcctcagggacctccggcttggggaagttcctggtcttgagctccaaggagattcctaagtcgtttttctatcctcctttcttgtctcctggggaatgcagttactggtataaacccttcgtctgcctatggatgcttgtagggaaagttggatactgtaactgacaagatttgataatttaagtggtgctggctgcaacttagcacttagattatttaaggtcttgctgctgcagcagattttaagtcctctcttcaacagagtttttttctctc

SEQ ID NO: 44862 - DNA, 1657 bp, Homo sapiens
ttgcaataattccttagaataacatagatcacagagaaagaaaagggccttggaaatccattggtccagatctttcatttttaataagaagtcaattttacctaaaagttaacctgaaaggctacacgggtagggaaggagaacaattatgcaataggaacaataggaaaaggttgtggcgcgttagtaacgtgactacagagttttttcttgatgcttgcaaggtcataagttgaaacgcacttaaatacttatgattgtttctaattatgatgctgctgattaattacccatttctgacctctttatcagcaaaaccaaggagtagagagagctgaataggcaaaatgtaaagggtaaaactaggctttacggtcaggcatagcggatttgcatcccagatctccatttactaaatgtgcgaacttcagcgagtaatttaacctcaccttctatggaaataaatgagagaatatacgcataaaatttttaggagtcagtgttccaatcaatgcccgctgcagctgttaggacttggcttttatttatgcacatttccaaagagatagtcgcaactgggaaacgttaaaataaaggttcttttacagacgatcctataccctaaacaggaggtaacaaaacgcgggtgccgacgccatccactatatacaaacctagtccgcctagcagacgatccctgcgccggaagtgactgtgcccctaactaacatggcgtccaggtgatttccgttctcttctggccagtaattgggctctgcggctcctcgcgattttaccagttcccatccgtttagcaaacgcctttagcaaacgcccgtttagcaaacgcctcctccgtcctttggaggagggcggggctaaaagggagatgctgcctagtgattcgttgtggcgcattagtaacgcgactacagggggctggaaacagttcagtctttgattggttgctgagaggcggggctactcgactgctctggaggtagcggccgcggtgaggagagccatgggacgggcagtcaaggtgacagggcccgggaaggggtgggtacgatgccgtcggggagggtatgttcgcgtccttgagaaaactgtctggagtctctggaggctggggctcctgaccctttatggaggatgtggctgttaccccagagaagccagatgaccaactcctaggggcagttgagggtttgtgcacgtgcggaggagagcgggaggcaccagtgtggttcctacttcttggtactaacttggtactcagtgtttatccatgatacaaatctgcgacttgagttctgccctcgtttcatcttcagaccgagtatttgtctgagggacccatttcatatccctgggaagtataggagacgccaaaggctgacctgagcaacagcagttcaatgaggtgaaagtttattcagataaacagaaggtgcacagaagtctagcagccaaggaaaccgaaccccagcaaagttacttgtcaaaagtaacagcaagacagagcagggactggtgagacctgagctcactgaatgagcttgggatgtgatggctgtgctcggattatacctctctgagtacctacctggtctcagattcatttctcacgcccaagcatgatgcacgttcctgc

SEQ ID NO: 44863 - DNA, 2874 bp, Homo sapiens
tgtccagcccaagctggagtgcagtggcctgatgatggctcactgtaacgtaactcctggcctcagcctccagagtacctggaactataggtacacgccaacacaccagggtaattttttttttttttttttgtagagacagggtctcgctatgttgcccactctgttctattttgaaggtacaaccaacaagctttcttgacagattgaaagtgaaaatgagagtatgagaggagttatggatgatataaagtttttggcctgagtaactagaaatcctcgccatcaacctagaatggggaagaccatacattacttacaggttcgagagcttacttcagtggcattacgctatccttttgaacttacgataaagttttgtaggcattttggtggactgctggctgctagatagggcactcatgtttctgatttctgagatatgtaaaatacacacccaaaggaatcacagaagtctagtacatgtgtaattttcacgcatttcaaaccaggtggtttagccagccttaaaccagttaatgactgattgaacgattctgacttttacatgaaaaagcagtggtcagaggatgggctctcaaccgctactgagagacccctcatcccacaaccgctcagcacccacccacccaccctcgcctgtgcgcgtccaccgccccacaacgtgcgcagacgtcgctcctccgcacggatgtccgcggcccgggccggggtgggaaggggctcccccacgctcccgcccaggtttggtcgccatctttcggagcgtcctttcccgcgagtgctgcagtcccggatctcaggcgtccgttagctacagaggccaattcctaacccgcgcggctcgaatcccgggggtcccatcgcctgccggccgattcgcccatgccggaggtacggcgggggcggggcctggcggggggcggggccagcactgcggtcgctgcagctgcgcaacggcgcccgcccctccggccgctctaggggcgcgcgccgcctctcgctccgcccaacccgcgcgcgagcctgggcggggagggggagccaggaagctgcgagcgcgctggggagcgcagctgcaggcgttggggcggcaggagccgcggagccggcgctgagaggggctgcggccggagcgggcggctgagacaaaggcgacggtgagtgcaatgccagccccagtcgcgcgtcggccgccacgcctcgccctctcggtcccttgggcggggtcccgaagccccgaaccctcgtccctgagggctctggggtgagcgcggcccggccttgccagccgcgcgctgcgggctgtgggctgagcctgcgtcttccatttcaggtttgggcgaggtcctcatgccctaggaccctgcctttggtttttcttctgtttcctctgaggaatggttacacgctcagttcagaattcacggcaggcggacagctgaggcagccaactgaccgcctgatgtaaaatggaaaggcagaccccccccctccccccaacttttcacgtctggaagtcgggagggtggtgcgaggggcgggcggggagggcccggggtctctaggtgagggtttcggggagcaaagacacctggctccggagctccgactcttcgcctgaggcgcccgacgcgttcagtccgcgggtcctgccgcggttcgccccgggccccgggcttgaaagcccttggctacctcgtcgcgggagctgagctactcttacaggttgttttacccagtgcttgcagctttaagttgcgattttaggcaacgggtgtggtaggtagcggctccttgatgccgcattaacagctgaaaaagcgccccgatccgctgacttcactatgtgtaagaaacaacattggggattcctctttagcttgcaattattttaaatgataagcttttttaggggaattttggggggtgatgtgcagtttacaaaatctaaatgtttcgttgaagggcctggcttatagtacgtgctcagtaaagtatttgttgaatgaatgaatcttgaaatatcagacaaagcttatctcacatctagtaaaatttaggcacatactccttgattatgattaaggaaagaatgtcggcaaacagtatgtatttttgatatacgttttttagtttttgtcccacataacatactgttgatgaacagtccgttcttactctcaatattatgaacatagaaaatatatatcaaatttggattttctcttttggtttgagagaagttggtatacattttctgtttcttaaaaacaggccttatttctaatctttaaaaataatggagaagataaagagggagtgggattgtattttgaaacccagctttctgtttcattatgaataaaggagtttatgtgtttttgagaagggactgtggtatggtcttgctgctttttgagcaagggagaactctaaatttagggggggaaaagctaatgttgcactaatataataaaatgtcaccatttactcaacagatattcattaagcacctgtttatgggcacaggcaaaatccgcaattatccttttcttaaacttgaatgcaaagttatttccttattattgatgtcgcaagtggtgactgtcttaaacccctagtggctatttcagttgggaaagatggcaggtgaactgcaggaagtgtaaattcataacagcctttaaaggttaataagtaactttgtacagctaaaattattgggttaagcttttatattgtcagtttaatagaatctgtctacattttaaaatgaagggaggaagacatttaataagctagtgtttttattatctccctggtccctattaggagactttggtacagtgt

SEQ ID NO: 44864 - DNA, 1303 bp, Homo sapiens
aaacatttctcatgtggtaaagaagagtaaagagcaatgtagttgatgtggccttttctactgagaaatgatgcatttgtggtctacagaagagacttgacagcccctaaagaagtgttttttatctacattacatgtttgtgagtggatatgcaagtgcctctgttggaaggtaaagtgaatcttgaaacaaattctagaaaagtgtttagaattattccatacattttgctgttgaaaaaatagtatttaaagaaagtttcatctcacagtgaatttttagcctcctcttttaagatttattttgtgaacagtgaccttgtttttgtaaactctactctgaagaagtttagaaattagtcacacagtaagtggcagaacaagtattcaaagtcttgcctgattttccatagtcatttagcttggaaagcattgtaaagtggcagaaagaatatggactttgaaatttagacacacctcgatttgatctctaactttgctgcatatttgctgcgtggcaagttcttaccgttggtgattttcattttccttttcagttaagtgagagtaatacatttgttaggattaaatgaagtaatgcacataaagcatttggcttgtagaataagatgttaataaatgtttaatttcctttcaacaataccatatcgttttaaaatgtcttgggagccacttggacatttcacttgaaagttaagtgccatcaggaaactagaaacatgtataacccaggtagtgatctttcagggaaattttaatttccctgtctaaggaggagagtagtttttcggactgttttaaaaatatgtgacttaaaggaaagttttaaggttaaaagctgaaatagaactgagttaggatgagttaattattgctgaccaaaattgtaagaaagtccatttctacatttcctgagaaatcgaaacatttgtgttatatacatagagaagtcacttttaaaggctaagaactgaccatttgaaaagtttatgattaagatatggggagaaagtgttcatttttaaagtaataaacaatagcaagtttctcttatcagatttaaggtttaaggaatggtgcttgttcagacctgagtacagtgatgacacaggtactaaatatgttgttggaggtagtataaatctggaacctgtttcaaaagcgctttggcatatttgtgtgtatttccacttctgagagattattctaaggaagtaacctttttttttcttctttggggggagaggaggttattttccttccttaatgacaccctaattga

SEQ ID NO: 44865 - DNA, 417 bp, Homo sapiens
ttcttgtagtttatcagctgaaatttaagacttttgaattgtagtggattgggcacttaaaaatcgattttatttttaacttataagaagatctgaggtttggaaggaatcttaaataaagtttgtctaaatcatctatcagtaggacttttgaatcatgatcctaacatcctgacctctgataacagataccctaaggcaggacattccacttttaggcagcagtgacaacagaaagatgtactaataggtagaacatacagcctgtactcattcattggagttgtgccatttgggatgatgcaaaactagcataatttttctttgtgactgccctaaaagtatttagacacagcatggataacttaatttctttaaaaatgcattcttgtcttcatagcaatatgatggaactga

SEQ ID NO: 44866 - DNA, 1084 bp, Homo sapiens
agatttagggatttagttacacaactcaactgactttctctaggtcataaagttgagtcagcatagctttcaacctttcatttactttggccacatttgcataaatgattgctattttataccctgaaagttccagcttttttcactgtcccagatggcaagtattttcattttctttattcactctgtatctgcttctagaactacctcaggctgtaccatcttttactcttactgtaggccttctgctaacctgatgggacctggccttcatttgcttctcagtgacatgtgtttgcacactaagctgcccagagaatagtctttgggaaagttttaacttttaagtgatgatgtaattactgttttctagaagctacagttgatccatatgccagaaatgtgagggaggtagatatagtatggttatatacatattgtttagataaggatgcaaataaggttctcacagtagcaaatcctttgaaattaacctgcttctcgcctccttggatatactccaaattgtttagttcattatctttaataattatgatgtaattatgtaaaaagttatgggaagagacattttgcctaatgtcccctccacactaacatagcagttcatttgggtctctagtccttcaccttatgcagaataaaagttaatattttaaggatgcaaggattattcagatggttgacggtcttaacaaagtttcctataaagaatttgtttccaggaaacacggtgactctgctaacgacaactgttaatacgtatcagagcagagtgcaccatttcctgtttttctttgcggaggtctgactctggaattccccttgtttgcccatgactattctttttttttcttttgaaacagagtctcactctggcacccaggctggagtgcagtggtgtgatctcggctcactgcaacctctccccgccaaccccccaccccaggttcaagtgattcttctgcctcagcctctcaagtagctgggattacaggtgcctgccaccatgcccagctaatttttttttcttaaagaaaatatttaattttccatagttattggg

SEQ ID NO: 44867 - DNA, 1758 bp, Homo sapiens
ttacttgatctttgtattttgcagttttgagcctttgtgtcaatcccaagcacagagaggatctgccaaggaaaaacatttgcatcttcggagtagacattttgcagtttgtttaataacaacttctaaagtaagttgaattcatccattgtcactgattcaccaagtggatgttgcattgtggaatttgcctgagtactgttgtcattctgctcagccaggcacggtcagtttcttggccagggacattgctatgtgctgtgtgcaagctctttagaagagagattggattttcttggcattatcagcactcatgctatttagtctacttctattttgactgactctttaaattagtacaatttttctacttgtcatataactcctggaacaatagtacgggaagccgtgatccttttccctgactcatgattttagtctttttccaaatcgctgttttttttttttttttttttttttttgctgctccaacgaccagcatgtgttggagcagatctccatggtaagccaaaagtggacttgtcagcctataactactctgcagctgccactaactctacaggcacagtaactacactttatacaggagcacatgccaaagtgcctgggaggtgccaataaaatcaagaaataagaaaactacaaaaaaagatacggtattaaccttggacataattttttttagggaggcagctttcccacttttataaagggggttgtaaatctcaagaggtcatttgttccccatagcagcatatctcatttttaaattgaagcgaattaaataggattttactactcaacattcattatactgttaatctttgctgaaatatatgctaacaaatgttaagcaagggaaactgaagacttagtcatgtggattgttagcagtgatctgcattctgtaaaagaggtactttcccatgatgtaggcatgaagtggtgccagtaagcgtagagcggaaatgttgactttagttaacattgggtttagcatttccagtgcagcattatcagtgggcctttaaaaatacttcgtaagtacattagctttcactttgttgttaaattatagcagactcattatagagaacaagtttgccttgattttgtttaaaatgacttctgctaagcacccagaagataaaattgacatatttttataatataagcatactttttttgtacattgtgttcattcttgaataaaatgagttctgtgttggcttgtagatactaaaaagaaagtattgattttgattcaataaatgttttctttcaatcctggttggcctttcctttaaattttgtttagtttttcttttctttcaaggaaggaattatttaccagaattcagttagagcaccttttttgcattcttatattttcagtcatgattcctatcatgcaaaaaacaacttaaaactttttgatttaaaagagaatttaaatttctatcattgtaatctttaacttcacagttcacctcttaatttaacaaatacctagtcagaatgaaaattaaatggatagaaataggactaataaaacatttatgcctggtgcagtgactcacaactgtaatcccagctcttttggagatggaggtgggtggatagtttgagaccagcctggacaacatggtgaaaccctttctgtaagtttttattgcctatcaaccacatgatttttaacagaggtatcagatatctacacagctttccatgatgaag

SEQ ID NO: 44868 - DNA, 708 bp, Homo sapiens
aagaaggaaaatggagatggtaattatgtgagcatttttaccacctgtttcatcagaagcctatgttgctgattttctctttcactagtccttacaaatcccccattttatgaaacaccaagggcctgaggaactttcacaagagcagccttcagctagactgaagtgcctgcctgccttcagattattcattatgtcagagagctgcaagaggtgactggcagacaagagagaaaactctctactcagttcacaaactgccaagcagaaagacgagtgtgccaatgtaaggcaggtcaaagaactgccctgcattctggattctgagtcaaggagatcactaagaggtttgtttaatcctagaccatgctgtgtttgcctctcattgacttcctggcttggctgcaatgggttgtccccttccttagcgcctggcaggctaggaaagtccaatgtccatgtcacagggtttggcacgtggtgttttccacatgcgatgctacatcaagatttgtgtctgaggtttcagttgaaattatcaaatggcttttctcaagccattcatgatctgctcatccactattaagtccctgctatatgcgatgcacagcaagtatgctctgtataaaacaccagtcatcatcttagtgccctcaagcaaacaaggaccccgtgtgttatggtttatagagccatgcagaattcctg

SEQ ID NO: 44869 - DNA, 1039 bp, Homo sapiens
ttgggttaaaatcactttcatgccccttataaaaccaaccttatctcttaagctgtcgatcttaaaccattccaatagtttgatcccaacatccaaaggactttcaagaaatgtcctgtaagttaatagaaaatcttctatataagttggatccacgatggaatgttcttctattaaatgcattatgagacgctcaggtgttgcctaaaaatccaaggataggaaggattagaaaataaacaaatgacccaagaaccaaagaactattgttgattactccgctttgtagctactccattagacaaatcgtcaaagtacagtttcgcctttaaatccttagcgctgggagaattggaatgcaaacttaattgtaatccaccagcacccagaggttgagagacagaaaaggcagagaaataaatagccaacagcactcactcagctgaagctgttttcactggcatttcatcatagcaggacctttgaacttcactaacttagccctggtgtgggctgttactgccacttctcctacaaccagggcatgtatttattgtctcaaggcaacaaaagaggtgaaagttaaactaaagaaagaaagaaaaagaaaggaatgaaagggaagaaagaaaaaagaaagcttttctccaaatttaatccacctcaaaaatcttttctgaccaggctgtaggaagaacacaccagttcaagagagcctgtttcattattgttacttcccagaataaatatttccttttctacagttcctctcatacagtttcctctccatgctaggtcaccatattgagaggaaccagaagttctacagacagttttgaaattaattcagagttttaaatgcttgtttccaactttataaaagaatataaacaggctgggcgtggtgtggctcatgcctgtaatcccagcactttgggaggccaaggagagcagaacacctgaggtccacagttcaagaccagcctggccaacatggtgaaaccccgtctctactaaaaatacaaaaattggctgggtg

SEQ ID NO: 44870 - DNA, 2562 bp, Homo sapiens
ctaacaggttttagttatatgcctgaaaactagccttcatgaaggtcgaatgaaaaatcttttaagctgatgccataactgttaactcgacacagcaaattttggatccaagtacaaaatactgtaaaatttcccagtgacagtctgaaaaagtacctacagtggtgttctttaaacatgcatcatctactacagaattcaccatttgactggatgtaaacttttaaactaactttgaaaactttatcttttttttaggcaactgtacaatatttcagagacctttaaagaaaaactatttctaaattacatggctgagatacttcccttacaatttccatctcgtttttcatagtctacttaaacgaatgggcatctaactgcgaaactcatattacccaactcagaaaatacgacttagtaatggtgctttcttaacgacactcagaagcccccggcaaggacgggtacgcgggttaagaccgcatcacaggcaggaagggcggtcggcaccctgctggcgacaagggcctgggtcagggaagagactcaagcgaacagattcccagtagcaggtgcgagactctggcaagagggcagtcgccgcggatttcggacagacaggaggatgctgtctactggactgtgagacgcacataaaggtcaaccagcctcacctcgggagtccgctcgggtggcttcttcctcaacgcctgcctagcgccagggtccacgggtgagttcatggccacggcccgggtactccgcagcctgcccttagcagcccacgccacagttcattcacactaggtagcgggtgcggtacctttcccccgccccaaggagggaacttcgcgccgtaacaaggtccgaactctagcaaacaacccttcgcaacgcccgcctaaggcctctacccacgcgcgactggccggagacaagtctgcgcgggggcgggggagagtaagtgcgcatgcgcagcacgcacgcgcacgctaagaaacgcccaagggagtaactccactgtgacgttaaaattggggcggtgcgagtaagtcgtttcctgctgtcgtcgtgagatttaaagacacctcgcgagacctcacctaaatcagtcacggggtctgccttggcgttgtggttccgtcttctccatccgttggagacaccggaaacgcgctgaggacctgagcaaaaatagcattttggggcagaaccgtggggaggcgttctgactggagagaactgttgtgcccaaatccggaagcccagggtgtggccaagtccggctttgcgctctcctctgcaacttctactgccgactttgaatatgcggaagtagaagccgccattcggcaaagaaggaattccacgcacacctcatatctctttaaataaaacgagatctcttgtgaaagctgccgacagagaagtgcttgatctattcgaaacggacgtcctgagaccagggcagagaaagcaaacattcacggccaggataggcagccggtgccgcggccagctcacgattacctttgagtcaaaaaactagatttagactgcgttcttgtaactaaatgcccggggcagccctccctcaggcaactgcgtttagggttgggactcgagtggcaacttttgcaatactttttacattctagtctgcttcccaacagaccgaataaagccagttttgtttcactgctcccttggtaagaaaaacagaccacccttaggagcagccagagagctgctgaggccgtttcaacaataagctcactgacaattccagaatccatcgttctaggatactccttaccctttctcataagttcataggtaactaactttggcgacaccacctttccactgaattttaagctccttgatggctgtaactacatctaggtacaccttggtatttctcacagcagttagcatagttcactaaataacaaggtgatttatgattatgacatgctttccaattaatgactgcttcacagtaattttaatgacgtaataagagttaaaattatatttgaaaacaatgagagttcaggctacaacaccgtttctgggaccggcaatgacttaaggactgttttctgttggtcctggggcttgcccaaactgggagtttacaacatactattagcatttctctttttcaggtatagatcaaaaactttaccagcgaagtgtggcatagccattgtagaaataaagtaattgtggaaaaaatcacaggatgttgcagacgatccgttttcctcattttttgtacaaatataacctctcaaagatctgcccaggatcacaaacaaaagttaacccttccattcttcaaggatcaattttcagagtcacatcaatattttgaaagagggagaaagaactataaagcatgatcaccatgaacttgaactttaggggcaaacagacctagaatttgtgtctctaatattagacctcttctagttaagtgacttgaagttatttaacatctctgaacttcattttccttatgttaaatgggaatatagtaaaggacctattgct

SEQ ID NO: 44871 - DNA, 995 bp, Homo sapiens
ggtcctgctgaggaaagcaggttttacatgaatcttggggaactgtttctatacatttacaaaattcattgttctgcttgttattttttgtacacaatatttttgaaaactctaacatacagcaatggtctttactatctgtacttgttttaaatggaacatcatcaatagtcctggtttcgattgaatcatcattaaaatattcgtcgaataagctcatgctttctgggtctgaatgattccaacagggaagttcacagggctcttcagaaaccatgttctgtgtatcagactctccagattggtccttggttgtttgtttagtttcttgatgctgatcaatagcccctctttcttccttcaatggtttggtgtgatgtctggtaatctgatccaccactgcctgacttcgaagctcagtatctgaatcaggtgacatagaatccccaatcaggaaagtaacctttgtctgggcagcctcacaagaaaatgaagcaggcacaatcttatctggaggttttttttccacaaccattcctgtggatctcattgctttgcctgtgtgactgtctgaatccagcaacttctcactctgccatgtttcctctgttgactctaagcctgactctgacaatgcacatttgtctactggaacagatcctgtgcaaacaactgtctctaacttggcgtcaaagcaagttcttaatttatctctgtactgtttaacatcaacagcattttcttcttggcagtcagaaggagaaatcatctggcactcatctgaaattcctagcagctccttagagctgttttgaatatcttctctctcttgttgtgaaatgttctctacattttgcccaaggagtggatgactgcaatatttacagttacaattgggagttctaatttcttctgactctttaaagagcaaactgcttttgtttctatgcattgtgacaaggacatactctgattcttctatttcacctttctct

SEQ ID NO: 44872 - DNA, 785 bp, Homo sapiens
caaatggtgaatatcaattgtatatgtgaaagtacttatataggtagacctcctattgaaaattataaaatattataagaatatttaatatccctttcatatttgcacagcaactgaagcaaaataatcaaacaatacaaatggaaaggcacataatagtgacatatacttttacagattttataactcgcatgctgtaaattccaggcaatcttgaaattctaagtctaggccatttgtactatataataccacagcaattgactcacaagtatttaattaaaattttgaaaaataaaaaagtcttttaaaatctaaaagcaagatcagtatcctgtttggagggagtcttatgacaatatttactgttctggtgacttcagctggatctataatgacagtgtttcctcagagcccaagcagaaacttttggcctttgccacaaagcttgtgactgcagaaaagaatttgtcaatccaatagtataattaactgcaagttcaagggcaaagattcactgccttatactaatgcaatatgtgatactcagaaagaatcctgaaggattctttcaagcaaataagcaaaaagaactattgaaaacatataatgtacccacaaaattttaaatgtcttgatttcaataaataaaataaaatgtctggatttcgataaaacgtattaataataattctggtgtaaacaaagtaaactaaaacaacttaaaccagacaaggcacggtggctcatgcctgtaatcccagtactgtgggtggttgaggcaa

SEQ ID NO: 44873 - DNA, 2538 bp, Homo sapiens
tttttcctgatgagacctgcattagcaagagagagtgaataattttaagaatagcaaaatttcttaaaccagtgtggcaacttcgcctgttccaaaatttgacagattctctttttttatttttattttatttttttgtttctactattgttgtacaactgggctctttgctatcctaccaagtttaaaacgtgtggcatttgacatttagcctagttatatttgcaagtttccacactgcaatacgtataaaggctgtttggacataatctcctcaggtgcagtttaacgactaaattttaccttgaattcaggtttatatcaaatcttacaattctgaaaagttactctgccagcaacaggtactacaatgaaaaattaacaaagcctgtaacactacaaaatgctctactaacattttcaatttttaagactccttttcagtaacaattcgaggaggaagaatctacagccaattccaaggccagatttcattcaatttggtcttccttcggcagtaaccctaaactcaagtttcacatttctccttcgataacattaaggtcgctcggtccggttactgcacacctccaattttagcgtccaagaaacctgaaagaacggcacgttgcctactcgctcctccagccttctctcaactcagaagcttggccaaacgtgccgctctctccacaacgccaacggagctggaacgcagcgcccggaggacaactggtcacggggaggaggggagaacttcgcggcccggagtacggcggctgaggtccaatccagcccgcgcccaactctactcggtgccaggaaggcgtgtggacccaaagtctcaggccgcggtgctaggtccggaggagcagagtcgcgcgtggctgggggcaggtcgtaaacaaaccgacgggaggagggggaaggggcaacggcgaggcgggtggggtaaaataaaaggtaggacctcgctccaacccttcggcgctagcccgcagccggctccaccccaccgaggaccagatgctgctctcggcgcggcgcttccgctcgggtcggaacaccgaaggccccaacacccctggagcccggagcccacaaggccatcggctccgcgacccccgccccacagcgccctacctgaacccgcaatctgggtcccgggcgtcgcggccgggcgcgcccagcccggtcctcttgctgaagagcttctggaacagcgtaggggccatgctagccacggccaggcaggggtcgctccgctgggcgcttgctaggcccctgctcctacagccgccccgccacccccatgggcgcctcagtcatatgacagaaattagtcacttcaaacggccacggcgcgcggggcggggcgcgaggcaaggccggcactcattggctggaggggggccgcatcacgtggcggcgcgcggagcaaggggcaaggtgggggcgtggggcggagctgcctcccataggctcactggcgggtcccgtcacgtggcaggggcggggcgtgagccgagaggacaggactggaaggtggctagggatgtgtagcgggagaagggtcagtctcgatcttcccctgtgaagctgtcagcgaccatcagagggtacgccggggtggcgcggggacgatgccaggagccttggagtgaagaaggcttcgactccccgcacccacagagttgcgtagggaaccacgggcaaccgactcttccttgtcagcccctccctagcttctgcggcttcacacctccattccgcgccgggcagagtctggcggctcctggagcacggaaggcccacaagcgtacccgtggggccgcggccaaggctggactttgagcccaggaccccaggaccgcccttagaaggctgcgccggcccgcgagaggtctgggatctggacagcgcgggggctggctcacagggactggtgaaggaaactgccgggacccctgccacagccatggctccccgcaaagacgacctcgagcaggcactgcgggcagtttgtactagcgcctagaaccctgacaccgggaattagtctcttggaagagctagcgattggaggctcaggagttaggctgtttccttgttaaccaacaaaatcaggtgaaaccaacgaagtcaggaagcctaaagacatatatgtacagatatctaaccctttacgctaattatttagatttttaataaatctatcttaatgtttaggtatgaagacgggaggaactgtggaattttagtcaagttacagggaagaaacgctttctaaaaaaagaaaaacattgctcacatgtgacctcacagtcttatttaacccatggaaccaaaatatatcagagtttgtatcaaactaatcttataaattttcagcaaccccatccattcactcactccccctccaggatgaggaagctcgtacaatgggatgtaatcctcagagaaatttaggaaataacttgtatatggttggaaggctggataaaaatactttgggcaggcgtggtagctcacgtctgt

SEQ ID NO: 44874 - DNA, 616 bp, Homo sapiens
ttaccaccagtccctggtccttggcagatgctcacagactctgagctttgcatattgtggcattcggtgcaatgctagagtttttacagagcacagcccagattagccaagtcatccatctgtctttcaacgcatctggcagaccctcacacagtccctcttctcatctagctcagagttgggcctgccctcggtcccctgggaaggacacatgaggaaatgggcagtgttatgatcagacatggggagccagaaaagctgcctgacttaggtacgagagagtcagggcaggcttctggcaggaagtgatattgatcctgagaatgaaagataaagatgaaagggtggcctggcagaggaaagtaaacatacaaaggctggagttgaaagagcacatgggacacttagggaacagaatattctgtgcagaaaataaagcactgagcccacaaaatctcatacaaagatcagtgctacaagtctgtgaggctggcctcttggatatgctgagctttcagcagtcacggtattaccatggtcctcagtgggaggaagaaggggacttggcctaaaattcctgagttcctgatgcctgggcagccttttcctacacact

SEQ ID NO: 44875 - DNA, 1419 bp, Homo sapiens
cacctgtcaggcagcttttgtccctagcagtagtgagcagaatcagtatcatctgggttggggcggctatagtttcttggtcagtctatgaaaagaggaggagtcgtttgccaggtggcaaaggggcagagaaaaacatgcttgtgatgggatgccttaaagaaagcccttcaaccaggccaggtgatctggtaagaggtgtggtggggataggctgaagctagatcaaagaaatctggacctagtagctcgcatttaggatggctccataatcgtggagtttctccccaaagaggggcatgcagaaacatgtctgggaacaccactagtctgaagtgttgtttgtagggtggcaggttaagaaaaggtagggacccttgttggagggtgcagaccttgatttggcctttagaccgcaagtttgagacctgtagggtagccaaagagagaagtaccaagccccaaggaacttggaaacctagaagatgggcagaggaggaggcagctgtgtaagaggcttgtaagaactggtcacagaggagaaagagaaacaggagcggtggcatcaaagaagccatgaaaaacatagaagtcagaaaataccaatcctggaggaagcaggttggtgtggggaagtgacatttgttggcaggggcctcggggcaggcctgtggaggatagggaaatggaacagtcctggcagttcaggtggctgggggctgggacctttggacaggctgtatattaagcaggtttcacgcgacgcctccccttctgagcattccccatggcctcgctagtgcaggatggacaggaactgtactcaggtccaggtgacagctcatgcctggattttcccaagggggcggatccaaccagtccaccagtccgttctggcagctttaagctcctctcagacagggtgacatccaactgtttcaagggctttccagtgggctgcacttgttctgtcccacaggatctatagggaaaccccagctctgggcaaacagacccccaccccctgactaaggcctccagaatctgggccagaggccagggtggggcaagacactgagtcaggacagcggttttctggcttccttagtttgtgtccacagacatcctcactatcctaggagatgaccccagcaggaatggggagctgaagcctgaagagtcactgaaatgatttacataatttccttaatgctcaccacgatcatgtgagagagagaacatgacccgtttcacagacgcatcactgaagctgtgagcagagaaacgacttgtctgccagacagtggcagatacaacacttaaaccaaagtctctgagtctcctcaggtgccctttcatcactcttcctgctacttggcatcaaccagccgggatgagacactgaaagggatgccaggt

SEQ ID NO: 44876 - DNA, 1636 bp, Homo sapiens
aatgtctgtcgacagcctctctaggcagaagtgtttcttcttgtgtaccaaccaagacctataggcctcgcctcatctcccaagctatacctcaccacaaagcagaacaagggtggactaagaactggcagagacttatacttggctttccagaggtcccaggtttgtggtaggggttcatgaggctggctgctgtctagatgagatatgcagagtgagctcttttccctgaatgctgggcatcccatcggtagtatgggacagggtaagctcctggcctggctggctccaatgctgcctgagtgaagctatgtaaccctgggacatctctcttagcatgctgatatttggctgcttctctgataatgggagcagcattctctggtatggggtgctgtggaagacctagggaatgggacaacagattaaaatgggctttgaagacccttgcagaggtgaccagggaggcccaaccttctatttcctgtgctcaggccttggcagagacagaaaccacgaggctccaaggtccccaaccagtgggaccccgacaccaggaggacaggactctcagagttctgtgcctactcctcagtttcttttgtgtctgctgctatcaggagtcccaatctacagggctcaatcaggatgggatccttagtgtggcacctgggtcagaaagccgcccctgctaagaggctcaggacagggctaactgggagaagaggccccacctaagtgtctgccacccaagatgatactttttttggcccagaagcctcatctgacctctggcccaggcctcagcctgggtgagggtggacatctctgtcctaacaagatccttgggagcctccaggcagtccccttccagggataagaggtcctgtgtctgcttggcctagagccaggcctgtgctgagtcacaggactctggtgttcaaggccaaaaacaatgacttaaacattctgaaatccaggaaaaatcagcactggctttctacctaagaaccctgcccagctaggcatgagttcacccagcaagacagtgacaaggacaatgggaaactgcctgtcccctgtaggcaagaggagcagggggctaagccttgagcctgaaaccaaccctgaaagattctttaaaaaccccatatcatttcatctaaaattagctttcagcatctaaatcacttcctgttacagaaaccacaggcctgatgcttcagtcatcaccctgcctgcctctaggggtggggtaggtgaggtaggagtgctgcacacaaaaaacagtgactatccaaaagtgacacagcagtcaggaacccctttccccaccccccccacccactgcagaaaggatggctaagcagggccctataatggtgttgttgtggggaccagagccaatgtgaacatgcatgtgcatgtaggcaaatatacacacatatgcacactcccctgcatgcacactatacacacagaccagagctttctccactgccgcagagagactgccgtatggacagcccaagcacgtctccgttgtgccccttctgagcacaggactcaccaagagaggagggcaagtgtctggcctccttggagcatctgcatctctgtttccacttctcttaca

SEQ ID NO: 44877 - DNA, 1763 bp, Homo sapiens
gccataaggaatggcattggccaaggtctctgctcccactcacataggctgttcctctgtccacgatgcccttttgccagccttcctctgaccactccagctcatgggtcacctcctccgggaagtcctctggccggaggcagtcagtgctctaccaagtacccactgcccgcattcccttccagcacagcgctcaccacactgctctgggccaggaccttcccgctcttccaatccgcctgtcccactgggttagcaactgcttgcggtttctggcacacagaagggtcccgtttgttgaattagttaacgaattatcacgggtctccgcagctgccaaggaaaaacaacgctggttccacaaggatgtctgggggagaaaagactttctgatccaatggcccatctaatgggctccaagctggaccctgcccggacaagacctaggactcccagcccttgggagggtgcagaacgggcttagccaatatgaagaggcccctcagggccaggcggacgccgcgcccccgctcccaacagccggcagcccggggtcaggccgccacttcccgggagcctgacagggaagagcggccaagttcccagccccgcccgacagccgagggaactgcacgaagggcgccgctgacctcaccaccctgagctcgggaaggcttgcgggcggcggcacaagaacccagacgggtgcagaaacagggcggagggtgcagggtggcggcccggactgcgctgctggcggctagcggcgcgacccccggccccggatccggccccggcccctaactctcagccccgcgcgggcagaacgcaccgcctggcgaccccagcccgcgccccagcgctaaggttgatctggcggctgagcgggcggggcgctcacctggacactcgcagctcccggcgtttccagaacctcccgcggcgtcgcccggtcagctcggcgcctcctcccttggcgactccgcctcgggccgctgccggggctccgcccacttgagccgccgccacgtccccacctcacgctccacacgcctgcctgcgtcctggtccccagctccggtggctccgccggggttcgccgtcctctgcgacccctgggaacgcccaggctacccggcctcgcgggagccggagccggagccggagccggagctggccgcccgcgcccttcatgccgcccgcagcccaccgcacgtactccgcgcccgcctggctttggcgcccccacctgcgggccttggcccgccctcctgcccagcccctgggcgtctggagaggtcgccacgacccgatcccctcgccggggctgtagggagagcgtccctggaggctgacggatttccctgcctgcgctcatgcccattgcctggggggccctgccgggtacacgggccccttcttcccagcaccaccacaaggaggctgttacgggaggctggggtcaccccggctaggaactgggtatcaggagaggaggcagaacagtggagaagaccctgaggaagactagggacctggggcccaccccctggagaccgagattgggaggcccattcccagggccgagctctcagtgggtttcagagagtcccgggctctggtccaggcagtcctggtggcatgtgcaggggtgatggattgatgagaagggggcccatcaaaggctgggtgggggcggaggcgggggggcggtaacaacctggggcacactgggttgcccaaacccttctttatgccatggg

SEQ ID NO: 44878 - DNA, 1872 bp, Homo sapiens
atctcaatttcacagtctatgttggctttacctccctctctgttcactctcctccctagtccctcacttctgttttatggtatcattactcagaataaacgaccttatatacgttcttgtctccaactttgctctattatatggggtggagtagggagatgaaacccaagctaagtaagataatgaccataatatatcattcgaagaaggatacttgtgaaagtaaagggaggctctattaataatttcactggattaataggcataaatcagagctgtcctagcacatcaggatgtatagtcttattacaggtaggaaactgaggttccaagggggtgggaagtcctcctaagaggaggggtcagactggaagctacacaaaaagaggcagaaatgtccctccgcctcttaatcggagcctggggaaacaaacacactcgtgcaaaatctccaaagaggtgagctcttcaccctgtcaattttatctgcctcgtgaaccccagggctcaggctccaggcccgggctagctcacacaacagcagaagggccttaggtctgggcactgagccaaaaaaagggaggctgtggtccctgctttggttaccctgccgggtctgagcgccaaatcggatctcctacttctctctccctccctccctctgttcctggactgggggcaggcccttctgctaacagaaagccttccagtcggagaaagctctgacagcctgccgcgataaagggccctgggggcgtgaggagagcaaggggctcaaaatcagaacccagcgtgacgacagtgcctccatgactgtgctcccgcaatgcgcaggctccatgtcctggcgcccgcccgcccatggacccggcgggggcttccaggctgggctcagccattacgccggcgtgcgggggaggaaactcgcctcccgggcactcggttgtctcctgcccccgcccctccctccgatccgggcccatctctgacgtagtgtgaccttgctcatcccttccaggctgtgggcctgttttccctgtgcaagatgagggtcctggctgtcctgaggacgctgtccgggcgccgccaggggtgaccgaattcagctctgctaggactgttgggaaatgagctccctgtcggcgtgtgccagccgcctgcgcgaggcgccacaggagagggcgcgctcctgtcgctctgccgcccccagaagtttcccgggaaccgactccactgactcgcccctccgcgccccacgcgtggcagcctaagctcagcctccagattggaggagaccgcggagggaaccctgctggggtctgggcccggggccacgcggcccgagcagatcgagggccgacccctccgagaactcgctctctggcctcggctcctcccttgcgcccgccctcccacgtggggcccaggtctgggaatcagcgctcgggggtggctggggacaaccgagaacgagcttcttccccggcacgcgggcggaatggctgagcccagcctggaagcccccgtcaggtccttgggggcgggcgggcgcgcgaagcacagggcggagacagccgggagcccagcctcccgggctgggccgccctccccttccccgcgcccggccggggatgggggtgtggtcccaagtgtacagtggcatcaagctcagcgcgagctcccgggaacgctccaacgccttcagcctgtttcccaggaacggtccccggcttcgcgccccaatttctaacagcctgcctgtcccccgggaacgttctaacatccttggggagcgccccagctacaagacactgtcctgagaacgctgtcatcacccgtagttgcaagtttcggagcggcagtgggaagcat

SEQ ID NO: 44879 - DNA, 3195 bp, Homo sapiens
tacagatggatgatggtgatggttgcacaatgtgaatgtacttaatgcccttaagagtggttaaaatggtaaattttatgttatgtgtatttcaccacaatttttaaaaagcaaaaaataaaaataaaaaactcttaatttcccaaacccccaccccatcaaatctccccatttcaaaaacaaacatgaaaagctataaagttgctcaggctaaaaatccaggagtcatccttaatttccttccctcatgcccacatccaatagtaaatcatgtcacctttttcctccaaaaatattctgaattcatccatttatctcttccacagttaccactctagttcaggccatcataagctcttgcctataatgctgcaatgctttctaatcagtcaacctgctttcattcttgtcctctacagtcccttctctatatagcagccagaatgttccttttatgctagaagtaagaccttatgcttttctctgcctgaaaatactctgataggccaggcacggtggcccacacctataatcctagcactttgggaggccaaagtgggcagcattcaagaccagcctgggcaacatggcaaaatcccatctctacaaaaaatacaaaaattagccaggtgtggtgcgtgtagtcctagcttctggggaagatgaggtgtgaggatcacttaagcccaggaggcagaagttgcagagagtcaagatcatgccactgcactccagcctgggtgacagtgagaccctgtctcaaaaaagaaaaaatattctgatagtgttccatctagaataaaatccaaactccttgccactatctacaaggcactagacaatttggcttccataaaaactggcctcctgccaatgtctctgacttatgttccaacattactcactttgatcactatgttctagtcacgctggtcttctctccgttacttagtcaccccgagcacatcccttacctcacagtctttgtacttgctgctcttctgcttagtacacctgcttcccagatcttcacatgacagattccttctcgtcctttgcctctcagctcagatatcactttctcagaaacatgttcacttaccattcatctaaagcagctacccaatgactgtcattctataccattactctcttttctttcaccttggcaattaccactacttgaagtttgtatttatttgtacaagtttattgtcagcctctccatcctccaagtaaaatacgagctccatgaaaacagatagcttgtttctttcctcagttcccagaactcggaacagtgtttggcacacatcagtctattcatatgtttgccaaatgaacgaagaagtaaaaaccactagtgacccaattttcctgccatgtcatatatatacataaaagtcttttgggaaaactcatatttctatattggccctcactaatgtcttttccatctattctagaatgcaataaccagtctttaaaatgcaagcagaatatttcacatttcatttttgcaggtatctctgaggggaatgaatttacatttctactaccacaaataggatggtcaagtttgttgcaatgcaaaattttttctgtggaattcaaaaactgtcctgtacctcttgaagccgaattgtggggtttcacattggaaattacactcatctaaagaaacagtctggacatttaagtccttaaacagttgttcaaagtattttattacatactttttctagtcttcagaatgtttcaaggtccattgtcttcatggctagttacctgtctgtccaggccaaacaaactggagttaaaatgcagaatcacataacagcagaaatgtgatttctcattctattgtgcaatccaacagaattgtgccaagtcttgctaggctgacgctgctctactctgcccaaatgccaatatgcattggggtgatgacatcccacttgggatattgtctgatgacacagacagacttctctgtttctccactcttgggtcatataattcaatgttctggggctgaggcaaataatgtcttacagtgattttggcaagaaaaaaacagctatttcagattttgttcaagttcccctagtcatgtcagaccccattgacttcagtagggatggcaccatgttcaagaggctgaagaagagacctagaaccagaaactgagacataaggtttattgaggggacttacaatacagggcagtccagtggcagtgggctgggcaggagaaccaaaactccttgtaaaaagcatgcaattggccaggcgtggtggctcatacctgtaatcccagcgctttgggaggctgaggcaggtggatcacctgaagtcaggagtttgagaccaggctgaccaacatggggaaaccctgactctactaaatacaaaaaattagccgggcctggtggtgggcacctgtaatcccagctacttgggaggctgagacagcagaatcacttgaacccaggaggcggaggttgcagtgagccgagattgcaccattgcactccagcctgggcaacaagagcaaaaactctgtctcaaaaaaacaaaaacaaacaaaaaacaccatgcagtttatataacatttttacttaacacctttcccctagcaacctccaccaggcaaccttcatttaacctaaaacaaagggctttgatcgcctcgtagggcctgcattctacaggatgggctgggggtgggagcagttcagaagttcgtcatagataagaaatgaaatatctgggttggccactcccagattccttagcttggagctctgaacacacattcttcttagaccatagggtcattcttcaggtatgcataagttattgctgccaagtgcatctgtcgggtgcatctgccatacaccccttaccagaagcgtccaaacacggatttgagggatctacagcagacactggacagatgctctgaatcattctctactctgatgctgaagctataatattggactaagcttgggccttctactcttttctttctttcttttttttttttttgagacggagtcttactctgttgcccaggctggagtgcagtggcgcgatctcggctcactgcaacctccacctcccaggctcaggcaatcctctcacctcagcctcctgagtagccgggactacaggcgcgtgccacaattg

SEQ ID NO: 44880 - DNA, 3172 bp, Homo sapiens
gatttccttgttaaaaatctgctggccaggttaggttccctttctgtagctttattttcaactcataatatagtgactattaaatattctttactcaacacattatattgtaaaaatatacacttagttctgtttctatcactaagccactactattttaaaaaggaatatcttgcattgttaagtttagcagcccaaattcttaaaggccttaggaatggtgctgtccaataagataaccaatagctacatgtggctactgagcacttaaaaaatgagtctggccaggcatagtggctcacgtctgtaattcagcattttgggaggctgaggtgggaggattgcttaaacccaggagtctgagaccagcctgggcaacacagggatgccttgtctctgtaaaataaaaaaaataaaaaaattagctgggcacggtggcatgtgcctgtagtcctagctactcagcaggctgaggcaggaggcccacttaagcttaggagttcagggctgcggtgagctatgattgtgccactgcactctagcctgggtgacacagtgggaccgtgtctccaataaataaatgaataaataaatattaaaaaataaaaagtgtggctagtccaaattgaaatgtgctgtaaaatacacactggattcctttttttttttttttcaaatcctgagaacctgtgaaacacactgaattcttaagatttagtatgaggaggggaaaaaaagatcaatgatttacatataacaatgtaaaatatcaataatttctatattgattatatgatgaaatgatcatgttctggatatacttgattaaatataccattaaagttaatttcatcttttatttttactttttaaatatgcagcattgcccaataaaatacaggacaaccagttacatttttattttatatattcctgcttgggacataatatttaaaaattattcattctatatctgaaattcaaatttaactaggagtcctatatttttatttgctaaatctggcaattttattaatatggctactagaaaagttaacataacaaatgtagctccttatcctatggaacattgctgctttagaatcacctcgctgctttttttttttttccagttagcttctgaataaactctgcacggaaataactaatctgtggggaatatttaaccctaggctaggatcgttaatcgtgaagttaaatttttacatctgcatgaacaaaatggcttgttacagacgaaaatgtggaaagggcatctggactagaatgaaaagtcatagctcccagcctctctactagggtagttaacagtcccaggttcaaaataatccccgtccctcttataagattaggcggtgtcaagagcaactatctgtgagaccctgggccagtgactttctccttacctccgcccccaagtaggccttgcaaaaagctgggaggggtgcgttttcaacactggagcttcgcggccgctctcccactcgctccccgcccggcgctagaggagcgagttcggactcggaccccaaggcctcgagtcccgctgccttcctaagccgagcccgggctacctcggtcgtccccagcaggcttggctggcagaggccgggcctcgccaggtccccaggacaggccccgcccgggcctcaggtgcactcccggcccgccccgcgccctcgcgtcccgccccagctccgccttcgccggcgccgctctgcctgccagcggggcgcgccttgcggcccaggcccgcaaccttccctggtcgtgcgccctatgtaaggccagccgcggcaggaccaaggcggcggtgtcagctcgcgagcctaccctccgcggacggtcttgggtcgcctgctgcctggcttgcctggtcggcggcgggtgccccgcgcgcacgcgcaaagcccgccgcgttccccgaccccaggccgcgctctgtgggcctctgagggcggcatgcgggactacgacgaggtgaccgccttcctgggcgagtgggggcccttccagcgcctcatcttcttcctgctcagcgccagcatcatccccaatggcttcaccggcctgtcctccgtgttcctgatagcgaccccggagcaccgctgccgggtgccggacgccgcgaacctgagcagcgcctggcgcaaccacactgtcccactgcggctgcgggacggccgcgaggtgccccacagctgccgccgctaccggctcgccaccatcgccaacttctcggcgcttgggctggagccggggcgcgacgtggacctggggcagctggagcaggagagctgtctggatggctgggagttcagtcaggacgtctacctgtccaccattgtgaccgaggtgggtgccggcccctgctggggctgagaccagggctcggaggacctgtcgcggtccttgaacccgagctcctctctcccagatgcgcactggacgctgtcactccccctcccccaacggtcaacaccctagcgatggagaccctccagccaggtggcttgggaacgcttcacgaggtgacctccagccacagtgtgctcctccctgcacaggtggtcagtctggcctcccgtcctgatggccactttgaagagggtaccaggaaggtcctggcggtccctgggcgatgctctatggccctgtgtgtccaggacttactctagttggggttgggggtggtaagtagcagagccaggacttgggccaggggctatcccgtttttcctctagtctcttgatttctttttagaagagaagaaatacttctctttcctgaacttttaaaagttaaataaagcatgtgtatacaactgcctcttccctttttcctctagttactccttcccctaccgtccacaacccaaaaacgacaatctggtcatgccctgtaagtaattgtttgccttttcccatggtcagttgtcagtcttttttttttttgagacagagtctccctctgtcaccaggctggagcgcagtcgtgtgttcttggctcactgcaaccttcgcagtcgtgcgttcttggctcactgcaatcttcgccttccgggctcaagtgattctcctgcctcagtctccgagtagctgtgagccacgacgcccagctaatttttgtgtttttagtagagacggggtt

SEQ ID NO: 44881 - DNA, 2427 bp, Homo sapiens
gaactcctagcctcaaatgatccaccggccttggcctcctaaagtgctgggattataggagtgaaccactgcacctggccaaacatgctattttaggtagagtatctgactaatctgttggataaatcaggggtagggtgaggagagaagagaagctaaaaggccagtgcagaagcttctgttggtgccggggacagggaggagagtgtagcagggcctgggctgacatagacatgcacagaagccaggcttccggagcccatcttgcacccatctcctcagcccagcagatggcaacactgctcttcagaaatggaggtggccagccagcatggggatgccgtcagggggtgcagggctctcccatttttgtgcggtgtggggtacacataagctcatccaccccaggttattgctgcgtgtggatcagctctttgcttctggcttgtgatcaccaaacattccacaagctctggttctgcaaccttattcccacctatggctgtgctctacctggtctgtgggtctgctgttggcagggaggcctcactgagattggaccttgtactgccaggttcatccctgagtccccccgatggctcatctctcagggacgatttgaagaggcagaggtgatcatccgcaaggctgccaaagccaatgggattgttgtgccttccactatctttgacccgagtgaggtaagcaccatgtgggtgtgggtgagagggacagactgaccgtgatttgagagcagcagcacccagccctgaagtcctccctgctcacagcagcccagccctctctccgcccaagccccaactgcccattccccccatccccccactccccacccccacacgggccctgttaacactcagaagttgaggaataggttacagctgcctcactcttttcaccacgggtttcagattttcattttttacttcctttctaggcaatcatatattttaaccattacttctaacaataaatactctttttgagtaataggcctttcataaagtcagcatttgggaaaatcattgtttcttatacctaaggtggcttgtcaccttacaaagctaaccccaaacgtaaaatgtaaagcacaaatagatttggagttagaagtatttcatctcttgagtattagcaattattcattaaaaagaaaaaaaaagtgtttagtctctttctgccctccaatggttaattattgcatatcatcttggagtcaggtcctttttgatgtccacctcttccccctaccccacccctcccgtcagccctgttctcacacaccatgactcatttcttggctctacctagttcctggttcttgcttttccttcccgttccctctcctaccatctctgtagcaggcagttttccttggtctcgtgactatgagaggttagaagctgtaaatgctgcctggtggggttctggaatgtgtctgtggtctgactggaagatgaggggttgggtgtgggaacagccacaagcagccctgctgaagtgtgagaggcaggcatggttgggcttggaaaagagggaacagttattgtagacagcggaggccaatggccactgccagccctgcagacttcccagtgagtggtggcccagcagccactgtcagcatgcaccagaaaggggtcctgtgcgcaaaggtcaggcaggagtgtggcagagggcttttaagttaggtggttttgggggcttttaagtgaggggtcaatctgggtgaatgcataagccccactggcatctttgaggaaatgaggctatttcaggggatactttcagtccaaagttgaccttttgttgaacttctaactctggaaaaacaagctccaaacctgggtttgcttaagaaagcaacatcagtgtgtttagacgtgtggtttattaatggccttggctgtgctgaatttcataggaagtcactctgggtgaagctcaggtcaattttcctgtttttctatttgaattctttttccctggaagcacaccagtaactacatagtataaggactcaaaacattaacttttaaaaaatatcagaccaataaaccacacagccaggtactctctctgacccagagggcagggagccaggcttcgggaggaatacttagaggcctccttggaatgtggccaccgacaggaatatgtgggggtgcagtgaggaagctgtcagcctgggcctctgtcttcctgtacccttgagggactggtcacttacttttcctcattttcattcactctgatttgttactgacaaggcctagggaagttttcacagcctaaaacacagtcagtatacttactgttcttagaaacgtaacactccccgacgctgagatgcagacagctaagatgccagggattcaagtatgttattgtgtgctctgagtctct

SEQ ID NO: 44882 - DNA, 2590 bp, Homo sapiens
caaaagtattttcagacctcagtggccagcgctgaacaccgctgtaggaatgtccatcaaacgttgtggccatgctccactctaacaaaaacctggttccgtggcataattgtgggggctaattgtcaggctaagtttcagacaccttccaaaaaaaattgcagggcttcctcagtctttaaactccagataatattgtccaaactttgacaactaacctgttatcatggagatagctccaagttgatggactggccattagagaatgtctatcaagcatccaggtaaatgacttggttgctgccctcaaggaacccacttagaggctgtcagaaaattttaagtattttcttccttctattgttcattcctaaaattctggcagtaggtatgattattattattcccatcccacaggggaagtaattaagtctaactacttgaatattttgccccaaatcactgacagtaagagacggccagacactgaaacctggaatctctaaatgtttagatattgatgggcaccgcttagaccagggagtccaaaccataggcttgctgttccagtttctcttatcggatgaagggacccccatttcaccgacgtcattgacttttgggttctccgctgaccccagatgagatgcctggtacctcatggtcaagtcccctccaacggggactcctcagaggcttggtcccagttgctcaggctgccatctgcctcctcaggccagagcccgaggcgccgccagcggtcaggtcccgggccggctgccagccacaggcccaagtaaacgctgaatgaagggcagatggaggaacctgtcccggtcggccgaagcgccgcgggcgcctttccacttacggcgggcctgcccagcctcccgcccagcccgggcccgggtcccgccgaggcaggtgtgcgtggcggactagctctcgggcactcggctggcccagctccaccccgaacgccaccgggccaggccacgcgcagacccgagcccggggcccccgcctctggctgccggcccgcgcccgccgcgcgccccgcgttcactgcgcgctcggccccggtcccgcctcccggagggtttcgctttcgctttcctgccgatgtcgttgaggaaaatgaaagcggtcgtggccaggactggcgcagctgccgtttcaggcgaggggcgcagaatgcagcggccgccagcctggagcgcgggccctggggccgcaacccgcgccgggcgaggtaagcacagccccttcgcggccgcctcgcgggctcctccttgcggacccggcgggcccgacgccaggcgtttgacccgggcagggtcaggggttctgccgtgggggcggggagggcctgagaagcggcacccttgggtttcgtggctttgagcctccaggccaggctggaagacctgggaggcctcagacaagcgtgccaaggggctagcagcccggggtcgagctggaaccgtggcaagtcgggccacctgagcacgcctttcccttttgtagagcaccgacctccctgggtgttggtaaaaatcaaaagtgggagggtgtacgtaaaatgctgaacagaatgcctaacctgagctcataatctactccctctgacctgtcagactcatttttcccactgggccccaccccatacctcatgtagtttgcttaagtttcctagatctggtgcacctgggggcacttggagtgccttccaagtgttccttgaccgagcaagctggcagctcatctcccttgatcacgggcatggagagcaactaggccaggatgtggcccccttgccctggccctgtccatgtgaagtcagggccttactctgctggggcccccatcccggggctagcatagatgtcagggataggtgcactcacagaccgagtccttcccagaccaggaaatttccagtccactgcatctgccagcagaagcatgaaagatgcgtgccaccttgtctttgcccttcgtcaagtatagccaactcattcttggtatgcaggaagggggttccaccccagggctgtggaaacagcccctgcccttagggcgttcccatcccctgaagagagaaaatatgtattcaagttacccatcaggcaggttgtgtagaacaaggacaggtgagtgaaagagctaagagctgagagtaaagtgactaaatcatcagaaactttacatttaagttatgacaggttttgcaggccaataccaagaatcccctttaactcaatttttgtctcaataataatgaattcagcctaatcacacagatctgatcatacggcccattactgaaacaaaacttgaatgatctttactttgagaaaaccatctgaatttgacaaaagatggtctaagttcctaagtttcaaaacatggagtccgccgctgccctacctcagcaggatggtgttgagtactgattgcttttagaaaatgctgctcttgccgggcacggtggctcacgcctgtaatcccagcacttcaggaggccgaggcgggctgattacctgaggtcgggagtttgagaccagcctgacaaacatggagaaacccc

SEQ ID NO: 44883 - DNA, 1270 bp, Homo sapiens
ggaattacataagtatgttttctcacgtctctttttccttaccttttccccacaggcacatatacacataggtatctgcctgggaattattaaaataacctgaacaattccaattgttattaattcttcttgcttcaaaatacaatttcctttttctatgttagaaatattaacaattgcattaatctacaatctaacctatttgtgcaattgcatattataccaggataggaaagtttaaacatgtatttcttttagacttttcattgaattgctgaaaattcatagtgaattgtatcttgagtaatgcttctctgagtctcttatttcccaaaagtatactttggaatccatgcaattctgatcgttgtttgacctttgctggcacaaaggcattctgaaatatttgcaaatgctaaagtcacttcctcatcttttacagagtttacttcagcttggtgaaaccaagtgcagtatcagtttgttgtaagcttaccactaattaaaggttcataaaatagccctgccctagggtcagggactagctagaagagcatgaaaatagcctttgaagattcagctgctggatattttacatcaaaaagctgaaacgttttaactattttaatattttgtttatagtacttaatatttgtgaacgtgaagtaaaatggacacagtcatagtaaaactgtggtaaaactaacttggatggtgtttgggctgtggttatcagaagctgcttaaagtgtccatgccttttatcccagttctacttccaggaatatgtcctaaggcatgttttcatatgaggttatttcaggtggcgcagggtaattctagttgggacacatttgccacattgtctaacactgactcacagtgagaaagttattcccatgctcaattccttttcagtcttctgatcaacggaaggtgaaaaactttagcttggtgctagcatacctttaacacctctctaagcctctctaatctcccattttatataaaagaatgggcaaaggggtagcagtattttgactatattttaaccacagtgtttttttattccaataaaacctattatgattgccttcatttatggcatatgatgttggttttccacttaaataaggtttgtttgtttgtttgtttgttttttgagacagagtcttgtcctgttgtccaggctagagtgcagtggcatgatcttggctcactgcaacttctgcttcataggttcaagcgattcttgtgcctcagcctcttg

SEQ ID NO: 44884 - DNA, 621 bp, Homo sapiens
ctgaccatgaagtttttagatgttagatttaatcatggttctgtatcacctgtgttggagatgtgtatatttaaatctggacacctctcttccagaattacaaaatctctgttcacggaaaaaaaaaaaaaaagttcgctgcaaggcttaatgcttggcagaaataattgctaccttttgcctagtaaaaattccccacgtgttctttcttagggcttgttcctggagactcttgaacttttttgtgggaatggggttggcaggttaagtgagtaaatggtgcatctgcctgggagtggtctacagccctggtgtgagcttcctccttctgtaaagctgctgggctgtagccagggtgagccagccagggcctgagcctgaaagaggcctgttgtggcattccagtaacatctgccagattgcagcgagacctttgactggtcagctcttcccctgctggggtccttcaactgcaccactcctctccatccccacggccaccactgtggtgcaagctctcacacctcttgcctggaccacagcagtgacctctagctggtccctgcctcgcctcgcccttacgtccagtctggttttttacaggagctagtatgtcctatt

SEQ ID NO: 44885 - DNA, 3216 bp, Homo sapiens
ctcatggagtcccaggccagtggtctttccccaggattcctgttgttttttaggaggaaatgttaatatagacagttctgtctgtgtctaaccccttagtagctggttctggcttttgtaggggattgggggacaggacttcctcagcacacaagaccctcaatcctaggcattagcccctctgggtggggcatttgtgggagcaggggacatggcatgactccctctttgttctgtgagaggcagagggggttaggagtgctgtgctcccaggactctcctcctcccaccgccacctgctgcctgccagatcctgtagtccttcctggggaatcatcacagaggcctccaggaacctggagtggggagggagcaggacaggcaggtcctccctcctgtggcaggactctgtggctcaggcctgggaactgagtgtgggaggaggtatggtctccctaaatagttgctcccagcgggccatttggaaagagaaacagacttttgcgctagggggcaggggcatagataccctctgcagctgccctggtcaccttgttgcctgaagactgttcccagtggtcttagatacagagtggtggcccttgctcctgtcagagtaggtttaaagaccacacaggtagatttctcccagaaacaacaccacttagaattttccttcagggagcatagcacaggggagatgtccacacacagtcatacctgtgtttgaatcccagctctgcctttttgcttgtgggtggtcgagttgggagtgtgcttgagaaattattcagcctcttcaactctcagtttctacctctataaaacgggaacaagaatacttacctcaaagatttgtggtatgaattaaacaaaataacctgtttgaactgcttaacatgtgtgtgcacgtggtagcccgtggtagctatttttatcatcatcatcatcgttaagcatgtcagtggcctctaccagtctgtgggtggaagcagctttcatgtgtggctcagcctcatggaggctgtgcatttgctgtgactcaggattctagaatgactgagccaaagatctcaaacttctctttgctatattgttatttgcagtcacactcacacactcagttatccagggtgaataattaagtttctgttgatgtaggttgccatgctgtttatttccctgtttctcttctgtttagttcagcgtccttcaaagaagacaatagttaagtagctaaactatattgagggcttagtatactaaaagtgttacataaattagcccctttcattcacataaccagatttagaaacagagtttcaataatgcctaagactacactgctaccgtgcagcagacccagcagacccgggcttcacatgtctcattccagagcccacactggcctctgtactacccgcttttaaacaggacagtggttgaatttggtgaccttgagagatcaggtagtctggtctttcttacctcctttccaggctgagctgaacatcacagaggggaatatctgtgattttcttgagaaactttacagcgaaagctgctggctctgcccttggtagccatttttatggtctggagggacagtggcttcttcctagagccactttgcagtgttcccttgaggccagctgtccatcctcgagagcagttaggaggtccatgttgagagtgtgctcagtccttagttggaaacctggaaacgcagaccatgagggtggtgtcccactggcacatggcaggtggggccttctgccaccctggctgtgtgtgtggcgtccagtgcgagtggtagccagacatcatgcccacctgccctcgagctgcttgcctgcagctggctccttactcacagatctgcatccatccggcgctggggagcagaggaagtggtctgtgggccagctgaattgcccaaggagctgagtcactggctgatttcggcctgccctgcagtccctggggtgactatggtgataggggagagaaatctgcttatctaggggccttgaagcctgagaactcagacactccaggagggtccttcatgccacagcatttactgagcacctactgtgtgcctagagaggtcatgcgagagacctcagcatgggagtgtgtgttgggctgcctggagcccgggtggctggtggccaccagggagctccactgccttagaaggatctgaggctggcagaggggccaggttggtgtgctgctgtttatctgagcagattccatgacaaccaggagataaatgcctgaggtcaagcaaaccctgaaacaagattaggtgtctgggtagggtgggacctatactgtgatttggagacccttaagtgaccagtatcttctgggtgactatttagcatgcttaattaatttgttaattaactaatgccccatcctactccagaaaggattgaaagtgactcaattcagcaggtcttttagagggaggaaggcatcctgagtttgctgtgagtgaaaagctagggtttattcaggccccgagagggtcatttaccagctgccagcccagctccacactcctagggctggctcccatgaaagcacagcctttgctgccaaagctggtttgcagcgttgctgggatcgcctcctggtctctttgcaacaagtggccccgacaccttcctgctttgatgcaaatcatgtgacttaagagaagcaacctgacctcaattaccaggtgcaaacatcagtcactgagagtaagcaggaggcctccagtgtccctggttgttttagcctccagcattaaatattaagagtgaactgttcagggtgtgataaaggctgtgtctcacagtttatgatttccagtaaaccagagggcttaaaggaagggccagggacaggtgagagattccagacctggccctctgctgagctggtagagcaatttctgcaggaatgggaggggcagggagtgagtccacagctagtaaagatttgccctgttctgtggcacagctagagagctgcattgtctgcccagcaggccccagaaagtgaggccagtttctgctcccagccaggcagctgcatgcactctcagcatagggatatgggaaaaagaagaagtgtgatgtgtcctcaccgtgctggccactgtgcctgcctcctgctgggtgccaggccagccaggagccctgggcacattcctctatc

SEQ ID NO: 44886 - DNA, 1328 bp, Homo sapiens
tacctcagtggctcctcactgtcagcaaaacccaaacattcatctaagctccttctcagttggagtcctctgggaagcagacaccaaaacagaatgaaaagtgcagaagatttattgggggtaagaagagctaatgcctatgaaagataaaggagaaaggagcagaagtacggagagaaaagacagctttcagactgcagtccagatctaactctgggacgcaagagagggaaggataattctgttgaaagagcatcagactgtgatgcggctgtaagagtgtctcaacgagcccagtggggagttccagccaaagattgcccaggagaagagtcgcactttgggcagaaatggacaggcccgagcaaccctgccatgttctgtcattggctgggggccacccaggaggcaacatggtctgacttgaatggtgtggatccgaggctgcagcctgtcagctgtctgcactccatgcaacaggtcctttgaatggcatgtgttcgtggctgccataaactgcagcctgccttttagccttacctcctttgctcttgctctctgaccccgtgttctggcaacactggcctgactacacgccgtatcacatacaaccaactgcccataccaaccccaaccctgacctttgctcactcagttctttctgcctggaatgccactccttcccagttatacccagcaaaatcctaatgtgctttcaaggcccaacttaaaaatcatcttctctggttgacctcaccatgtagaattaattgttccttgctcctatggtgctatgtgtatattagtacttcccagattggagtattcttagctgtttttttctcagatttttgcctcctctaaacctagcaaaacgtcagcacacagtaaatgttgactgagctgtttccctgctcctcgcaaagcaccttgaggttgcagaattccaactcccggaatggttggaagcacacagtacatggtcaataagtgtttgttgacttgtctgggacctagtattggtggggtgaggtgggcagaaggctgctgagggtgggtatttactgttgttggggctcaccagtctggggccacattggagttttaagactagagcatgtcttcccctgtttttatttttctccatgatttggaaagaccccagaggtgggtttttttttttttaagtaatcactttattgtctctggtcaacaaatgagaacttttatgggtcttccctttttcaaccacattttcatgagttgggattttgcatttcttcattacccattctccttatgggtaaaagaagagccattatgatacc

SEQ ID NO: 44887 - DNA, 5568 bp, Homo sapiens
tcccacctcctccctggggattggtggtcacagctcccactgttgctggctgcaggatgcttcacctttccttgagggtttctcttcatcttgctcacccttggaaacggtcctttcctcagtctctcctgttaccagtggagtgtgcatctgtttcctgctgggactgtgatcaatacagcaaccttttctgatttgcatctaaaacaaggatactcaagcagagagggtatcaacatttaaaaaaataaaacaagaataaatagtccctgagtgagccctgagagactctcttaggcgagagtctgggtgtgagctttgtgacttctctaggctacgcaagggcttttgtttgttcatgtcgatgtttttaactataatgcagataatagagggcaatagattagtgacttctgtacttactggagtgatttgagaaggaaaataagcatgtaaatcaagggaagccaggatcactcactctcctggtcccagtcagccctcgtttttgtttaatttgtgtatttcgaagcacacatatctctagggaagaaaatgaaatcaagaactcctcctggccaccggtttcctgaagcatgaaaaggaagcatttcataaatgctttgtaaagaagacaacaggaaggggtagtgtcactggctggcaagagctgctgttgtggtatttcacagacaagggaggtgacgtggcacatgggggctgaggtcccagccagaggccacacaggcacaggcctcagagcccaggcctccctctggcctgtagaccctcagccctactggacaggaggaaaaggcctaggggacattgcccccatttcacagagaggaggctgaagccagtgaagcagagagttgcagcttcagtggggagacactgttatgccccgcctgtcttattcatgcttcttttacctgtagggatttttttttacatggctacccttgagtgatagagccttcatcagcttagcttgtcctcttgcagcctacgccactctgtgccctttagccaaggaagcccagctgaggccccgcagcgtccctgcccagcagagctacaggaggcccgaggccccttcctgttcactcttgctctatagacgccacgctgcaaagcagatgtgcagggacaccacctgaagacccagcctgcagctcagccctacacactgtggatggtggagatcccagagggccaagagaagcttattgagacttctctgcactgcccctcccacagcaggaggttcatggcccatgcatttctgggagggttgacagggcccaggttgtggaatacctgtctgtgagccccatgtcctgtcttgtcccagctgcctgtagtttgacagagtatgctagaggtcagccattgctagggaggctgccactaaccacacagagaggaaggaaaattctcagccacagcacttagagctgagcctgacatggtcctcagcaagatgttgcaagttcctaatctgaacacagaggccagggagtaagcatcatctggagcccagagctgactgtcattacccacaaacataaacaccctgagtctggccttctccccaccctgccgaggttgtcagagcctcagcactggctctgccctgggtggcagcccctgggaagcccagctgccacctctctacaaatggccctgtagaagctgtgctcagtgatccacttcctggggggggctgggcccaccttgttgccattacaccccattacaaactgatgcaaccagctttcaacagacactgccaaggaagatacacattacaacagcatgctgcaatacctctgcctgtgcaagagactgacccacatccaaaaaatggacatcttcccaccccagtgtctcactccactgagctggaagtggcctttgtcaggaccctgtgaggtcttgagtggatctgcttttcccaagatattaaaccagtgactttaaatcctggctgcatattaccatcatctgggatattaaaaaatactgatgcctggatcttgctcccacccaaagagtctgactgaattgatggggttttcaaacattttttaagtgtttgttgaaggatgacatacatgcaaaaaaaaaaaaaaaagcacaaaccataagtgtaaagctcagtgaattttcacaaaatgaatttaccccgagtaaccagcatccaaatcatgaaacagaacatcaccagcaacccctggtaccccttccacttactacctggctccaaaggctaatgtccattctggcttctaatggtgtacagtcatttctcctgttttcaaactttatatgatgtaaatggaatcaggcagtatatatcctcttgttgtgtttgtgagatgattcatccaagttgttacttagagctgcagtttattcactcttcttgctatagagtattccactctatggatattcctcgatttatccattctactgtgatgcatttttggatattcgagttgttatttataattcggaactattctgactattgcaatgacatgctagtgtgtatttttggagtacatgtatatccattgctggggaagcatgggtatgagtatgttcagctttagtaccttatgccaaataatgttcccaggtggctgtacccatttacactccctccagcaatgtatgagagttctggttgcttcacatttttgccaaccatagatattttctatctttttcatgttagccattctggcaggtatgtagtggtatcacagtgtggtttgaatttgcatttccctgatgactaatacagctgagcaacctttcatatgtttgttagccatttagatcttctctttgcaaagtgcctgttggaatatttggacatgagtatttttaaaaagctccttaggtaactctactgtgtagccaaggtggaaaaccactgaactaaaaccacaaattagtatctgcgtctccctttcttcatgatttgcctttgaacttagagcattttggatctgagaggacctcgtggaactgggaaaagattatattcactccctactaagatgagcctgtcaggaagaagcaattggagctggcagttaagaatctttaggaatgtgacctctacttcagaagggtccagggagggcctgtggtgtccacagctgccacagacatttcctaaccacaaaaatggccccttggtggtctccccagagctccaggcagtcatggggaggaagcggagggccccatgccaggtacttcccagtttctaggccaacatgaatgggacacagctcatatggggttgtggttagactggggacagtggagcatatgttctggggacctgggtgtggccaagggaggcctcctgtctgtggcctttgtcccagattggaaatcagccagtggggctctcctacatgggtccaggcctggctagctcttgaattctgtgcgtttgcatgtgggtccttatgcatgcgtcctagagcagggtcccagggggccactcccccccccgaccccttactcctctaagctgggaaacacgtggcatgagagaacacactgtggcttctaatgacatcgtgtcttgattgcatccccattgcatcatctgggctcatctcatccccacctctggactgtaacatcatcccagggactgccggacactcatctgtgctcccccacagagagtataatgccatttggtaattcagtacagcctcttccaacttgagaaagaagatgcatttccttccctcagtcttgagctgtgcaggtgtcacgctgagctgccctgtgtgggctccatgttggcacacatcggttgcaaggggctctgtgtagtgagtctggagttggaccactggccaggcgctgggatgctagtgcctggactgagtgtgcacagaggcccctcaggcagagccacagtgggcgctgaacctcctggtgaagttcaccgcagtaactagagctcagtgggaggggctggcctatcagcacctgtcctgtgtgctttttgaaaagagcagggtctaccttctgtcaactgaagtcctgccagctgcatggcatgagatgagggacaaagtggcacgtgaacaaagttgacattttggaggctgttaggctcagagccaaccctgggctccatgtagtgccatgactcatggattcaggcccatcttggaaattgctctgggcgtagagctctcatttctgatagtccaagtgcagatattggggttcctctaattggcccaaatggtggcctgcaccaaccagcgaccagagtgctgtctgaatctagaataacaggaagaacacgcctccagcagtgtaggagagttccccatgcagtgtgcttcccattcttaccagcagttggtatcttctgtctttttcacactggccatctgagtctcataaggagactcctctccttccactgagcctgcatcccagcctctcccctttcttcagggacctctccccagcaattacgcccttccattctctcaaccagggaatcttcaaactcttcttctccactggctcctgctgtgctcctgtctccatcacctgtataatgcttcctgccatcctgccttccccgtggagtacagccatgctgtctgctgcttacagccaagattctggaaagaaatgtctcctttttcctcgtcatcaaccactcatttattcagcaagtgtttcttttacacttgcctgtgctgggcatggcagcaatgcagcagtgaacaaaaccatcagccctgctctcatgcagcttataatcaagtagagagacagacataaatgattaatagatgctcctgtaatggtggttgtgaggtgtgctgccacagcccagccacacacgccagttcccttctctgcacatgtacatgtctgctcatccttcccacctgaactcatgtgccacctcacttatgccccttcccaatgccgcacccacacaacagggtgtccctctgtgcccacagcagcccttgggtataactgttccccacagaggctgaaccccaagggcagagtccaggccacactcaccacggagacccctgcctggcacagagcccagcccagcagagatgctcagaagatgaatgaaagtccctgctgagattgatccaatctgtttgtgaacatctctggggtccaagaattcacggctttctttttctttagagagccttttgtttctttttgccattatatactatatttgggttagggcacaacaatgtgaatatacttaatactgaactctacacttgaaaatggttaagatggtaaagttttaagttatatgtattttgccacaattttttaaaatgcagagcataggtacaaagaaggaaaaaaagggggcaaggtccattttattgagaaataaagaacaaagggttcaattcagagaggattggattttaaaacgtaatttagattagggaaatgcaaatgaaaaccataataagtaagataccacttcacatctgttaggatggctat

SEQ ID NO: 44888 - DNA, 1826 bp, Homo sapiens
caactacagcctccttccccagctttgccacctggcttgggagccagggcaccaccagcttcactggcagggagagatgaagaaagaggccatagccacgcaagtgactgaagttcatgttcgtgcacaccaattagagagggacagcacgttcatttacctccaaatccagccacagacacatcgcccttttctcttggctctgaggcctccacagaagggttttttaaggttgcagccaggacctttatagcctagtcctgagaagattatctttttattgcaactttgattaatgattgatcaaaaactgatactagaaacactgaagaacaaatttgctgtagacattaggaaaggtctacatctggcaggcctggagacctgcccaccctctccccccacggtcaaaccagggcaaaggtacattggaagacccaacccctacacactcttacacgtgcactcgcacacacacactgaggggaaagaaatatttaattgtccttaaatcctcttggattaggctataaattgcaaataaatggagcaacagacagagcaaaagcacataaggtcctttaatagaatttctctatcttattctgtttctatgaatgcctgttacaaattagcagcttaaagggaaacctggagtgtgggaaagagcgacccttgtgtgaagtccacagccggggtttcctacagacctcaggtcccagagaacatctaagatgcctccaacaccagatggaggagggcaggagatgctgcacagagaagcagcacttcccgagcatctgtggcaggaagtgacttggagaggatgaggccgtgcctcaggtgtgctctagctgttctgatggtctctgaggccacgactgccatggtgaggtccacagcctgcatcagaatcaccaaagggcccaaacgtacggcctcagagcctggagagccaggaatcggcattgcaacaactccctgctcagtgggttctaccagtccagtacctgccctctgagggtgcccagggagcagggtgcttgctggctggaacactttttcctgcccctcagctcctctgtgatgccctgaggcacgggcactggaaagctggcagagctgcttctaaattgaaactggaaaatgaaactggaaatcacagtttcattttccagtttcactcgctccccctactgttggggtttcttttccacaaggagagtcccccagggagaaagaagcaggagtgggagtgggggagcatgttgggggaaggcagtgagggtgtcctgtctgcagcagggcatggaggggccccagcgctgcacttgcttcctttaagcctggcctgcttgctgtcagccccgggggtggtttcctctctaggaaaagctaatgtcatgcttatgctgaaaaactcttttcagaggtactttaggaggggcctggctctcgattaatctgggccatttcataccggctgtgctcacccaggcacaaacactgaaagcaacagctggcaaagccatcgcttggtagcagcttggaagacaccaccaaagaagctctcatggaagcggcagatttcctgaagcgactggaatgcggggaaggagggcagtcggggagagccgagaaccagcccccctgccaactccaccccattcctctcctcacctgaaatgtctcatccttagaacagctgccctaaccccctaatcccacacactcctttgtaggttaagacccctgaagttgcaccctctcgtaggagctatgtttttcagagatccatgtgattatttgcctaatgtctgcctccc

SEQ ID NO: 44889 - DNA, 1266 bp, Homo sapiens
gggccaggaacaggccctccggctgtgttgggggaggcctgggcaggggttggcagctgctgggtgtgaacggaagtcttggaggtccttgaaggtcctggggccgcctgcacagcagcccctgccctctccctgtccaggcctgcccaggactagcttgtagcagactcttcttgtagcctaggctcttgcctcttgcagtagtgagccattgtacaaaagacatccagcggagggaggcaggctggagaggaggacagccgaatcttttctcaaaggaaatgcagttgtggttttgagacgttcatatttcacatctgtggttggcgtttcccagggttctcagaggtgaatgcagggtcagccctgtgtcaccaaataaggctcacagtgaccttagcaacaagctttgctgcccattggctgtcactgctgccgcctgccaatgcggcctcctgaaggccagcactgatgctgagctgaaacttctgcatgtgccaaggtccagctgcctctgtcagaaatcaccgtccttggaagcagccacagataggtagagagctccggacaaaggtggacaaggtcagtgggaggactgtccaggtgtccatgtttcagagtccacctggccagcattccattctcacatagcaccaaaccagcaccttggtggcctggtcccagcttgccaggacaaccccccattccaccctgtcaaccttgaactctataatggtcatcatttcatagctctgctcattttagttccactgggttctcccttgtgcttggcacttgactaagctccttctacacattacatcttttacctctctcaacaaccctgtgagccaattagccccattttacaggtgcagaaactgacaccaaaggaagtcagtaatggcccaggtgactgcaccactagtaagtggggaagtcagaatttaaacccaatttaaacagacctagatcccatgctattaaccattgcactgtattgacagacactcaatgtccgtgcagctcagtgtcttcattctgtgacatggggatgacagtaccgtacctcacagggttggggtgagcattgtgtggagtgacttatgtccagaagcacacctttgcaccagtggccttggcacccccaaggcatgctccacaaacagcttgcacattcctttctcacagcgtgtgctgctgaaacattgaggtttgtggaccggacttctctgtagcccttgtatttagttttcacttcctctt

SEQ ID NO: 44890 - DNA, 2752 bp, Homo sapiens
ggcctgcaaccccttcctccactttcaaagccagcactggctggtcaggtttttcacaatgcgatctctctggttctgacccttctgcctcctccttcttcatttaagaacccttgtgattacactgggcccacaccaataatccagggtaatctctctatttgcaagtgagctggttagcaaccttaattccatctgcagttttaattcctctttgccatgtagcaacatattcataggctcatgcattaggacgtggacctctttattccactgtggaccaatactctgccttccacacctagcctctcttctgagttttccaagggccccccatcctcaggcatcctcaggcatagacagccggctgggccagaccacagtcaggatgttcccgccactatcagagaggtcctttctacctaagtcccctcccacctgcctgctcctctttcagctcggtctgtcctggattcctcttccttcatcctctgctcccagtcttaggtagagaagagctgagcaggaagtgccagggggtgtggagatggaggagggggaaggtaaggcctgaggcaccagggctctgggagcccagggagctgaggcctttcaatccagacaccctgcacttctctggctctggggcctctggggaccacacactcagctccagggctggaggggtggccagccaagtattggaacccttctgcttgtacatccctagctgcccttaacagccacagttcacctggcccttttcttgggtgatgacagactgtctgccttaatttattccctttcccctgtccctccctaggcctcaggctggaactttcaggagcttccacgggaggcaaggccccagccaggcctctgtccctgggctgcttggtgtggggatgggggatccagaaccccagcaggagggcagatggggagcacagggcaggaggggcaggacaaagcctttggccctcagggagggtgaccaactggccctggtttgcctgggactttcccagttttagcactgaaagtcccaaatcctgggaaactcctcagtcctaagcaaactggaacagttggtcagcctatctccaagccttttgcacctcctaatctactctagatcacctctgcagcctgcacagccgggcctttggactcctggatgctagagtgacctgggcgctgaggagggcccccgagccagtaccaggaaaggatagactcctgcttgcagcattcccagcagaggcatcgcctgtggacaccgcgtctgtgtctgtatatggcagagctcccagatatatgcacaagggagtgaaaaaatgtgtttgcaccccagtctctaaaaattcaacagcctggttacttctgggtggtatatcgtaggtggctttaatacgtgttatttgctcatctgtatttcttactctttgcacaattaaaccatgttccttttacttatgtacatttttaataaaagaaagttgttaatgactcagccttctatctccagtactgccgaaaagagacaagcggtcatgctgcatgtcatgcacacactggcccttgttctggggactttgaccttggctgctggttggtcatggcctgttttgcccagggctctactgcaggggcagggttggttattcctctgtgccctttttgcctctcagcctgcctgctcctctggaccccagagtctagcctggttcccccaggggagggactcagaaagtgctactatagagagatgctaactacatctctgctgagcagcaggagatgctctgaagtgccaatcctggctgaacactgtgagaatatggaagagataagctgcttgcccctggggagcttccagtctggttggcgagattgggtaccccgcagaccctgtggggactggcagacaggaagggacaggccctagagggtgaggctttgcctgtgagggctgtcactggtcagagaagggagggccccagggctccattgtacaagtcttaggatggccaaagaccaaaaatggggtcctcttcagtgacctgaggcaggccgcacaagcttgggggtagatggtctcctgtgcccagaactctggctgctcgccacctatgacagaagaatggtgatgaacactcaccaggctgttccaagtctcggaaagttggacaccccttcaggtcctcctccctgtcccaccccaccccacccctaccccatatgggaatgccaggctgtagccttcgctgtgacccatcccaactccagctcctctccccatcccaactccagctcctctccccatcccaacaagccaagcaggagcacttggaggggagccctgggtccccagcagaaacagccctccactgcctccacaatcaggtcatcagcccctgccccagtccactgttgccctagtgtggccgacatgacaggacttcttgtaattctggcctaatggttcccacatccccaaacaccaactccatgtccatatgcctcccttgttacacaaagtcagctttctccaagaaaccagagaagcacatgatccccgccacacctctccaggggcctccctcctgatctgagatcctcggtatatcccatggcctctctgagccaaggtgtagctgagttgtgtggggtttttgtttgtttgtttgtttaaccactgtgtaagaactcactacttgggccccaattctggacaaattccagattgaca

SEQ ID NO: 44891 - DNA, 1205 bp, Homo sapiens
agtgtgagccaccgcgctcggcccaaggggagcttctgacaagcagggcctgggataggggcctgtccaggcatccacatatagaatatttacccagcaggagtccccctgccactcacacagcatctccaagatcagggaccagtacttcctgagcttgacagagaatgaatgtgtcagactgacctctgcccattttgtagttttctcatcattttctcactcagtcttcccttttcaagggcccacactcttcccgagggctgggcctagtgagcggggtcacagtacatatggtttctgggactgagaaggtggaagatgtgtccatagagcttttgtttcctaagcaacgtattactgccatgattccattccctagatgatgctggtgatgcaagctggcttctcttggccagcctacctactgctgggtagtgtttatgccccatggccagacactgaagagggagacaggaaaagcacatatccacaccttccaccctcagacattcctgtaacttgagcttatctaagggggcattgtcatatgtcaggggttcccaaactacggtcttcagaaacactgtttaccctccatagaggttgtgtgcatcagcccaggcagaatcctgcttcatgaaggtgttttcctaatgcatgtgtgcatggacctgtctcatgctacactgcagggctggtattcagcaccaatagttattgttggctgctaaaatagcaaactactcaaaatggcaggtaaatagccccaagcccctatccccagtgtcctcccactactcaaacccctctccctcagatctgcccccagtccagtatctacctgcactgttcaatatggtaaccactgaccacatgtgactatttacatacagtttattaaatgcaattaaaagttcaattccttattgcactggccacatttcaagtgcttagctggcacatgtggctagtgccagtgcctactgtattgaacggtacagacagagcatttcatcactctagaaactggatggcaagtgctacccagcacagcagccgtgaggacctttcttgggctgctgactgttctgtctgtgactgtgtcatatcaactgactttttggagcagcatctgtgtgttagcaggacacatcacctatggcacatgcctcaaaacttaacactccttgggccccaggagc

SEQ ID NO: 44892 - DNA, 3306 bp, Homo sapiens
ttaaaaaccagaggatgtgtagggacacagtgacaaatatgaagtctaaggtcttactgttattatatcacttatggttaacagtaaagatttctgagtcagaccgttcaagttcaaatcttggcttcatcactttttgtgtgatcttatgatctacctctcagtgcctctgtttacttatctgaaaatgatgacattagtaagatctaacccacaggactactgcgaggattaaatgacacaatgtaaataacatacttagcaggtgccaggcacacagggagtgttcagtaagcattagctattattatgaatactatcattgctactaagtctatagggtctatgttgccccaagtgcaccagctataggcttcttgggccagagtgactggtgcaagattaactcgtttgtcctctgctaagccaggcacgtttctgcccagcagcatccacttctcagtcttctatttgttcgattggagccctgcagagtgctgtgtatgtttgtaagggtctcgcttagaggagagcagaactccagctctgcagatgctggaaagtcttgctgctggaaactggaagtgccttcaggtgggtgccctacctcaagaagggaagaaggcaggagtcatgcaagtgaggcccaggctgggccgtgcacactccctgcatgcaggacccactgggagaaacacctgcttgtcccgttatcacttccctttttgagctgcatctgaagctttggtccctccagaagtacatgggttaaaacagtggcaggaaaacccaaagagttacactcactttattaatccagatgagccccgggatttggttggaattaatctgcatctctagccagggtctcatgcgcatccgagtgatgggcatgttggctgtaaagagaacacagaggctccagtctggaatctgttgaacagtacctgggcagtgacctgccccacccgaggtcacttagttaccctcccctcacctcagccagctgctaggtactacactcagtgcggaggggagctgcgctggaataaaactgctctccaaattttttcagcatcttaggcaaaaatgcttttgccccttccttcagcccctcccagccagtctctggaggagacaggcatgcaagtgatggcttcaggattcatatgcaggaaaagagacaaaatgcacagataccctaatttcagaacttttcgctcaaaattcaaatcctttgggaagggagggacttcttttgcttgatgccaagaagaaattcccttgacttgagttgtaaccactagctagcaaagggctagccgtcaccctgaacagccccctcccgcccccctgaatccattctacgccttcctgacagccacagcgcccacaacgctaagaccaggacgctaacccttccggcccggtttcccctcctctggagaagtggcccaaggaacacctgtggcgcctcttcccgcagtctccgtaggtcacgattccctccagccacctgggcagtaagccagcccttgccaccagcacagggagcccaaaacctgtcgcctgggcgcggagctgggaccgccgaaagccgggagcactgggcgcccacgcgtgggctgacactcggtccccggcacggcgtgtggatgcgcgggacgaacatagcgggccacctacaggcccctggcggctgcgcgcacgcagatctgcgaaagctgccgggcgccggcagcctcgtccgggtgggcggtccacgccgcgtcccgccctccccgcgccgcggcccgcggctcgcagctcctccggcgccccccggagcccgcgcggaggcccgggcaacgccgcgcgccggcgagtctccagcctggagctttcgaccccccacttcctggtgccccgcgcgccttttattcgacgccgccggtgccccgcgcctcaaaggcgtactcacctctgctgcaggagcgattcggcggtcgcgcgcgagggtcccggcgacgcaggggctgcagtgagggcgcgcggagcgcgactccgagtggaagagggaagaaggcagaggttgccgggttcttaaggccgccgggcacggccggcgtggactgggcacggctccgggtggcctcggttcggcggggctcgggcgcacgtcttgcctcgactaaggagtggcgagctctgccagggcagcggcgccaccgagcaatccaaacacttagcgggattccccagccctggccggccccgcccccggacagccgcgcgggcgcccattggccggctgcgtgccgtcatttcggggaaatcaggctgttgtagagctagcggcgaaggggaagtacagggcggctgctccgccccaccctctccggccgggcgccaccgccccggggccaccgcgggcccgccccgagcgctcccaatccacccctgctccggcttgcccggaggagggctgcccgggacagcccagcgcccctggccccagcctgtcctctcactccgccttgtcccagccggctggctcctggggccatcttttcaccctcctggcggggcgggggcgggggtatatctcccgaacgcaggtgaggggatcgcccgggcacttgccgccctctccagtgggaacactgggccgaatctcccgactggcagcctggctcctcaagcttgccagtgggatatcaagaagggagggtttcagtcctagcactacccctgtttttaggggtgaccccctccctccaggtcactcacctgccctggggaagtgaagaaggcagaaagcctaccctgccccgtgtgctgtctggggctgctggaccaggggaaatcccaacttggccgctgctggcacagcccccaagggacgcaggacctctgtttttcaaccataaaataatagtagccctaccttgatggtttgctgtgatgggaagagattgtaaagcactatgctccactcgggcaacagacgctgagtagttttcaaggtcgccgttgcagggtctaatagtgaccaggatgacaccccaccccttttcggtctgcctccctgggactccccctggctggctttagggaacagaggaggagaaggggttcagagaagcccagacggctgagtgagggtaggggtgggctagctctgatccctcctagcactcttgcctcaggccgcctccagagcctccctgtggcccgcgtatgggagttccgcaatggaagcattgctgtcatctctgagtccccagggcttggcccagagaggttctgggcagcatggaggaatta

SEQ ID NO: 44893 - DNA, 8059 bp, Homo sapiens
ggattacaggcacccgccaccatgcccagctaatttttgtatttttggtggagatggagtttcaccacattggccaggctgttctccaactcctgacctcaggtgatccaccgcctcggcctcccaaagtgctgagattataggcatgagccacggcgcccgacctgaactaggttttcgactgggagacctgctacctgtggagcctgctacccagagagggggccacggtccccaaagcagacaaactccccagcatgccttccaggttccaggtccagaagtagtagggctctctgaaatgctcaaagccttcatctcgattttcacagaaacctgggaggcaggcagtcctaaactgtgaattgcagaacacaagccagaaataaaagcatccaaaagcttgaaggcagaatccaagggtcatcaccctgcctgcaaggagcctaactggagagaaagaaagtcccttaattcattcaacacatatgaatcacgcaggcctgctttttggtgaaccccaggtttggttctggagatacactggggcaccagaccagcccctcccctctcaaaggtttggcaaaatatgctgtatgacacagcagaataaacgttgcactgttataaaattcctaaatgcagaatgtggggctgaagctggctggaaaatcactagggggtcatgatagaatactgagccaaggaattgctccagtgctcagggctgttccggaaccccctgagagcggggcggggtgacagtgtgggctgccgctgatggccgctgcggagcttcatttcttataaacaccgccgttgggaggaaagagaactcagccccctgtcagtcccatggggccccgaggccgggggaggctcctgggccaggcccagcggccgcgacctggagcggggcttgatgggatcagcactctcctcccccgcgccaatgggtgctgcagaacggcccacgcccactgccgttcgcccggggcgcccctggcaggcttctcggtctttgtgggggctgcagcacctccacttcaccgtgatgtggagtccttcgcccccaggtgacccacgctccacagccccggccagaacttggtgggggacgcggggggggggtgtttgacggggagggggcacagtcctttcgggccaacttccacattcctgctccgcccaggcggggggtgagtcggggtgagcagccggctccaagctggccggcttcctggaaagggagggccagcaggagaactgcagatcctcccagccctggtggctgcccgcctcctccctacctattcctccccaccccacttccacccctacccccagcaagctggcagccccgcccctgccaggcggctcacctgcccgcgaccaaggcacttcctcctccttccccgcccagcctcttgctataggccatgggtttgcagccgggtcagcagctacaggctgtgtgacctcaggcaagttactaaacttctctgtgcccattatctcaccctgcgagatggagctagcaacaatcggggtgcagagctttccgcgaacacctctgcacttccctgctccccccccaccttccccttccgctcggtttcgcagggacataggggatgcacagaaaaggcgcccgcttgtaaattgccgcaggggaaggccgcgttgcgtcccttgccggggcactgccatccgttgcagcctgagacttgggatagacctgcggctctcccgttggaggcgcgggtggtgctgagcggctggacggatgctgcccgccggggttcggcgcgcaggcactcagatggctcccacctccgcctgggccttgcagctggcggtggggcggggcgcaggggccgggtaggggagggcttgggtccggccatccagtgggggtcagccccatcgccgggttccgcggggccgcgccgaaggggcggagcctgggtttcggtttcttgcaaacgcggcggcaacagggaaatcgaggagtttccgggaaccgaaccacgctgggagcgctgaggtctgcgcagcggcgggggccgggggacgggcgggcgtccagtgttaccggccagtggccagctggaagttccagcgggagccggggaaaaccggccccggaaaagccccacctgaatgcacctgcccaggcctctccggatggtgttcatgctgagggtgggggtgtgaaggatggacctgcctgcagggtggcctttagggaatgagggaggagttctacaagctaaggggtttgagggtgtgcacgcggggaaagaggggactgtgcgcaggcaggtgggatctgaggaattgggatatcccctcaaatgactgaggtccccagctgtcccctcactgtcacatcccatcttattgtccttatacgatgaggtctccttactgagatcatatccgtagtgtcctcttttgcttatttgttggaggatttccccgaacatgacttggagcccttgagagtgagccctgactgtctggtctagtctcctggatctagaacccaccaacctccacggggggcttgtgactgtttactaagtgagaaaaggagtagggtgagttcgaggcatctgtgaggtccatatgccttctgacctgctcccccacaggacccctagcccactcaggtcctgccatgtccccagttgaaggaagccccactctgcagaagatgccttggcttttgtgggaggggcttcccttgtagttccctgagaactgccttccagctgggatggctgggcagaaggcggactgtagtcatcacagaggaatgctggccgtggggtcagccacttccttccctccccagggcttggagctcaggccagggattatggtgggttggccctggatctgagacaagaaggctgggagtttgggtggcagagggagagtccagtaccctccctgatctctgcagcccacagcagtacctggggtcaaggtggacagtgtcactggcaagcccatgtttcctaaatgcatgcctttgagaccacaagtctatggtaaggatctctttccttatggccctgagaccatggctcttggaaagacataaatcagactaaatggagctccctcagcccagaagagctggggctggggcaggtatcagtggtggctattctggaagcagccagctagccagtggaaggagaggcagcaagacctccctagcatccctgtatgggccaacactgactttcaccagcccaggcttaggatcagggtggctggcctgggagagggccagggaaagtccaaatactgcaagagtggagcttgtgccatgagcgcctggcaaccctggtgactcaacctgggaatcccaactccaggggcagccctggaaatgaggctcaggacagtgaaggagtgccacggaggggcccaccaaccgtggcagcttttagtgaggccacagatcaaataggttgttgtcccttctttctcctgtggcccagggttagaaacagtgatgctggtcctctgcccggtccaaatagtatttttgatccagggaatccaactctaatcctagcccataaatttgacctggcagaggacctggtcctcagaatgtctgtgttgggctccatttgatgttacatcttagaaatggtagatgtagctcaagctaataaatacccacaggaatgtgtctttgtggtctggactcagcaaatgctgagttattggtatatttatggaaggaaagcagggcagagacaggagaacaggtgtccctgtgggtgctcggccctgttcactgttgtagcctcaggagccagcctcagctgagcagagagcaggtgccccatgaaccagtgtgacatggttggatggatggatggatggatggatggatggatggacgaacagacagatggatagataggaatatggatggtggattcagatggcctcagcagcatgcacattttccccacgatggtctttgcaataagacaatttccacagaaactggtgggtgccccagaaggaggggaggaagaatgtggcttctccaagcagcgctgtggttgtttctgccaggttctatctctccaaggggacctctgctccctttcccatagccctgttgacatgtgtggcccctcaaagtcctgcagagactgggagcctagtggcaagggccacccagacacagaacaggggaaaggagctgttaacattagctggctgttccattcctctcctggaaagtaggtccacaaagaaatttaggtaggacctcagccaggtgtgaaagattccagtttttttctctgcatgagtaagtccttgggaaagcatctgttgaccaattgactgattgactggcaagaggagcaaagggtcagcagagacccacctgcctggatggtgtgggagaaagcatgaccgccctccaccttgacaggtgacaaaccacagtgaatgtgtcaccacatcagatagccagcatgaattgctgcactgggagtgtttaaaggtctgggtgcataattgggagcaaaatggacaagggtatgctgggagctctaagccaggaggcctctggtggctagtcacctccaggaagcaaaagccgttatttcttccttgagaatccccgtgaatattggagagggcttctcacagccccatgggctggggcatgagtgtgttatgctttgcttttagtggaggaggtgactccagaaggctaaagatttagggacagctgatggtcctggaatgcttctcagccttgggcctacgctgggccctgtgaggggacttagaagtaagcaccgtggtctccactactaacctgcatgtgagctctccaaggacagaggatgctcagaaccacccccacacccccactctggcacccagcacattgctctcaggcagtaggcacttagtaagtgtgctctgattgcagtgccagacgtatgtcatacctcgagtaagaggcaaagaggcagagatgctgggagtatggagacggagcaggttatctcagtcattgttcacagatggctactctgaggaggggacagttcagcaaagcctcaaaggatgagtcaaaggttaataggctaatagtaggggagggcattccagaacgtgaaaacagcccaaggaaaggcttggcagctcagaagtgcagaacggatctcgcttttggtgtggcctggagtagctgccccagaagctgaggctggaccaaccagtaggggccacactctgaagagcctggatgctgtgctcaagagtggactctatcctggtagacagaggccgctcagggctggactgatgttgccttcctttctggagccaaggcccagaccagggtctatcatcaggtgtctgttgaattaaatgctagggcaggtcttgtgagggccactggtggcctgacctatgctttagaaaactttctgtggctgctacagaggattacgcctgtggcacaccagggcaagactagggtgagatagtttcctaaaggcacaacatttaaggaggtactcgctctcaggggccaaccctatacttgggtgagtctgacggtgagtagctccttaaaggtttcaccctaagcacctgccctgcctgcttgctccaccctatctggtcccttctgcacactggaggctgggaggtagactagaggcagctcaagtgatccaggcatattagggctgtggccacaggggatagagataggcctagttgagagcagaatcagatgacaggatttgccaggacatgagactggctggagcaggacccatcccccctccctgggtgccccattctgggagaagtgtaggagaccccccactctgcctaggagtctatatgtccacagccagggccaaaacaagatcttaggccttggcttctgtcctaggttatgagtctagggaaccaaggacactaagctaaagagagtagggcagcaggtgaaaaagccacaggctgccccaggaaggcccaggccactggagaccacagctagaacctacaaccatgtcccgagactgctcggccttgccctttggatgcttgggcacagcaggaaggaagtgataagggtgcctccactgctggatggggcgtgtctgtcagtccatcttccccccgctgtctgcccagcaagaccaggggccacccccaggtgctccccaggggattagcagcttggttccccagcccacacccctagaagctctgaccctatggcaacagcaccccctgctggctaatatggaaaaccaacccctttccctcctctagcaggcggaagtttaggggtcttggagaaagagaagggtgcaggcacaatgctgcgggaaagggtgggggcaggaattcaggatggactttggctatggcagataagcaggtgccacctggtaaacagagcacctatttcctgatcagtagcctttgaacagatgccagagaggccaggacacaagcaaaggcagaaatgggggtttctaaggtaactgctgagcgaggctggctctcgtgggagtccctgccttctcctacagcatcatggcccaggaaggcctgcatcctctgttgagcactgttctcctcaggtgggctcaggaactccctcagattccccctgagcaagccacctggccccacagaggatttggcctaggactgaaggctgagagctaggcctgagacagggtagtgccccaggcaccccaaaaagaggatttgtccctaaaattcctcccgcaactatccaaggctaggaatagaggcagggacacatcagcagaacaaaatctcagagcgtccctgagcagctgcctggctcttcagatgcaaacctggttagacacacacttctcctgagctctaggcccatggctcaggcacaaggaccacctcggagtgctggatgaggtgcccagtggacagaggagtgagaggacccagtgtatgccactttgacccttcagctgtgagccaggaagtccaggcagacacagccacaagcagggccatgccctgggcagccacttcccagaaaagtttctgccgcaaaacagagagagtggccttccctgccctgcatgaccctggcacctggagtcctcacctcagataagaagccagtagttctaggagtttacttacatcatggctcttgattacagtgaagaccggggccttgccctaccccagggaaacttctctcccgggccaatggtgtggatggctgctgttctcttatgactcagtgtgggcctggtgctcaggagagctgctccttcccatgccctggatgtgagctcagcagccatcttgattcaccaggacaatgtgagctccacacaccaccctcagaccctcacctaccgggctctcagggagagatgaggcctcccggagagtccacaaagagaaaaaagcggcttggctgccaaaactgcccacgcaccccagatgccatgctcagctagcagccctggtgccacacagcctgagagcaggtgggagccatagatgcaacaagctgtcatcaggcatgggagggctgggctgccatgctgaggctggtggggtgggaaaatcaacttgcagccaccaggaagtacaggagcagagtaaacaacagttgaggtcaaaagggtccaatttccttggacaagcaggcctcaagaaggcctctgagctgcactgccaactgtattgtattcttgtgtgtgttctgtgtgaacctaacacccccggcggccaagggaagccccttggccctcccttgggtggcagccaacactaggaccagagaagtggcagttgtgtcataaagttcccaagacacttctggaggaatcaatcttcttttttagtcttctctgctcattttttcttgtcattttcctgtatgtgtatcttttccctctctcttctagcccagaaatgcttattgaccactggtggcctattgggagtggattacttgacacattca

SEQ ID NO: 44894 - DNA, 2163 bp, Homo sapiens
ccactattgtttcagtaatttttatgtatgtttctctaggcccttaaatgtgatatccctccattaagtttgtttccaagaaagcaatattctcagttacttctgagacaggtaacttctctttcccttatttttaaagatatctattgctgggagcactgatcggaatggattacctctacattcttcatatttgcagactgcttttagttttagttcccagacttttggtcttaaagacgcctttacactaaaaaattacgggggacctcaaagagcgtgtacgtgagttataattatcaacatttactcaattagaaattaaaattggtatttctaagcgcaagaatacacatgcgcacattccattaaccgccactgcaatggcgtcatcacatgttatgtgatcactggaaattactacacgaacgttagagagagaatgagaatgaaaaggaaaatagttttgacacgaactgaccccgcttcctgggtctccaatccaccccaccactacccccattccaggagtcccaggatcaagctttgggaagcgccatccgtcacaggtcttggtctccccttccaaaagtcagtgcctctccaggctgcccatccccagcaaagatccggaagtccgctgcccctggcaacagcacccagcacctagccctctgcttcgccgtaccgcacccggaagtcggagctgcgcacgcaccgcgggactctgatttcccggcgtgccccaggagagcggcgtggacgcgtgcgggcctagaggcccacgtgatccgcagggcggccgaggcaggaagctgtgagtgcgcggttgcggggtcgcattgtggctacggctttgcgtccccggcgggcagccccaggctggtccccgcctccgctctccccaccggcggggaaagcagctggtgtgggaggaaaggctccatcccccgccccctctctcccgctgttggctggcaggatcttttggcagtcctgtggcctcgctccccgcccggatcctcctgaccctgagattcgcgggtctcacgtcccgtgcacgccttgcttcggcctcagttaagcctttgtgggctccaggtccctggtgagattagaaacgtttgcaaacatgtcccggatcgaaaagatgagcattctgggcgtgcggagttttggaatagaggacaaagataagcaaattatcactttcttcagcccccttacaattttggttggacccaatggggcgggaaagacggtaagtcttcagtagccgccttcagtttacaggtcgctacatctttcggagaataaaatgggaagttgagaactctccttaggagcagaagcgtccctagggctccacaggtgtaggcccttaaagtgccttagggtgtggcctgcaggctacagcgaccttaggagtttgcctgaagcagtctcggaaggatgtccggacctggcctggggacaaggtttacttaagaatcccacgataccgggagctgtcgccgctcactcagagttcagttcccactggatgccctttggtctgtattgatgtttttaacgctgtctccttgctttcaaagcatagcattcacttcccagtagttgtcccatacaagaattcctttaaaagttataaaatgatacatacatgactaaagagtttccaagtatgccaactgtccagacataatacatggaaaataaataaattcaaaatgtaactgatgtagtggggcttaacttggaaaacttctcttcttaaaactcagtcaaaaatttaacgttggtgcacgactgacttttttttttttttaaagccgtgggaatatttataaatttgaatggaaagaataaccaagaggcattctggtcaggaatagtggcttaagaaaaagcaagacgatgtcagtatagcagggagaagagtctaaaggaaggatttgtgaagagtgtagaaagagagaaggttgagaattgaatgccaaacttgtttacttttgtttttgtaaaaatgttatttgttgaatgcttgttatgtacttaggattgtactaaatactagcagaagggagagtagtactgtatagtgtttatgaggactggctgcctcaatacagctttttcgcttcatttattagttgtctgatt

SEQ ID NO: 44895 - DNA, 661 bp, Homo sapiens
tggttatgtgctggtaactaccacatttatatatttgaccctgacttctttccttaactctagacatatatgtctagctgtttgtttggatatttaatgggcatctcaaatttaacatgttcaaaacagaactcttgattccttgtacccacttcctgcctacattctcagctctgttactacctcagtaccccacccccgccagttttgtaaatgatgtcatcatccctacataagcaattcttacctacccttctaaaatatgtcagaatttgtctacttcattccatcggccactgtgttcctgttccaagccaccatcatattccctttcaactattagaatcgtctcctaacttattttcctgccctcattcttgaagctctctctttctcacagagtaatcagagttgtcttttaaatattcattcaagagggaatgagttgttcaaaatctgggaagaaaacatttcattcagtctagttgcagagtccctgagcatggttggtgtgttcaaggaatgacaaggaagaacaagggaaaatggtagaaaataaagttagaaagataggagagactagatcctgtaggtccttggattctagtcttatttaaataggaatctgtctattgggagattttgagcagggaaaggacat

SEQ ID NO: 44896 - DNA, 967 bp, Homo sapiens
aagctaaagcgccacaagagcaatgacagctcaaggctaggagactcggagtatggggcctggaataggggcaggcagccttcgctccgctgcctccctgcgcttgctccgaggcgcaaaggcctcaccaggtgtgcagcatccaaagagccccaccgtggccacccccagacgccccgctcagcaggaagggctgcgagccagagcgcatcctccagcacagcgcctttttgataagcggcgcaggccccacgggatgcagcagcgacgagggcggcagggcctgaccccaggtccctgtcgaggccggccggacccccgcggccccggggctgaccagccaggctctccaaccacctccaccgcacgaccgagcctgccccgccccacccaggccgcctgccggctccgcgcctccatggcaacggccgcgcccccgggccaggccgctaggatgagaagaaaccccagaagcgaagcgactctcctcaccggcatcttggccccctcccgtgcccggcggacgtccccgcccggggtgcagcccagcgacaccgggtgcgcagaaaggatggccagagactaccgaaacacctcgttgacgctctcgagactgcggcttctcgggcgagagcgcccagtgcgcagccgcattccgagctcgccccgccccaagcccagtctcaggctctctcggcccttgaattacgcctgcgcggaggctttccgagtccatctcctaggacgccagactgaggccgcgcgtgcgcaatgctgccattctgctgcgctagaaatgtggcacgcactgaggcggaggtaacctggcagcccggggttgggaggaggagctgctcttaggcccgtcttctggcccttgcaatacccggaatattaaaatcagtaatagcaattgtacattttgtctcatccgaagaattgaagaccttacctacctgacctcgct

SEQ ID NO: 44897 - DNA, 1594 bp, Homo sapiens
gggacatcaaccttctgaggacctggactggagcccaaataaacgcccactgggctgagtctggaatccctccagctcctggcgaatggctgccgcagacccgaccactgaggcctgacctgcctggagtcgcacccaggattccggcgtggggagcggggcagaggggagcgggggaggaaggaaaagcaggccaagggtcttcaggactcaagtctgcaactgtcctgggctcgtgtgggagactctctcggatcctggggcctccatcctccccggctgtacctatcccgcagcacctgtgcggctaggactcttccccaagtgtgcagaaagaaacaccctgggcgatagggtccggagtgtcccggaccctcacctgcggccccgcgggcgccactctatcttcgcacctgcccggagccaggcgggtctttgctccttcccgcgaaaggggttagccttgcctgcgccccaggaagcgaccccgaccagccgcccggcaaggcaggccgcccgacgctccgggaccccccgatagcgcggccgagagcccgcgccggggtcctcgagctggcccggtgtcgaggcccggccgtgaggcgctgacagcccgcttcgcgccccccgccagctgcagggcggcccctcctgcgccccgcgcctcccgcgcgcgccgtggcccagcggggccctcaccgagaagcgctccaggtcggtggccgccatggcgagctccgcaccgggcgggtgggctgggacgagcgcaggggcagcgacagggaccagccggctgcgggacgcgctccgcccgggcggctgcggctgaatggatccaatatggccacttcctggaaactccccttggcggcggcggcgggagaagccgcggagccgcccctgcccccgcccgcgggaccggcctccccgcccggcccggccacgagcgcagccggagccccgccgcttggacggccgggggtctccgcggcgaggcgggaggtgccagctgcggggactgctgggacttgtagtccgcgcgttgggggaccgggacggcagtgtcggggggctcggggctggtgcccggcgggcctctgcgtgtcccctggagcctggggccgagcctaggtgagagtctcctgggtccgcgcgctggaaagcctttcccgtaagggggaagtggggcacggcgtgcgccctagagatctcccccaccaagccgtctccacccgctggagcctgcaaatgtgctgggaccaccaaccagagtgtggacaagctgcgggagacccgtcggatccgggagaggccgcggcagcctagtctgcgggtgtcttgggccccacctgatgctccggccggagctaaggcgggaaccccggcgggacccgcgcgtccggccaggcggccttcccgggcaagggaccagccttcggctccttgtgcaaccaacgagcaggatgcgcagtttaggctgggattcctgcaatagaaaagcggagctcgacggtcaaggcgtcagattgcaagtgtccatcaccctgcctgtcccaagggcttgggacaacgtcttaatggttccaccattgtg

SEQ ID NO: 44898 - DNA, 880 bp, Homo sapiens
actgtgccactgcactccggcctggcaacagagcgagactccgtctcaaaaaaaccacaaacaaaaaacacctcatacctgagaaggcaagggactgaaagggatgattaaagatgggtagcaaagggcaccaactgctggagattcatgaagccaggacacagctttccaagtctccgtggaccaggtctgtggctccctacttagcaaccaagcaatagtctgagcaatcagagaagcagcagcctgaaaaatgaactgcagagtcaaaaactcagtctacagcagaaacacgtgagctgacactttcactcagatttagaaataaagttcttttgaccttagagagaagtgggcttaacaagctgcaggcatgagagaggtcccctttgcttcccctgggctggaagcaagaacaaagcacgatttgttccggaagttgaccgcaaaagcttgatatctgggcaaagtccctttacagccactgctgggcagcccatccccctcaagtccctggagctcctgcctcctgggaccggaggaactcttctttacagatgagatgtattggtgagacaccagggggcagaggtggcaggctgcgttggataaacgcaatggaaggagctgatttgcactgccatggtaggggagaagacatttacaaacattaagcatccgctacagctcttggtggggcctaggcatggggttcagagggtagtgtggattggaataaggaatagaacagaacagaatacagaccaggcgtgatggctcacgcctataatcccagcactttgggaggccgaggtgggcagatcacctgaggtcaggagtttgagaccagcctgaacaacatggtgaaaccctgtctcta

SEQ ID NO: 44899 - DNA, 1235 bp, Homo sapiens
ccatgcaacccgctttctcaccctgggagactacgcaaggcttttttgtttttttttttttgtttttttgatacttatgttcgaaatcaaaaagtgcactgatcgaatccgtattaggaggatatgatttaatcagtgtaccgtttaaatccccccacacccctccccccgactgccctctctcccacttctcattggccagcaactttccaacaaaggcccagtggcaaagacagccagcctttccctgcctggctggtcagtttctttctgaaagaagcaaaaggctcagctccagctttcgggcctaactgctcagcagggcaagtcaaagtccctgtggctggcccagagggcctggtaagctggagaagctgcgaatggcgaagcgtaggtaccagctttcaccattaggacagcgccctctgctggcagtatcctgaagggtcagttcaccgggcttctggtccccacaaagtcttgaagtctgaggtgctgataacggaacaaatgtggtgagctcattcttgccctctggagaaataacgatatggaagggagaaaactggggcaagaagaccgagggaagatagcaggtccattgcaggaggtgtggccttatttttgggattcttctgatctggcaaggacgagcacaaaagcctcatatttatttccccacggaaaaacccagcgcacaaccaacgtccagtttaatgggaagatggaagatgcccctactcctacccctgtgctccccacgcccagccggactggggaagctttatttgaaatacacaattcccattggctgaatggacatgttagctgtgtttctttttttcttttttctcttttttttttttttttttttttgtttttgagacaggggtctcactctgtcacccaggctgaagtggtggagtgtattggcgcggtctcggctgactgcaaccttcacctcccagactcaagtgatcctcccacctcagcctcccaagtagctgtgtttctaagaataccgcaacggaataatgcagtagggtgcatacagggcaaaacgcagaaattagtagcttccatccagaacatgtctctgggtgtgtttactaggctaaagaccttggagcagaggccctgcccactgtgttcaaaggggcaaagcaaagcataatgttagaacccgcaaaggcctcagcaggagccccatatgttttttataaaaaggcataatg

SEQ ID NO: 44900 - DNA, 2602 bp, Homo sapiens
gcaggcattttgccaagcctctccagagcagagggagcaacctagactccccgctagaaagacaccagattggagtcctgggagggggagttggggtgggcatttgatgtatacttgtcacctgaatgaaggagccagagaggaaggagacgaagatgagattggccttcaaagctaggggtctggcaggtggaggcaccagtctgaaaggaggagctggggctgaggaattgtcaagggggccagtgctccttcagtctgggcttcatggtgtctgtgacaagtcaggcagcagttgggatgtggctctggagttcagcaggggagggtagaccaggcaagacccaggtttttagttagaggttactggggaaatagctgaagacagtttccggtggataaaatcacaccaaggcaatgggaacagatccaagtaaggcgaccgaggaggcacaggagaacggacagcctcaaatacaacgaatgatcaggatttacatcatacctccctcaaggccacctcacatctgacctctctgtggaggggctatccaggccgcccctcccagcgggtcttccctcagtactgggctcactgtgtaggcgctgtctccctgtcagactgagttcctgggtactggaccacgtctcaaaacccagtacccgcagctgggtctggctaggcggacgttctgggaagttcaccggctctccctgtccccagcgtcccccgttctcccagcctgtccgcgctgacagcgcaccccacgcagcatccacgctccgagtgtgcgactggtttacgggctcatcggtcgctgcaccccagatgcagagtctctggagacccgagctccgtgccatgcacaggaaatgcaggaagctggcgacacccggggagaggcggccgcgggcgtggacagacccggttacctggggttcaatctctgggagccgaggcacgggagggagagaggcgcaggccccggcggccgcagggggcggcagagacacgcggagcggctcgacagcagatggccgcagccccgcgcagttctgggcctttcccgttgggttcaccgtcggggaaggatcgcgcgcaggggacagcgcgagcccgggagggaaggacccggcttctccagatgcttggcgacaaagggcaggagcggagggtggcggagtgagaccgcgctgcccgccggcgccacacgcggcgcgcccagccgcgcccctgagccgcgccgccagcttagagtgggccgcctctccgccctgcagctctgcagctgggagaggcgcgctggggtccgactccactggcgcaacctgacgcggcgccgagccagacacgtcccggccgaacgatgcccgggctgccccgcgaccaccgcctcgccgcccgctcttcacccccgtccgcccgcagccccgccggcctcccgggggaagcggacccagccgcccgcttcccgctcccccgcccccgccgcgtacctgaggctcccgccgagacgcgctcctgggccgtcgcagccgcgcggtgacatcagagccccgggctctgactccgaccccacctccaggctccggccgcggcctcaggggaggcgccacgtccggccgcgggggcgggagccgcagcctcttggtagcgtccgcgcgccggcccagtcccaggtctgagggtggacagtgcgttcccgcgcgggccacaggcctcttgccccaggccggagaaacctgagcgaggtggtgggagggcgactacggcgaccgcccaccggcctccagcgcgtccgtgatgctcgggggccgggtccctcggggcctgacacctccctcggtggggaggtccagggcgggcccttaggcgcctgacggctacccgctttcccccccaagcccggccaagaaaacagagctgccagggcctcgtgcctcccacctgtcccgctgagtaactcggcccttgatcaactctacccccagacccccatttccaaaactcttccagctctttgactcccaccatgggctcttgtctcctgttccctgtcccatttctttccatttctcccactacccagcatggtctgggccctccagcctgctaccggggtgggggagaggggggcggagcacggggaagcccctggacttgtgtgcaccttagctgtcctgagtgtgtccttagggagctggacatatgcatacccactaaggctggacactggcgctcgaggccctcaccttccaggatctccattttccaaagaacgctctgcctgcacctgccactgagctctccttgctgtgtcctcaggctcccctgccccgacttcccaaactctgtcctatgaataccactctgccaagaaatgctccgttcctgagaggggctggggaccctttgatgagcctctccggctctcaggtctctgcctttgtcctccgctgccctcccgctcccacaggatcaacagggctgggctcaggggctgtgtcctcccatggtagtatccctggcaaataaaggtttattggtgttaataaccaggactctgaactctggccaagagtcaaggttgccacttcctag

SEQ ID NO: 44901 - DNA, 4878 bp, Homo sapiens
gtagcacatgcatgtagttccagctactccagggagctgaggcgggaggatcacctgagcccaggaggttgaggctgcagttagacatgattgtgccactgcattccatcctgagtgacagagtgagaccctgtctcaaaaaaacaaaacaaaaaaaaacctctttatatattaaggtgattaacactttttcctatgtgtggcaaatatttttccaagtttgtgtcctttgattttgtgtgtggtttaacagtggatctgtagttcataggtgaagcaacagatgtggttttgttttttttttttttgagatggagtcttgctctgtcgcccaggctggagtgcagtggcgcaatcttggctcactgcaagctccgcctcccgggtccacgccattctcctgggactacaggcgcctgccaccacgcccggcttattttttgtatttttagtagagatggggtttcaccatgttagccaggacggtctcaaatctcctgacctcgtgatccgccggcctcggcctcccaaagtgctaggattacaggtgtgagcccccacacccagcccagatatctttcttttaggcagcagctacatagctgggctacatagctgtctcaataattcagagatggtaatgtactggttaaagtatattagaggtcagaaacctttcaacaaaatcatgttgtttatttttagaaattcaacaaagcgtgaattattgcttatacacaaatgtctacctaaactgtaaatgttcttctggggtaagtttgtttgctttccgattatgcactgaattcaccacagttgtctaaagatagggctttataggaaagtagaaagtgcacaagaaggaagtgcagggagaatgaagattgccttcgccggtggggacacctgacaggcagggcctcttggtgaggctgggtgagggctgactgttccagagattgaaccagattccctttcagatcagcacttcctggaaaggagtgctgggctgtcacatccccattaagtacacatatgtcaccttttccctgcagacattgggtgacacccagcctctgtttgctttggtcagaatgacttaacttttctactccagcctggcccccagccccaggcctgaaaccattccatccttgtggtcttcattcagatgttactcacacatccttggacaaaagaggattcatgaaaaagatggatacaggcttcttcttctctgccaacttcagtgggccccggacagataggtgtgggcaaataagcttttccactttgctcttctggtcccctaaggttcattttggttttcaagaaaagaaactatctcaggctctgaactcggccccaaaagcattgcttagagaaggcaacagcctcctcaggcccaggaatggccagactgtctctcttgtgtccagatcataaaatgggatgagatagtctctaaaaagcccctctcctaaaactgtcattctgtttgagctaaacctcccagatttctgcttgctgaggagtcacccagaatattcaatggaagaaaaatccaatttgtgagctctggaccccaggctgcacacagaagctgcgtgatggacttggtacagaattaggtcacagcatgctatgtgcatgtggatgaattttggctggtggctcaggagactgagaatgcatgccctaaacattcacctagaaaactttcctgattttaactgtggtgtatctcgtcagttactcacatagaggacactttgttctaaaacccgggggtatgcccagcattcatcacagtctgggcactgtgtttgtggtcacatttacccctggcagggtccttaggtcctagttagcagctttttctacttcaagggaagcagcaagaaaagtaaaagacaaaacaaaaaacaacatagcaagttacttttgactttcctagcaaatcacctagcaagatgaaaggggaatgtgtctcttaactggatgacaccaaatgaattatggggcaaagggcaactgacagcaactgcctaggagtggcagagacagatttatagacaggctcattgcccacccttgatttctcaaaatgaaacagggagagaaaggtgttcttcaatttggtgtatcccagagatagaaaatcagtgaagtaggaaagagtgtgagtttcaaagtatggtgacttcagtttgaataccagtagctctatgaacctggagatgtccccaccttcctgagcctccatttcctcatgtgtaaaacaaggatactacatacctgccagataaagattaaaggagatttgatcacatagagtagtgccaggctcacagtgggccaccaataagtgatgttagttatcattattcctcacttgagtttctcctgagaaatacaatctcaactaaaccccagtcccaattttctctctaaggactggtttatccacctggggtctcccataggtgttgctcatgctgctggtagtttctctcctaagcttcactcaccattccggcaaacagggctgtaaacactttgttcatattgtgtaagtcttggggagacagaactccccctcctgctttgaaagccagcccagtcactgtacaggcctgagacctggacttaatcaatttgatgcttcttccagaagctgggactcttacgtgagtaaaagagagacactgggacaggtgagaaatgatcacgagtcaggaggcgcaaggacagtagcaatcccggcctgtcccctgctcttgctgcgcagcctcctttgttcttgtttattttcacagcctggttctccagccttctagtcaattctgtgaaccactaggtctcctcccaatacattccttttttgaatgagtcaggcagagctgcttgctattgtttgaaacgaagaagtttctaatgtggagccaagacacctttttcatactgccaggcaagaggaaaatccagcctgttgagatttgggtgttgagagctgccctttccctgggaaaagcaactactagcaaagagggcaagagagatttccatagctgccccagggttcaggggaggcagtgtctctgccctttgatgttgctggaaatcctctaacaacgcttacacaatctcaaaactagcaactcaggaaacaggataaagcagtgcaagagaaatacaaggcaggcaagttcctggttcaaagtcataaacatttgccataaaaatgagaacaagatttcccttgataaacaaaacaaaggcaagaaaatgtggagattggttgctttttcctcttgctgtactaaggagggttgaccttgattctaccttttctttgctcgacagcataggcaaaaagactaagctgaagtcaggccagggaggagacataggcgtccatcccatagttaccccaacaggggactgggtgtgtcctgaagtttccttttttcttcctttccccactagcaaatgtccctgataagaacccatcatgatgctgagttacatgacccctgagccaagtatcacctcatcagtgaagccttctttgatatccccaggtagagttcgttgttcccagccctacataatactgcattggagagtatgtggtcatttagttgtctgtctgcctcactagacctatagtgagtgctttgatggaaaggactatgcctggcagtaccaggctcagaagtaatctcagagtttgttgaataaaatgaatgtgggagacctgacttcatgtgaacagctgtgtcattcctctattctgtgagttcacagttgatagcaacatgccaagaatggccttggcctccaggccccgtatgtgtgttggtggggggtatgggagtgggagagtccatgcaaacagcatttaaggcaccaaatggccctcctagggaagtgattaaattgaataaaaggacttatttaactagcaagcaattattgagtgttcatgtaccagttggcccatacttaaggtaagaggcagtgaacacatgtcctaggagccagaaaggaaatcagcagtactccttccaccaagagccattgctgacagcccctctctgccctggcatcagccagggcctgatggctctgtccatgagcagactcattgtcagccctcacttggggaactgacttttttgtttaacttttttggggctttctggcaaaaaccagaaagcctgctagacaaattctaagagctgtaacactgggaaccaacttttttttttttttttgagacagagtcttgccccgttgcccagcctggagtgcagtggcgaaatctcagctcactgcaacctccgcttactggattcaagtgattctcctgcctcaggcttccaagtggctgggattacaggcatgagtcaccatgcccggctaattttttgtacttttggtagagacaaggtttcaccatgttggtcccaaactcctgacctcaagtgatccaccctccttgaaccaacttctaaaaaaacattagaccctggggccagtcatttccttcaagtcaccacacttcctatatcactctctcctcttggtggttttgacaaaaagatgtgacttgccataccctaagaagctgctttcttttcagagcagattgctttggtcactcacttgggcacagcaatgagaggtctagggaggtgctgccatgaatggaagcaaggactttcaagagagttcatttggaccccattcttttctttttttttttttttggcagagtttcactcttgtcgcccaggttggagtacagtggcgcaatctcagctcactgcaacatttgcctcccgggttcaagtgattcttccgcctcagctt

SEQ ID NO: 44902 - DNA, 2906 bp, Homo sapiens
gcatggtggttcacgcctgtaatcccagctattttgggggccgaggtgggaggatcgcttgaacctgggaggtcatgtctgcagtgagtcaaaatcatgccactgcactccagcctgggtgacaaagtgagaccctgcctcaataaatacataaataaatctaatgcccttgtgctggccaacaaggtctggtatcatcaggtctgtgtgctccttcaacctctcccactccacttgccattccacccattccttctcccccctgacatgccagccacatccagctctttctgttcctagaacacaaggttgttctcctctcaggccttagcctagaggttcctgaatatgactgctttttttttaattgtctgtgtccccacactgtaacaaaagctccatgtgagcaagtatcatgtctatcttattttccatcagaccatctacaagggtacctgacatgtagtgtgtgcccaataaatattgaataaattaaatcatagtacagaagcctcagagtttcaagggagaggtgaaacaatgtaaaatgaaaaaaatattgaaccattaagcaaattccatcagggaatataaaaactctattgatgttagaatcaatatttcccttggaccaagtaggtttcaatgtcaaaaattctattttatcaatgtcaatatcctggttgtgatattatgctatagttttgcaagactgaaggaactggataagagatacacaggatctctctattatttcttatttcatgtaaatttatagttatctgttttagcatattatttggtatctaaatttactaaattatttatattacttagtatgttattttaatatctctgctaaaataaaaagtttaaacaattctaatcaaaggtaagatcatttagtattcacccagcctgcttttgcagtgccaccccaaaatgtactcctctatagaatgttccgcagaaacgaatgctcactgatggaacttagggtcatagaggaagcctccatagctggtagctgatatccttctctgggagctaaaaacatcagactgttcttaaccacacacagcgcctggcccatagtcagtgttcaataaatatttattcaatgagctaattatttgagaaagccaaaatgacatccaggcacaggttgtgaactcttataacactgactgttattccagcatgggaagataccagcatcaaagacaggtctataaatgactgtgtactgttcacaaagcccctattactcttaaaggagtaagattcccaaaatgtacagttgacacttatccacttatgtctagttactcaattctttgatacacaaaaatttttaaaaataaaattctttgatacaaattgcattacatactaaggtaggacaaggaaatactctggtaggccatgttataaaatcctgctctttaaatagatactgaaatagtcctggtcttattaacaagccctttccaaaaatcgactagtaaatgtgtggtttgggaaggacaactgtatcaggaagtagctacccacatgaagaggccctatttgacttctcaatgatggtaaaggatgaagtgcctgcatctcctggttgtgtttatattttgtttctatttagagaacagttaatgggttaagcagtatattgtctattgttatccatttagctaatctacatacctaaaatatttttgggtcttacatcctctaaaagaacatcttaaaatttttaattcacttcatttattactttataagttacaatccttacaaagttaaacattaaaattgactacataaaaattttttgttttttaaatttttatttttcattaaaattgactacataaaattttatataaaccaagttcttctgtctgaacatttttcattcccttctaccccatgaaagagcaattttttttcccacagactgtctaaactgcactctaaaccaagtccagtagctgctgcccttgaagctgattagcaaaacacgaagtattcaacataacacgggagctgatttaaactgataaagggcaggaaattcagagctgaaggtaaaaccagctcctgacgtactccattgtttcttggcatactaaggcactcatcacattaagtgacctcatatctcatctggactaaataccaaagctgaatgcatctatttaaggcagatgtagcttcatccttaaatttccagatttaaatcactgttgtcctttctcatttgttttctagagtggcagcttttataagagtaactaaagaaaataggtttcatatgggagagagagttgagtgattagtatacccttctcaatagtgtgtaagagaaactttgaagtttaaatttaaaagatctatcagccttgacacattacaggaatattaacactgtcctatgagtgagactagatttacaaataaagtctacgaaaaaaaattaaatgccaagctatcattactcacctgtagcatcaaaacactatgcaaaaaaagtttaggtaagtacattttagaacttacctgtaagaatgcccaaaaatttttctgcccctgaattttggcattgaccctaatacttaacttctatcaaaattatcccttcattttcttttccaactcccctgctttcttctttttaaaatcttcagatttcagaccacattcacactcaagcacagaactaggtcatgcaaaaaataaatggactttcactccttgcccaggctggagtgcaatgacaccatctcagctcactgcaacctccacctcccaggttcaagtgattctcctgcctcagcctcccaagtagctgagattacgggcacacgccaccacgcctggctaattttttgaatttttagtagaga

SEQ ID NO: 44903 - DNA, 2354 bp, Homo sapiens
gagaccaggctagacattatggtttaaaaaaatgaggcaaaggagcaccatgaaaagctgaaatgaggggatattcagcgccaccccgaaggagactatgctggaagagtcagcctacactcatagtgcaagatacgaagccagtttgtgcagtacctacatgagaaaactaaggtatgtctgcaaaatacaagttgactgcctgccgagcctccgtggtccgtaagtagtgttataaaacacagccaactgttgaatgagagcttagtcctagataaaatatggccagcaattccattaacaaaacactgacaagacacctcagggcgagctgtacattgacaacagcatcgtcaagcagaatgcacttcagggaaaacataataaggcctctcacccgactttccttgcttctcacgtggggagaagaaagaactggggcatcgtgattccccccaccccacgcaaaccatctggggaggacgctggctgctgtcgaggcggcctcagcattcatcaattgacgattatttgattatttttgtggctgaaactgacgaaacgtttgtattatctcttgggaacgttaacagcctgccaggggactctaaaacagagtccaagagaagccttcgatgtgtgtccctgattttggtgctggggtcgctcatggcctgaaaataacgaagccccctttgagctactggccaaggccaaatgaaacctcgtgctcctctgctgtggggcggcccggcctcggggctcagaggcgctctgtctacagctgggaagactcgcaggccccaagctcctggccagcgctgccccggaggtcggcaggccccttcctcgtcacctttttgttccctcccccgcctcccgcattcggccgcttcctgactgggattccacagaaaagccgagggctgaggagaagtgtgagcgcctccgcctgtccactgtcccccaaagtcagttcaatccccgacgtcctccgctaggctccaccccaccggcccgggcagggcctccaaggcacctcccacctacgggtcacccagtcagcccacttctttctgggacaaaggcgtcatcccttagagacagtaggaaaatggtatctcccggaagttacctcacgacctccaagagcggcttccaaccttgccggaaatgacgaacgagtcaaccggatcggtgactgtggagggcgagctgagccctgtgcgtgagtggggtctggttgtgcagtgttcgtggaccctgggaggctaggggcgccccgctgggctgggaaaggataaggagtgcaggggcaggagtctggggttggggatggacccccgcggggactgcggcgcttcgcgaaagcgagccaagcgcctgtccaccctcggtcctgcagggccgccgccacaatgggccgcgagtttgggaatctgacgcggatgcggcatgtgatcagctacagcttgtcaccgttcgagcagcgcgcctatccgcacgtcttcactaaaggaatccccaatgttctgcgccgcattcgggagtctttctttcgcgtggtgccgcgtgagtgccttgggcccgcgggagcgggaggctggaccccagcagcagcagcagtcactgcgcctcccctctgagcgctggcggccgggcaggcgctctgtaacttgccgtacacacctttctcattgaatattcctgaccgcccttaagctggtcatattatcctccccatcttacacggggaaaactgagctacagaactgaaatgactggcccaaggtcactcgggtgattccagcatgttcctctgaggtcacctttatttagttcttaccagtggtgaaatgctttgtgttaaacgtgcagcagatagtgatgatagttgcatggccttggatatgctaagaactactgaagtgtatgctttaaagaagacaagaggactgagacctttttttttcttctatatgtcttatatgtgtgctctctgtttactctcttaatttttaaagagtttgtagtgttttatcttatctacacatgggggactgaagagttcgagagatccaagaggaagaatccagctgcctatgaaaatgacaaatgagcaacgcatccggatgacggttccctgtctctgaaagacctttctctggaagaggagtctgcattgtagtgtctcaaagacacaataaacttcctatggtctgcactgttgtgatattacatttttgtgagtagaatcctgtgtgaccactaatattcaagttcatgaagcgcccctcctcagcatgagtcttgaagttttgcctggtctcgggttttggtgaaagagcagggct

SEQ ID NO: 44904 - DNA, 6105 bp, Homo sapiens
gaaagacagctgctgtgggcttcagtgctggtaacccatctggagcctccagtcctgggtatggatcccttacctgctactctggcacaaccatttgctccatttgacctttctttttccaaatgctcctgcccccacaagcgtttttatctatgggctgcagagtctgatgaaaggaatgcccttgctcttttagtttgcaggcagtcctcaaaatgcaggcctaaggtaggcccaaaagtctatgccagttccagctagcaaaaaagcaaatacaccttgaccttttgttgaaattttacctggtaaagtttttccatttcagagtctttcatcttttattaggcacctcctgcttagggacagcaaaaagtttccaattactgccaactcctagtgatcgacctggaatgtgtttcaaacagctgctcatgtagctataccctctttctcccatttcatcctaagcatttgcctcagaagcataaaatctcttgagagttgtatccagagttaccaagctctcagctatcaaatctgcttcagtctcattttcttcttgtaaattagtcatttgaacccccaaactgacagaataggagactaaagcccaaaaaggggaagggctggcctatgggcagttgcactctgtagaccccaggctactgcttaccagccaagcattctaccttcttacggctgcaactgttaaaggctacttaggcctttctattggatgaaggagcatgcagttacgtgtatattcactgagcaaaatacttgattgtagaatccatgaaatttttttttttttaatttcaagaagaggccttcacagtctctcaagtatgggatggctgtggacaaatactgccaattcagctaactgctgcctggatgttgctttgagtttgatttttgctccatacttaactaaaacaactagcattcacgtagacatgttaaaatactttccccttccccaacagtggttccttccacagacagtgactaatggttttttcttttggggagagggtggcatacaacatagaggcttgaaccaaaggcctctgcaatgttgtcacactcatgaggatgaatggtcctttccgcctacacacagaggggcaagggcttcaagctctttctttccttgactgtgttatcagctttacaaattaacaccatgctagtttgatcctgctagaagtacaggaaggcagaaatggaggattaggagaattactcatcttttggatgaacagtttccaaatcccatttggcacatcactctagactggtaaaggggaggctgacactgaggccacagacccaactggctctaggacatcacgttgttcagtcctttgcttatctaatcatttgtgttcttacccagtgctcactaggtcacccacatagccacttcccctcccagcaaaagttcccagtttaggcacctgtctgggatcatccagtatccaagcttaggggtgaagggagggagcagagaactagtctcaactggttcgttggtatataggtctcttctcaatgttcctaaagtgcatgcagtggcatccccctcaaggcctggctccatgattctgagaggactagaatcaggacagtcagatctgtggtcacatcctgcccaattccagctctgaggtccatcaaaccatctgcttctcccttggcaagaagctccctctgtctgactggcagcagggtcagtggccatccttttctaccttcagctgttgtgcatctcctccacgttttcctggagtaaaggaacaagcaggttcttatccaaatacccaacctgtgaagatgagacggcccttgggaagaggtattagccaagttttcagtatgatgcccggcagaaagaatttgttgtctttgtcttaagcttattatcctcccaggtcataggaagatctaaagtccaatcagtctccttactcagaattcacagctttcccctcaaacttaaaatgcccatgtcatttcacgagtacccataactacccatcgtttagatacatgtcctcccttggtctagaaatctgcagcagttcctacttaaactgatggatgctttgggctttggaggtatctcatccctatgcctgttgccctgaagctgccggaaggaaaggccccactcaactactgggaagaaagcccataattcaaggcttttaatacagtcactacacaagctctccctctgatttaggagatcttgttacctcctcatctacatgtgcttaaaaacaaaaagaaacctataattattcaattcacctgtggtccaaataagtctcacatccagccattcccctgagagggcaggaggccagactttgaactttccacagctgggtcttcattttactagtgagataaagaggtgcagattagggtgacagtccatctaagcaagtggacgatctggggaactgtaggccttgctgaagcatcctcccacagaaaggagataagggccttatccaattggctgtacacaatagatcagtgcttctttcctagacaaggctgaaaggggccaacattatttctgaagacttcattattggaattctatgggagtgatctcactgagctattttggaatagaaatgtggctagttgcctgacctccctcaatggtttcacgtggctttcaaagggaaggaagggcagtgctgacttttggtaaaatgggcgaaagggtccatgccagcaacacaatcactcaaagtccagatgagggatcagtaaatacaacgtgcctgaaaggtggcccttgagcacattcctccggtagacattaacttattaaattgattctgattacaaatataaactttgcccccatctcacccagtaacaatgcaagagttgatgtcagtctataaaaggaagtaggaactgtccctggctttcaggctccaacatcctccccctgtcaagatgtggcacctcaaactttgtgcagtcctcatgatcttcctgttgctgttgggccaggtaaggagggaaggatacttatgtgtgtgtgtggagtgtggagatgatagtggtggtggaacttgaaagctagattcagtcctgaggaatggttcctctgttctgagtctacagcatctgcggaatggaatgatcactcttccaaggtgtgcagcagggtgtcaacactttcatatctgaatgtctttgcccttacagatagatggctccccaataccagaagtgagttcggcaaagagaaggccacggagaatgaccccattttggagaggggtttccctcaggcctattggagcctcctgccgggatgattctgagtgtatcacaaggctatgcaggtactccctgaacctgggagcagggttgggccagagagccctgggaagctgggcagaggagtgacaaggggacacatgaacctaagaataaagctgggatggaggagttctagactgagactgggagctccatggaaaatcccttaggagttaggagccaagaacagctctatgtgggtaccatgaaagagtggtgcctttccattcttcagtctttcctgagactggacagatcaagcaaagaggaaggaaatgcagcataggtggccctggtcattcctagacccagtcttaaaaaactaccctttcttttcccctagaaaaagacgctgttccttaagtgtggcccaggaatgatgtacataccagggaaagaaaggacagcagtcacctccgacaatgctccgttctatggaatattgattaactgcattttggctggagacacccaagtgaagcaatcttgtatttttaatatttaaaggcagatgtacgctttaaattggtctccatttcttcttagaatgttgatatatggataagcataactaaacttgtcaatttagagtttatttttctatggatactattaaatgtctcaaattgaaattttagcagtctggaattcaagcttttgagggaaagaaggattcattttgtatactaaagaaaaaaacagcattgcccaataatgtgttaacttctcaatctggaaagtgtagtgagagctacataatcaatagctacgtaatcaacttcagcaagttcctaagctgtggccctggatcccttcactccatactcttcagggaggtgtcaaaggtggtcaagcttgggaggctgaggcaggagaatcacttgaacctgggaggtggaggttgcagtgagccaagatcatgccactgcaccccagcctgggtgacatagagagactctgtctcaaaaaaaaaaaaaaaaaaaaaagatggtcaagcacttgccatctaatgaagcacccaggtttgtctatggctgtctgaagataaggcagaacagagagaaaaatctagtttaataaagcaatgaaagcccaagccaccaaaagcaccaaaagagatttaagatttctgttgggacaaggtgaattttgacatatgcacaaggacccatggccagcaagttcagaatttctgtaatcagaaaatgagacctcagctggtgggaacagacttttaaagagtagtaacggaccttaagacacaaaacaggaattgcatgaaaagggctcagagttgaagaaatataaagagtacagtgttcagtaactttaatacagaaaatctatttgatatttattaaacttagtttctccaactatggtttggcattgtacaaagcatcttaatgacacagtagagttaaaaagatctttacaaattgaaatgtgatacccttgtctccaaatattttaattgccataaatttgtttaaaaatacacattaaacgcatgtttgacactctaaactttctatactctcaataccacaaaatacatataatatactatacagatgtggaaaaatctagttagtatataatactttgctcaccattaacagctttatcgtgtgaaatgcacatactgacttagaaatcctagcttttgagccccaaagtacctctgaaattgtaatgtattgcaacaaataaaaatcacagtatataattgaaattctggttgaaaatgtcagatgcctaaatattttggataaaagaaatgtaaaacaaagatttggttcatgtacaaaacaaaggcatccttatcagtcactaacagtacctttctgcaaaatcaacaggcttttaatttatcagtgacattatctcccctccaaaaccctccccaaatatcaaacaattatataccaaataattttaatttcaaataaaaggattttcaataaatatataagcatttccatcctccatatacaaaatttcttaaaaccattcaaaacggaggctagatagaaattttcataactgtgcttaccaaccccacaactggcccttaaaggtggtgccttttcaggcaatgtcaactggccagttctgttggtgagccccctacccccaccccacccatcccagtactgttgaatgctcatgttaatgatttgccaggtgtgtgcataaagttgtaaaatggggacacttctggaacaccaacaacaaactcaacaatatggatgatcatggcattgatttgaaaggcagcatttccaaattgatattttccagagaggaacatagcaggtagaaaattccaatggttaaaagctgaaaagaagtcccacatggaagcagtaagaggtcaaaactgagtatcactagagtttctgggtgggagcttttttatttttaagaatggcaagttatgtttagctgagtaacagtggcaaggagaggtcaatgctgacattcctgaaagtcaacttctttacatgatgactacttaggctgctattttaggatacttaaagatctctaagacttggattagacttaacttgaataccttattctgtgaccaaattacatgaaaagaagatacatagttattatttccattcccttttctggagacagcaagttctttctaattaaccatagggttcatgtgaataggagctttgtaagaccagcatccactttacagactattaataatttactttttgt

SEQ ID NO: 44905 - DNA, 843 bp, Homo sapiens
agagctcttacaattcaataacaagacaagccaattaaaaaacaggaaaagggcctgaataaacatttacccaaggaagacatataaatggccaataagcagatgaaaagatttctcacacctgtcatcacggaaatacaaatctacaatgagataccacttctcaaccactaggatgactagaatcaaaaagacagatgtaacaagtgttgacaagtatgtgaagaaatcagaaccctggtaagaatgcgaaatggtacagctgctttggaaacattctggcagttcctcaaataagtaaacacagagttaccacatgacccagccattccactcttaggtacacaaccaaacaaaatgtaaacatatgtccacacaaacacttctacataagtgtttatagcaatattattcataacagccaaaaagtggaaacaactcaaatgtccatcagctgatgaatgtataaacaaaatgtgatatatacttatacactggaatattatttggccataaaaaggaatgaagtactgttacatgctacaacttagatgaatcttaaaaacataatgttaagtgaaagaatatagtcacaaaagaccacatactacattatactatttatataaaatgtttagaacagagagatctatagagatagagtagattagtggttgcttaaggctaggaaggtagagggaaagagggataacagctaaagggtacagtttctttttgagttgatgatttataaataaactcaaaactactgaactctacacttgaagtaggtgaattacatggtaagtgaatcacatctcagtactgctgttaaaaaactgt

SEQ ID NO: 44906 - DNA, 2953 bp, Homo sapiens
aaaatttgcctactgtttctagagagttaacaaaaatcaaagtaccagcctgcaaaccaccgcaaattgaatgaaactgctggtaataaaaaaagaaaaatttgactgcttccaggtttttagtaagttaactctgaaagataacttaaaataacttactgggaatttttcttatatttaggagctgaaagatgcagtgataataaggaaaacgaatctgagaaatttaaagaagccagctttgttgaaaaccaagtggccacttgccaacacttctttatgcacgtatgaccaaagatgattctaggcagactcacagaccacaaaggctctttatcaaatcccaaattaagaaagttctcataaatatttcaattttgataagttaaagaccagttaagttttaaaaagcactttatgaagtgcagaatcaatacagaaacgaagctttgcgcttttcatatctgagcccgaaaaacagcacacattttatgttacatttacagtctattcacagacacctatagcttagattccatcaagaaaaacactggtcaatggaaaagtgactggccttagtataaaatttccatgtggccagcagggaagaaaccgcataattctgaattacaactgacaaaactacgagaaccctaaatcgaactcttcgccttgaactccatatacaaacatttcagattcgtacttccacttcctgaaaataatactgtttgtaaacgaaaaggcaataaggttactcccaaaactcctgtactccatgatccatcctcaaagagtggaaggaacagcaaagtagaaggaacaaagcactgacgtcaattacgagattaaccccaagcacaggcagctggaggaaaggcctaaacatcaatatccacgcacaagctactgggataactaggtaacagaccgattcagaagttgtaggggagggtattcgagtattatacccccacgttcccatttttagtcaatccccttcgcaagtcgaaggcggaaatttttccttcttttttttttttttttgcgggggtgggggtgtgggagaggtgcgcaggatcgcgagaaggaaagcgagaactagctgggtaatgttagccagaatctgggcctattttctctttaattagacataatttgaaattgaggaggatatgaaaaagtaacaaatcagccgatggaacgtctgaggaaagaaagaggaaaggagaaacactaaacggatggatttctgggaatttttgttaggattgggttagctttttttattttcttatctttgcgggaaggtggtggggtgggacgcgcagatgagaggaggggtgacgcctgattgagcagccccagcccggagggtctccccgaggctccccgcagaacttgcgggcccccacccccacccggccccggccacaacccccgcggcccggcccggccctgggtcagtctgtcggcccttcttacctccagtcccggctccgctaggcccgaaccatctcctggctgcggcagtggcggcgccgggcctgcaccttcaccggacgcgcattcgagcccgcccagggggcggtgacaggctgccaagggcgaggggctccgggaggcggcgggggttccggaggcctcgacaaacgaaggcggcgtcggcggcggcggcagcgatgcgcctcacacggaacaggcgtaggccccgcaccgctccatgacggtcgggcccgggctgggacagctgactgaggcggcgggggcgggttaacgaagacctggcaccaggatccccgccccgtccgctggcggcggcgacggcagctggactcctgcagccagggctgtgactgacgcagcggccgtgccaccatgtgaccaagaccgggcgggtgcggggcgtcacgtgatgcctctgcgcccctccccgctgggggagtagggggcgggggtctgtgggccggctgggccgggaggcgacgcccggggtggtgacgttcccggctgtggggtctgatgacccgggccaggcaaaggacccgcccgagcggtataggcctgagcctctgggcactgcggccgcgtccggcagggctgccacggcagtacagggcctgcacatccgggagctcacgccctcctgcgcgtagcccgctagtgaggttccgaagggcggggccgggccgaaccggatatgccggttctggggctcaggtgacaaacccaggccttccgcccctcgcctctggtggggatccggcccaacccggagcttcctagacttgcttccaggtgtcgaagcctcgagtcctcaagaggtccagcaaaaaggcaaaggacgcaggaggctgttcggtatttccagtaaacttaccctaagaagccaaaccgtccctctttcttcgtcatttaaacatcttctgccactaatgttttccttttcatttatttattgagatagatctcgctgttgtcgcccaggctggagtacaatggcgggatctcggctcactgcaacctccgcctcccgagttcaagcgattctagtacctcagcctccggagtagctgggattaaaggggggagccaccacctacggctaatttttgtatttttaatagagacacggtttcaccatgttggccaggctggtctcgaactcctgacctcaaccaatccacccgcctgggcctcccaaagtgttgggattacaggcgtgagccaccgcacccggcccactaatgtttttcttcagcatatcattctgaacacttctttcacctctaaacatctactatttcttttaagcttcactctttatatgcattttctctatagagctatataaattaggaaatgtcttaatagaaaactcaaaacatgacagaataaaaaataattgattctcccatctctgtctgttagctgtttcagtcctggaaggcaa

SEQ ID NO: 44907 - DNA, 989 bp, Homo sapiens
tggtacttcttggatagctttccatgtcagctcatataatctatcggttaattcaattgtcatttcattgacagttgaggcaaaaaagcaaaatgattaagaccatgaatctgggggacaggctgcatgatttaacacttactttttcttcttactagctgtatgacaatgagtaagttattcaacatctccttgctttagtttcttcatatgtaaaatgaagacaataatactacctaccttaatagtgtagatatcaggtttaaataagctaatacttataaagaccctagaatagtacttggcacacagtaagcatctattaaacattagtaacattataattaaaatctggagaaccaccatgaaacgtttggtcctttaataaattctatatacacattaaaaaaatattcctttggataccacatgtaaacctacctttgttgcaataataatctgttttctttttcttttaaagctttctttagttctgctgtccttgagggcctatgtaggtattttctttttcctgtgcattcataagtccaatgtccaaattccaagcatttctgacatcttacatgttgcttatttgcttcactacagaacaaaaaacagaatacaagccttaaaattctgtcttgtgactttcaccctaaaaactataaaaaaatataaaggataaaattatgtttactcttatggtccaattcataaaaatcaacattttacccttgtgagatttaatacaacaaagtataataagtgtaatgacatggtttggctgtgtccccatctaaatctcatcttgaattcccacatgttgtgggagaaacctggtgggaggtaacttaatcataggggcaagtctttcctgtgctgttcttgtgatagtgaataaatctcacaagatctgatggttttaaaaataggagtttccggctgggtgtggtggctcacacctataatcccagcactttgggagg

SEQ ID NO: 44908 - DNA, 1364 bp, Homo sapiens
ctgctccagcctgaaaccagccatttctccaaggtgatctgataatgtttggagccaacatgggggcacacacgtgcttgctgttactgggacattgcgctccagttagtgtcagtggacagagctagggaacacacacacctactcacctgtcaaatatacatacttacatctatatttaatattttgaaaaccatgatttcacactgataattttaattctaacccaatttcacagatttttaaaatttttctccgcttgatcttagccaaaaagctgagaagcaattattatttatttttctcttttttttttattctgagacggagttttgcgcctgtgcccaggctggagtgcaatggcgcaatcttggctcactgcaacctccgcctccggggttcaatcgattctcttgcctcagcctcccaagtagctgggattacaggcgcctgccaccacacccggctaatttttgtatttttagtagaggtggggtttcaccacattggccaggctggtcttgaactcctgacctcaggtgatctgcccgcctcagcctcccaaagtgctgggattataggtgtgacccaccgcgcacagctatttttctcttctatacttccttcttcaggaagaaacctggctcccactatccttaatagattacttatttggtcaattccccttatgtaaccaattgcccattgttgccactgctgcctcctcccccatatcctcttaacttcacttggaatctgccctgcacccccacccacgactcccattgccaggcaggccccccccagacacatttctctttatacacaggctctggtaccctataccaaattatacctactcacataccctgtgtggatattctctccatgaggaaacaacttttgttaaactgcctcgtgtggatattctctccatgaggagacaacttttgttaaactgcctcgtgtggacacctttgacccagcttgggatctgacaccctgcattggacttccccactactggatgacctctgcaacctgctgacatcacaagccagttcaagctcctctgtaggtgctctcctgaccccacattcagctctaatatttcaaagccaagttgaccctctgcatagacacctagtgtgctctattctacccaatacctttaggattgcattgttcaggaagggaagaggaagaactataaaaatgtccatagcatgatttttttttttcatttttgagacagtgtctgactctgctgcccagactggagtgtgatgatgtgatcatggctcactgcaacctgaatctcctgagctcaagccatccttccacctcagcctctcaagcagctg

SEQ ID NO: 44909 - DNA, 1376 bp, Homo sapiens
aaaaaaaaaaaaaaaaaaaaaaaagaaaggggcatctggggtgacccttgcattatttgtcagctatgaatctcttctgccactctctcttgttcattaggcgtaatggctatctttcagttctgtaaaaagtaagtttcaggctcaaagcaattatgccactatccggatgctctttctcaaaatcctcgtatgactgttcctttttcatcctttaaatctctgttcaaattccacctcttcagagatgcctttccagtccaaccaacctaaagtgggcctttccctctttccatcacaacagcttacttccttcaaagctgttatcaccagctgtatttacaatttgtggtttatcgactgtttccatcactagaatgtaagctctctgaaagcaaggattttgtcttgaacacctctatttatacccaatgtctggcacagaacggtaggaactaaataaattaatatttattgaaagagagaatgagtagcaaaaggtggtaagatagcctgggaaagcaatcggcattgaaggcagggtgttcctaaggaaggcgctagaataaggaagtaggaaaaggcagctgggctggacactgaataggaaactgaaggtttacgtcggctggaataaaggtgtcggaccggggcttcagggctcccctgtccacgcgtggggttggcggaggggcataaatcactgagtgaccaactgtgggcgttcctttcagagaaaccaaacgcgacagttgtcttcaaaccccgctctgtcccgtgccgcagactttacgcggctgtcttccgcgaaatcgctaacccccggtcaccagacttatcgcccgggcccgagccccccgggagccagaagagtgtttgagaaacggacattctccgccggtcccaataggggtccgacaccagcccgttgacgcgcgtttccccgctcccagccctccagtggacccgaaccggatccttacttacgcttgtctccgggctattagccgatgcatgggagtcgccatcttagcgcggtcaaagccggccgcgcagggttttgggaaactcctcggaagggcggggcttccaaccgggaggccgtagacgtaggcggggccagacaggcttctaaggggaggtatcttagtgccggctggtgggtcgggaggggaggggctggagggtcgggaggggaggggctggagggtcgggaggggaggggctggaggggctggagggtcgggacgggagggactggtgggtcgggaggggccggtgtctccagtatgggtctcgggttctcgggccgaacagggtttcaaaggatgattacaggcaagaacattatctgtggaaaatgaggacaacattct

SEQ ID NO: 44910 - DNA, 1368 bp, Homo sapiens
gtaatgctagcatatgctgtaggaatgccagagacatggtaattaccattattattgagttattggagttttggtgtttaagaaagggttgttgctttgactaaaagcattgctccactcactgtaagatcagggaagtcagaaaatcaccattatctgagcaggtagtttccttgtgaagcaaaaaattgcagaagctgctccagagcgtagggcaggattccactggacacttgtcagggagaaatatgagtccccagctgatggagaaccttttgtcttttgttgggcagcctatgaacactgtatatttaaaaacaaacacttctgtgattgcttaggactaaatttaatcgttgtatttgagagtggcatttaacaacttcctgcttttaaaatacttaaatacctaagatactctgccaaatggaaagaatttgttctccgaacacagtgcctccaacattaaatattctggacacttcgttggttcgcaactgtgatacttggaaacttgccacgttagattcttcaggattctaaaataaccttttcctgacttcatttatttaaatatcccagaataatctcttaagctataagtttgatgatccaggaaactatttataggaggatgagtactctctgtgactgatggtagttatgttttattttgagaaggacaaatcattaaaaagattgatagggctggtggtattttaaactgaaagcagtaccaaggcaaacaaggcagttgaggtatgaagttggaacataataagatatgggtgtaattttcatcaacttagctaagacctagggaggtcttccaatagaaggaaggcagaaacaggcagtaacacagacagtgatcttttaggtccactggacactttagcttaggcagctcgggttgtttgctcagtgattaacaactgagataaacagatggagacaggactctgtcataattaaggtcaacagtgtgcttggtattattgatattgcccctaggtaggagaaaaacagaggaaggaaggtcaaggtcaacctaacttaaaaaaactttaaaaaattgtggtgaaatatacataaaatttaccattttcatcatttttaaatgtacaaatctgtcactgatcatgcacattgttatgcaactaccaccagcatctatctccagaactttctcatcttcccaaactgaaactctgtatcccttaactctccatttcactctacttgtgaaaccgcttttctgtctttatgtagtttattgtaggtgcctgatacaagtggaatcatattaaattttgaatataaaattaaaaattaaaaaaaattaattttgatttgtttggctttcca

SEQ ID NO: 44911 - DNA, 2950 bp, Homo sapiens
tcctttgtcttttcaaagctgtataatgtactgttacgcgtatacactaaatttagaaaactcattcatctgtcaatggacatgtggattgtttcctccttttagctaccgtgaataaactactatgaacatgggtatacaatgtacaaatatgtccctgctctcgtttttccaaaggctgttcctggctgcctctactctttttattcccagtacccttttacaggtagcacctggtacttgtctttgaagaattaacaggttttagttaggcaaaatgtgagaacagtgtggccatttgcaagttttaatggtaatcaacccgggtttggggttgctcctatagagtgaagtacctccggaggtggcaggaaatgcaggtatttaaagggaagggcataccagggcaatgtaatttcttctttgctcattcacttttaaaatggctgaagggcaggtactctagccttgagaccttcaactcatgatgtaccctccagcaacggagaatttctttttagtccttaaactatggtctctattgctagttttccaaacttgaacacagccttttccttttctgggaagttgtcctagtctccaccattctgtgcatatagcactcgccattctgtactggggtcacctttacttgtttagccaccctcatgatggggatgatccaggttttgcagaggtgaaacttatataccattggggggccctacaaatacacaaaacaaataattaaaacgacaaatcacaacacattactagagacttggagattcagattctccttagatctctctgggtaatttattagaaatgcttacatagatttgcttcctaatctcaagctggcttcccctctccacaactcagcaactatctattctcccaggaggccatacaagcgaggggccctgaagcttaacatttattaacttcatgtaaaggtctgagcggacctttcaggccaggcagcgtgtcacttgcctgtgttccttgttagggcctaccaccgggtaggtgcttggaatgtgctgtggattaaaggcttaaatcctgcgggcccctcaatctgatctaaggacatgagtggcttagagaacggcgcaacaaggctaagcgaaagaaaacaaagcggtgtggctgggagtgggctccttccctccgctggtgagggtgcgatcttagactcttgagagaacccgacataaaggccgcgttccaatggcggccttctcccctaccggccaacctgccccgaaaagagcagaaggcaccctgcgggatctgcagatcagcttgcgtctcattctggggcaccgacacggtggaatgcaagacaccccactaccggaagtttctttgatgttaagaaaaacggcggaagtaggccgcagcgcttcctcagtatagtgcctcgagctggctcgcctactttctacggtaaagggaggtgctccacatctctatgcagctgtgcagcgccgcaggttccatgcgcaggctcggttggctaaatgcgctttccagccatctttcagccacccagtcctttcccaggttctcgagccaggacgtgacgtattcagacgtactgggggcggggcctcaaggggaaaagcgcctgagccgggatatcgcgagaacatcccgttctttcgtagctctggtgctgcggctccgctctcgtcgcaacgagatctttcgagatcttctccgcccccgctaccggcgcctcctctgcggccactgagccggagccggcctgagcagcgctctcggttgcagtacccactggaaggacttaggcgctcgcgtggacaccgcaagcccctcagtagcctcggcccaagaggcctgctttccactcgctagccccgccgggggtccgtgtcctgtctcggtggccggacccgggcccgagcccgagcagtagccggcgccatgtcggtggtgggcatagacctgggcttccagagctgctacgtcgctgtggcccgcgccggcggcatcgagactatcgctaatgagtatagcgaccgctgcacgccgtaagtgtgggccgggcctgccgcgtgcactggggttaggagataatgcttgttccagtctgggaccctcgctgcttggggaacgcgggccgaggagtcgcctccgttccgagccgaggtcccggtaggtcagggacccccagtaggtattaggacactaggggccgcggcccactatgagcgtgggtgtgtgctaagcgcgagggccttttccccggtggcccgtcggccgaagaaaggcttctggccggtactcggaccagcggagggcacgggtaggaactggaaggactgcaggcctaggatgtaaacggatcgcggtccttttcttgagggcagagaccaggcccaggtcgtactgagtcttttgagtccaacagaaagctcagaactttgcacacagcaggcgcttaataatagttgaatcgaacgggttctggggcttgccagccgcgagaccgtggagcggtcagcgtcccacgtgagtgggggcggggcagcgcccggaagagagcgagctggagcagcctcaggcacgggttccggatggactcggggtcttgagattgggttggcacggataggaatttaataaaatcggtgctcttatgataactttgcaatcgcttttgttttccacattatttcgggatattgtgctatattgggtcactctctgttttgtgcgcgttaacccctcaatagggttgcactttaacgataatgcattctaaccagtgtgttggccacaattgttagtggctcaagggcccgccttgacttctagaacccatagtaagttttgggaccagcatagacacagttctaaaaaatggtgggtcactcaggtctttcactggttacagtgtctgccttttgaatacttg

SEQ ID NO: 44912 - DNA, 639 bp, Homo sapiens
agagggccccccaggactatgaatcagtaaagcatgtcacaggctacgtacagctgccctaagtcatctagagttggccacaggttttcagataaaagccttggctttgatgtacatttgacctttcctgttctgaaagggaaagcctcccttgattgtttataatatactagtcacatcaggatggatcagtggatgccaaagtagcaaaggctttcatttgcttttttaaacccatgtatgtacagtgtcacttcctggaatgtggagtctaagaatgctgccctttgcccaaactctgtcctggctgtgctggccaacccctctttccagacagcttgctcttacttctgttccctgcccccccaccgccccccaccgtttctctggcagcccgtgccaggcagcagaacctacactccagtcatgcccccctgaccccggcccagggctgtagctgtctggggagaaggtctaagcaaaccagctgagaaggggccttggggaccagctagctcagcctccttattttaaagacaaactgaggtccaaggagggaaagggacttgtctgaggccacccgtctctgtgccagagctggagctagaccctgggccctgcattctggcctctgtccct

SEQ ID NO: 44913 - DNA, 1964 bp, Homo sapiens
gactatttgggtttccttgtgttcctgggctctgtctgctgtccagggaatctccctgtctgtttccagagttgtctaggttgccagggaaggcctgctcacctctgggtgccctccaattccagctttatgcaaagagggatatgaggcttacccctgtcttcacgggctcatggttggcagctgtggccctggtcaattggtgccctcccttgccacccaacacctcccagccagctcagtgagaagcataaacgcgtgtcgacttacgggtctttctagctgagtcttcaatgaagagcgaggagatatcttcatccacacccacttcatttttggcaatgcaggtgtatgcccctgtgtcttcataccgaacactgctgatgtggagttcgctcccattggctgcagacaggacagtgctcagggtggactgctcagctggagacccactcactttcctttatggggccattgagagtgttagggctgcccagcccctgggcagccagcagccctgattatacgcccaggaagggctggcacatctgaaatgcactgagggtgagctggacctgagtgacagcttctcatcattgctgtcagaaagccccaaaagatctgtgtgagcccagataacagggaaatttgggagccatctgttcactcctaacctgtctgacttataaacaaattatacctctcgtttccattcctggagtctcagcttgatttgaatgggaatatcgcatagacgtctaccaagggcagttcttacctaaaagggagagctgtttggacatctgagttgagacatccacgccgtttttcagccaagtgattctgggcatgggaatgccctcagcatggcatcttaggctggctgccactccaggctcctgtgcctggctctctggatagacacggatgactggcggcactgtgggtgagagtcagtgctggtgagaaagagacggccctgacctggacttgggcctgtggcccaacctgagaccctgctccagagggggtgaacccaagtaggtgactggagttctgtgtttaaccaaattataataatcctgtccagcaacgcaagctctaaaagaaagggctataaaatagattgcagataataaacatgtcagactttgtaccctatgactcatggctttcatcattattctaaatacgatcagaaggccatccaaatatttaatgctgttcagctgctacatgtaaagagcagcagccactgaaatttatttctgaataaaatttagatacattccctttctgttatcagaaagccattggataggggttaatttcttgcaggaaatgtatcagaaagcacttatggcactgactggcagggcctctgttctggggaagttcattcattttccagtgggccattctcatttctccacttctcaacccctggaacatgggtgaaaggccaggtgtgccctcctcagcttggagtgactcagccatgggccctggcagtcaggttcagggttgggggtgtgagcctgcccactcaccagacgagcatgggtgggcaaggctccagcaccctccacagagctctggcccttcctacccagcctggctgtggggaggggcctggaagaagcaatgagggtctggaggaccctccctcttacccctagctctgggtccaggagataagtatcatttttagtggaattgagggttcttccttatctataacttttactttacacactttcaaaaaagatttgtgagatgtaaacatacctgcatattaaactaaactaaacacactgtccctggagatgggggagatggattcttcttgaagtggacagctacattttcctagagttatctggaactccctgttgttcagttaaagaaagcatcccagtactttagaatagagaagatttttcttggaaccagagcatagaaca

SEQ ID NO: 44914 - DNA, 919 bp, Homo sapiens
agtagcatgcgggagtaataaacagattcaggaggttattattgtgtttttgggaatgaatcgctacttgtctgaactgtggggaggtcaagggtgtttttaatttaatggattaatcatttatgtctgatttctttttccttcctatgaaagcaatgcaagaggtttacccaaagttataaatcacgtcagtgctcgggccgcatctctgggaggtctgggctatgggcaagttatactaataatttgagagaggaagtagttgctggaatggtttctttagtcaaccaaatcagggcagagtcatggaaggggaagtcccagaaggtggtggccccgcctgtgcatggaatcttgaccccactgctggcagtgtggcagctccagggagaagcagcctatattctattcttggcttgaacgttttctctgggtcttgattttccaaactgtataatgggaaggaggctctctgaggggccaccagctctgaccatctgtgtccaccaaatatagctaaatttggcttgagttacaccaacaatcacccccgtatctaccctaccttggactgtgaactacatcctctgccaggcatttcccaagcattatatacatattctatttcatcagacgaggttgaggcagccagcagtgtgacctagaggtcagagtatggggtctggatccagagcaacacccagcagttgtgtgaccccaggcaagtgaccttttttagcaaatcatccatgaactggattaagatacgtggatgggaaggtccatgtgaagggctgagtacagggactgaccaaggcaagtgctgggaaaaccctggctactgtcatcaggaggcagtgaattcttcagtttctgggactcctggcaacacagggcctgtgagaatcaaggaaaagct

SEQ ID NO: 44915 - DNA, 1109 bp, Homo sapiens
aggctctggagtaagtgggcacaagatgataggtgatgctatggaagccccactgggcggccctgagagtggtcaaaacatggcattgagtcaataggcacacccttggtgttgccccttctatgcctggctagttcatgagggaacagggagatttgcacaaagtttatttgtcttctgattataaatgggcagggcactgtttgaaagaagagagagaagtcaagaaatatttgtaaacaatgagaagagaagcgagaagacaaatggaaatcttgatggaggtggcactgctaaaatcttgtaatagtaataatatttcagctttgaccagtgtcctggcagaatgaggggaacacatacagctcaagtgaggttcagtcaggtgccagctggctgggaccctagcctttccctgaaggctgcctctggtaccaaaggttctctctgacttgggcaggaaaggtgccccattcccttggccctaaaatattaccctcagaactgccatggagtaggatctgaattctcacattttcctcttaacagttccaaaggaatgatttccctgtttcctccaaggccaagggcatgtcctgccaccacaaggagcctccctcactcatctcacgtgatcttcctctgtgaggaagtcacacaaagctcccagctgtggagtcagtcagtcacacaaaactccctggcgagtcagtctctgaggatcactcagactatgaggtccaatggctccttcgctgccccagctgcacccagctcagcaccacctggcccggtttggtgattcactttccataaacctcaggatgggcctgcaggctaggccacgcccaggcatagactttgccaagacctgtccactgggctgtcagcactctcagggttgaccacttgcccagagcacgaagtcctaggaagggagctggatcggtggccccacctgccagggcaccaataactaagctctgtgccaagccctgtcctgggtgcctgagcacagcagaatctgacctgccctgtgtccatggcacttgcaacctaggtgtgtgtgtgacatggtcacgacacaaggctgacctctaagcatccct

SEQ ID NO: 44916 - DNA, 726 bp, Homo sapiens
gatggcggtgaggcggtggtgatggctaacggtggtggaggcaatggtagtggtgacggcagggatggtggtggttgatggcagtaaggatggcgatcggggtggtgacgatagacgtagttagaaacagctcattttcttcccctctgagaatgagtacagacaaatgactcatgactgaggccacgggactgctctctgcacagagcaggaagaagacatacataactgagtataactttgtcacaacggagtactcggtggtgcacaagactgggtgtgcacgtgccaggacaagtccctcggtgcacacagcgcacgtgagctggagcccagcatggagctgaggaacagcgctggggtcccggcggttcaccagcttaccaccaggtgtcgctgtgtgcacgagggcaaagggcacccgcagaccagcagggccgagccgggctctgcagaatcggactgggctccctgtggggagaccacattctgtctgacgccagcagaagaagtgcctgtccccaagatttcaggggacacctcagacccgagtcatgcagcagctccgaggcaggtggtgcccctgaactttctagccgttcaaagtcagtgcacatccaagcgtttgctgagtgattctgctgcgcgggtaaccacccagacccgtgaacagtgcaggaggccagttcggaagttatcatgagatgatcacccagtgtgatggaa

SEQ ID NO: 44917 - DNA, 823 bp, Homo sapiens
gacatgaatggttctgagttgagaagagctgggagcacacacagcctggctgcacccagaggatgccccaggaaacctgtctgcttcctacctctggtccatttgtgccctgctgactttttgaatttttgcccttcagatctctacacagtacaggaacttgctgaaagacctcatgaaatatgactggtgagattccattcctctgaccctcagcaaggatggagctaaatgcactgggtggaatttacaacctataattttctgtaacatttttcctggagtggggagatagagaaagaaaaaaaaaaagaagaagaaaaaaagaaagctaagagaaggaaatataatttcaattcattcatgatttatctattccctccctgtggctgcaggggaattttaactcggttgcaaaatggcctggttgtgcaagatgccacatgccatggaactgcaaacagcatgcgcacgttaacctttcctttgctggctgcttccagcctttcaccctgctgctacctggcctgacattttatagatttcagcaactgggcaggatatcacgggccttctggagcacacaggtgggtggtacctggtatgcatagactcacccctttccccgcacaaacaaaactctgtagccaatgtgaaacagaatgtttgaaatctgtgtcctttccacttctgctgctttctcctttatccaatgcctttcctttgaaatgctgtgaagccctgaagggatgcgagtgagctgtgaagaggagcctcttagaattgtcagtttcatgttagccagccaaggcagcggggccaa

SEQ ID NO: 44918 - DNA, 1035 bp, Homo sapiens
ttgctcctccttcacctcccaccatgactgtgagccctccccagccatgtggaactaagagtccattaaatctctttttctttgtaaattgcccagtcttgggtatttcttcatagcaataagaaaatgaactaatacagagatagcacaaatgcccagcaaagggcatgtgacagaaggccggccttgttcagggatgcaagtgtacatgcccctacatgtgtgtggactgcagaagcccattcctagcacccatcccaataaaagggctaggataagctggctggggctctgactggaccctctttaaagcctgaccatttaagcgcactccagtcccccgtggatgggctagttatcatctattctttcatcacagtttaccctctgacactggcttcagagttgcctcattatttagcctggaggccaaggccaggtcatgatccagccttttccttttggtgcttcggagcttctcatgataagtctttgtgtttcagtaaggcacaggcgggacatggtagtgggagacatcagtaggtctccagggcaggtaggggcctctgggtaggggcagaacatgctcagcaggaaataaaatcctttcctgctgccagttctgttatacagctcccaggctgcctccttggctctcacccagggcaaggccttgcccagcattctgcactacagaggtgctggctataaaggctttcctgtctgtggctcctccctgcagcctgccaggcctccaagcgagaatgtccactcctgctgtctttctctggactcttctctccctacccccacctcaaatctccagctctcctcatcctggctccagccacctggctgcctttcacttccttctaccttcctccacatacacctctgcctaagtaggaggtccatatagattctctctccctgggtgtggcaccttctctgctgtacagcaaattgggcaatgtcctcctctcccaggcatggactcctgaagcaaacggaaggccctgcacaagtggcaccatc

SEQ ID NO: 44919 - DNA, 1203 bp, Homo sapiens
gtccagggatttgtgacatggcagaaatatgctcttacctcgttaggaagttttagtccatgtgtttccctaactctagctaacacaggatccgttggagccaaaggcaggggatttgtttgacaagctgaggaccttgtgccaggatagcagcgaatgcacagcaggataatattaagccattattagcttcccaaccattcacacagatgagttgattctatcaacttgtcactctgaaaagtcaacagctccactcgagaggaatgagaaaggggacagatttggtctgatgagcagggaggaaacagaagaaagattggaagctcaagtgggtagacaagacaagcaggacgaataaaaattctgggtttttccacttattcatatggttcatataaccgctacacagtcttaagctccatttgctcacctctgtaacgggggaataatttgcccagcattgttatgagagcagatgtgacacaaagtatttcatgaatttgagggttaaggcagggcacaaacaaaagtgagaattaggttgaaaacaaagttgtctaagcatccatcttggctctcagtgctcagatcagtgcctggcaaaagtgaggtcattcaataaatatttgttggataaatatttgttggaggaatgactggctggctgaatgaattaacaaacagcacgtatttctgaaagattcacctgaaataaattagactgggcctttaaaaagcaggcaataggccaggcgcggtggctcaggcctgtaatcctaccactttgggaggccaaggtggattacctgaggtcaggagttccagaccagcctggccaacatggcaaaaccccatctctactaaaactacaaaaattcgctgggcatggtggcacatgcctgtaatcccagctgcttgggaggctaaggcaggagaatcgcttgaacccaggaggcagagattgcagtgagccgagatcacgccactgcccttcagcctgggtgacagtgagactctgtctcaaaaaataaaataaataaaataaaataaaaagcaggcaatataaatattagtttagtttaattttttaaataaaaatgaacagaacaatgcagcatgctgtaccagctcttgataatctccccaagcaggctgaaagtgtttgagccccttgggtcctttctgcagacggatcagaaa

SEQ ID NO: 44920 - DNA, 544 bp, Homo sapiens
gaagcaaatcactcagcaagcaccaatttatcccaagaaaaccttttaaggggttgagaccaatgagtgttcactctcgctatttaaatggttattgctctcagcccaggagtatggctgttggagctttcacttgttttctcctggaaatgattcatttcataacaacagagtccttcagcgaaggactgcaatagcttctgggttgctaaacactctgaatgtttcattatggataatgggcctaacacgataacatatgtaagcaaccaggaaaggagaacagatacaaagacagccatgaagctgggcaggcagtgtgacagctctgtctctcctgctgccctgggcagtgcccactgacccagagccttgaccctgaaatgcttgctctgaaccttggcaggaacctcagaagtcatgcacgtgttcactgaccacagagctctagggacaaacatctggtttccgatatggagtgtaggcaaaagatctggtccactcactcatacttcataatcataaccaatgatttagtgcccac

SEQ ID NO: 44921 - DNA, 684 bp, Homo sapiens
cccctcacagattgtgacacaggcccattcccggtgaacattttggctggcagttacttcaccacctattgaaattctgtttacgtttggcccagagaacctggacggatgtttgtatctcgggggccccatctagtacaattcctggtgcacaggcttgcaacaaatttacgaaggtaacagaccaagctgccggcgctgtttttcactggaggaaagctcggcggaagcgacacctagaggggagcggcgggctgtggccgcgccattcatcagtgtcggcggcccgcggccgcgagcgagggctgctggacagcgccccggcacccgctctcgagccgcgacaccgacctcgccgggcccgccccgctgacccgcgcactcctagtgcacttgccgcgccgcgcggaggctcgccgcgctctggaaaacaagaaaccccactgcctcggcggctttccgctcccgcaagagttgcgggcacaaagtcctcaggtggcaggcctggggttggcgccgctttgtcggctgcagggagccccaaagactagcgtcagctcgtccccaaactcgaggcgacaggcgccgaaagcagagtgctgtgcctgcctcgtccaggtccctcctgaaactcagaactcgtctttgttttgcgggcgcaaagagggcggagatcatccacag

SEQ ID NO: 44922 - DNA, 459 bp, Homo sapiens
ccgtggcaaaaccagataataggcagaacaagctactgaaaattaaactgtttcctcctctggaggctgaggaggtgtgagggggttagtgctttcatctgatcctatgaactggagacccatgtgggctctgtggtgtccctgaaggaacaaggagcatagcaggctgggggtgttcaggcagagtgcctgcctgaatgacaggagcgcgcggtggagatcaaagtccccggactgcctggtgacgtctttcaggcagatctaccgtcatcccgccggaaagtcatccccgggtgtgactgtttgtggcttttcaattctctgagattagcaaagaaaatatttgaatatttctttcatttaggggaaaaacaagagcctatcaaagcaatcatctctcctaggaagaaatataccagggaaaaaaattccttctgcctctcaggagaaaaaaatcta

SEQ ID NO: 44923 - DNA, 2238 bp, Homo sapiens
tgcgaagctgagtctattatcgtccccatttaatggatgcaaacacagaggctcaggtcacactgcaagtaaggagtggagccagggtgtgcaaaccttgtcttgtctgactccaaggccatgcacttgttataactaatgggagttccactgtatcagtcacagtccggtcaaggaaacagaagccattctaggtccttcaaatagaggagctttcacatagtgaattgcttaccaggtgtggtgacagtaagaaggaagatagggtgaccaaagattaggtaatgcaggaagccaatatctccccaagggctgggagtcacaaaggcaagagataatgtgacctagacctgaagtgtaagaggaccggcttctgtcccaggagctggcagcatggaggaagggccacagctgcccctgcctcggagacacccctagaagaagaagacaaagagcaagagaatgaggaagaaggaaggctcttctctcttccagccctctgacctcccatgggcagaacttggcagggagccacctggaaagggagcccagaaaatgcagtctgtgggtgttctggcccagaaatacagagtatggaggggcaggtgaaagctgggacagagaataaagaaacagcatgacctggcacagtactaagtgctttccataccctaagtcacatcatcctcctaacaacctatgatgccagcaaaaacagtggccccattttaaagataaagaaaatgaatcttgagaatacacatgacatgttcaaggtcatccagtagaatctggattcaaacccatatctgcctggctcctaagccagggaactgggagtaaacatggcaaccttatccaagagaacttcgatccaagaatctcatggcatgtggcccacctgaatgactctccttccacgtggtgcagccttgtcacccctttagggaacgtgagcacggggatgaatcacatcttacctcatcacagccctcagcatgctccaggtcccagaaattctgatagcagcagcaagagtcaacaatgggccgtggattaacagcatttactctgcaaggagctgccaggactgggaacacacagcatggccatgcaggggctgttggccagagaagcagccccatcacagagcccagctgcaggccagtactgaaggcctgggtcttgctgctttgggtcactcccaatttcatccacatcctaaactccactagctctgtgtgctgcctccttgctggatccagctactggagaggggagccggctgtgtcactggggaacttaacaaggctaattccactgaaacctccattaactttactacttctgtgtaagtgtttcattgtaaataatgattccccaccacagaaacacactgccagaatctcccggcggacataaaattaaatccagcccccacagcctactcacgaagtgcattgtgatagctgcataatcttccaaaccacagagggctgcaagcactttccaccaatttcaggggaggcttgactttaatctgccctaatgaacagatctatgcacccctacaccttcccctgcctcacaccaaatcccctttcaattcagattcctttttgaggatgaattgtaccacagttctgagcacaaaagaacctcactcatctcagacaaggactcagcttaaagccccccacccagcccttctcttccaacaaagtccaggagaagatgttttagaagatactatatatatatatatgtacacacacacacacgtacgcatgcacacacacacaatttccaggaagatcagcagaatttctagaacgaaggagatctgcccagccgtccacccacatgcccaccgcccacacacatagcttccccaatcctttctcaatgctgggtcggaacctgctgtttccctgccttgcgtacacatgaaacacttccctccaaccctggagagagactgcacaaggttcagctaaaataagaaccacctagaacaagaaagtgaagtcaacttcactttgaaaataaacaggcatgccctctgtctctcccagcctgggcaagggacaggaacagcttttgggtgcagggcccttgggaggaagccttcccttctgagtttttagatgcaggtttcaggaatgcccggaccaccaagcctctgtctgctccctgctcacaccctgctcctccactctgctcagtggctgagaagca

SEQ ID NO: 44924 - DNA, 902 bp, Homo sapiens
agggaagttatacaagaaaacattgattgtgtttgaaaactatacattttctgaaaacttgttataatgtatccctttaaaagcttaatacaaactatctcataggctgttgccaagctttgaaaagtccacaaggaggtaaggaaagaaagaaattattaaattgtaaaaatactgattaaaggaagaagaccctttctttagaaaaaataatattcttctgattagtcacagaatttcttgagggtttcatgctaacatcatgccttcagcaaaaggtcaagttttccttctcatctggttcttgatcagcctgagctaaagacagaccctccctggaaatgagccatcaaggatgaaagagacagaagctgaatttagcaggagggagaatgaagatgaaaagtgaaagcaaacaggggtaggacgcagccccagtgaccacatgtcctggcttgctgggacaattcaatttacacccactgttccagcattaattattaacagtgtcccttttccttaccagaataatcctgattgggacaataagtaacatgggccactctagaaacagtgggaacaagagtccagaggcaggaattggcagtgtgtgtgctcaggggtgagaggtgctatgaagactccagctcaagtggagagttgagcacatgtggggacagggaagagggcactgtggaggaggcgcaggactggatccaacagggcccagaagccagcagggaggagctcctacttcatcccatgggtttattagggagtcactaaggattcttgagcaggataattatgaccccaggcaacatgctcagaaaggacaaggagtgagataccagagaaaaggagactggtcggaaattcagttgccaggaacgtagcggtgc

SEQ ID NO: 44925 - DNA, 777 bp, Homo sapiens
gaaagggagatgaagaccaaatgtatatttcacagtatcagagtacctgagtatatttcaccaccattaaacaagaggtgatgcatgactcagctccatcagagaagtaagaagactcggggcgaagaaggccctgtgcctttctctggcacactggaagcacctgcttgtgtaccagcttctcaccaagacccctgttgccaaagcaaccaagtttggcttttcctgcccaaagcacgcaggcatccttgagcaggggagaggtggagccaggcatgcaccgggaaaccaccacataccatgtccaatggctgagccctttgaactctcaaggttgctaaatggtacctgagtccaggactcccaccaagacacccaactccacagacagacaagttaataaatcacagcgtgaatccccttcagagggtggctgtgtgtaaaaatagagagggcaccacagcttcctgcccaccttttcctggtgtccctggaatcattcattacaaccacagggcaagagtccgtggtggcagagatgaagaggctcagtggcctggctccacctcctcacttcacagagacactgaggtcactcagggactcagtgcctcgctgcactcacacagagactcaggagtcaaaaccagttaaaaccaggcctcaggtctccctactcccacgccaccttgaaggacacaccccccagaaaccacagctcactcctttttcaggacttcatagtcaagaaacaagccctgccaatcctatgctcaa

SEQ ID NO: 44926 - DNA, 1710 bp, Homo sapiens
tcagagtggaactgttaggataggtggagaaaggcttcctaagtaaggagtagggtttttttaatctagagcctcattagattaaaaaacccctcggccagacgcagtggctcacgcctgtaatcccagcactttgagaggctgaggcgggcagatcatctgaggtcgagagtttgagaccggcctgaccaacatggagaaaccccatctctactaaaaatacaaaattagccaggcattgtggtgcatgcctataatctcagctacttgggaggctgaggcagaggaattacttgaacccgggaggcggaggttgtggtgagccgagatcgtgccactgcattccagcctgggcaacaagagctaaactccatctcaaaaaaaaaaaaaatccctcatggcataggcactgcattaaaagcaaaacacctggattccttttactcaggccctgtgctgcgtgctgggatgacagagtggttcaagccagatgctgtttctgcccctatggtgcccactggtaccagctagtacagatgggtctgggactctttaggatggagttagaagagaggtgggcttagacctcatggggtagaagctgctgcttactggtccaaaatcaggctcccttgagccacttaaacagcctagacagcaggccattaccacagacggctactgagatgtgagtcagaaacagctccagctctgagctccagtggtgcaattggttagcatgtggtacttacacagaaatagccctggctccatttccagaatctgtcccagcaacttccgctcctaacgtcgaaatgaaaacagaatccagctaattgaagagaaccaccccaaatatcctggctcaagctgtgctgagtcaggccagactgacaacctcaggacagccttcttttctgttcccttggaagacatttggtcctcgaaagacttttaaccttttgaacttcagctgggaaggatgaactgcttcacactgaacccagaagggaggcaaactgctgcaccagcaaaccaggctgaaagaaggccaaagggcaaagccagccctgctcaccccaccccacacacaggatgggggagaactggaacatcggcagcagtgccggcagtgatctccttcaccttcaacaggcagcacctgctctgatgagaacctgggatttggaggaaggggtgatatctcatacaactattgtgggctttagcttcccgtagaattgtggatgtgcacataaggactgacacgctgtactcggctctgatcccgcattcatctgtgtacccaggacgttagtagtattggactctatgcagactatgtgatcttgtgcagagcctgagttgtcttggttttctcctcatctaatttctcaaatacttcattgaataacaatttaaaggggcctagcaggtgccaggtaatgagcttggggctggagagcagtaagagccagttcctgttctcaagcaactcactcggtggggcaaaccacacattccgcaagagcttgcactcacgctcaggagatcacatttaaaatcaagaaagcccagtcaaggtatgtggtatggtttagacctgtgtcctgcccaaacttcacgtcgaattgaagtccccagtgttggaggtggggcctggtgggagatgactggatcatgggggtggttttctcatggtttaacacc

SEQ ID NO: 44927 - DNA, 3108 bp, Homo sapiens
aaacgaggcagggttatcctggttaactcggaacacagggaagaggaatcatgatctcccttgtctccaaactcctctctgcctcccaagccttcaggggcccaacgccccagtactctgaatctttatcaaacaccagaacctcccagtcttcaaatatgcaccagtaccctaagacagctctttccctttcactttccctctcggaaatattccattggttcagtccagtcactggattactgcccctgcccgcctcggtctttaccactgacctctcccattctggaaaacccccacctttccttggtcctgcaagattcctgagtcccccaaactcaggaccctttccagacaccacacccccagccccggccacctcctcagcccctgtcgccaccctctcttccagagtctcctaactttccgatccaagaaattttggagaccccaccaccgccattccttgcggcagcccattcttcaacgatctctaggcgctaacaccactcctccctccccgcccatctacacaccctgctgcctgctccctgggttcctgcatctctcagggaccccgcttctcaggccccttggagaccctaccaccttggaccccttcagacaccataccctccgtcctcaggcccgcggagaccctgacccaaccagacaccgccgtctgctcctgacacttggaagcgccctttccctggcccggcctgtctcctgccctgcgcccgagccctcctagccttcctaagcccacactgccgcccccctttaccactggatagagcggcggacacaagcaggagcgccaagaccagcggccgcgccaaccccacaagggcttggatggccgacccgggcagcagtttcgcttgtgctggccccctcatcctcttcgggacggcagcggccataacggactcggctgggagcctgcgctgttgctaggctctacgccatgaggtcagacgccgcggccctcggcacatacgtcccagcgtggtgacgtcgaagcctggagacgtgctctggaaaccggaataagaaggaaggattgcagggaggagggagttgccgctaggcgaaagtggggaccgccacacagttggctgcggattaaaggtagggtgtgacgtgctgaagagggccaaagcgagcccctccctgccgcctgcatgattgggtactatacagccaaaaatagcgtttttagccattttaaaaaggaagatccagctgtagaacagactgatcacgaaagcgaagtaactgctcttcctctctcaaaggcgaaagaaacacaaatgttaagtagtcctatttcggtgatgggattataagtaatttttaaaaatctttcccgacagtcatttattttttttcaacaaagatttagcacctctccctatttaagatacagcagtgaacaaaaagaaccccccacccccccgcccgccttggcagtttattttcttgtgagggcgaatatggtgtaaaatacacactatacaagatgataaagatattatggaccggccctagtgcagtggctcccagcactttgggaggccgaggagggcagatcacctgaggtccggagttggagaccagcctggccaacatggagaaaccccgactctactaaaaatacaaaaattagccaggcgtggtggcgcgtgcctgtaatcgcagctactcgggaggctgaggtaggagaatcgctgtaacccgggaggtggaggctgcagggagccgagatgccactgcactctagcctgggccacagactccgtctcaaaaaaaaaaaaaaaattatggaggaaaagaaaggaaggtagctaggaagtagaggtgaggggctgccattgaaaataactttcagatttcctaaaataagcttctctttttaaattttgttacttgaaatccccagtgtataaaaatgcaaacttacaaacttccaagaagttcacctagggccctggcgccatactttgctctgtgtgtacgttctgtaaatgtctccttaataaacagatacaggcttcaattcataaaagttccatttgatcaatttcaggaaaatcaatgtgacgttaagcaagacatttattgtgcccacagcttcaccattctggtctctatgattccctgcgaagattgctgttatcccccagagacacagctgagctgtctctctaaagggcctgtgttctactcctgaatctggtttcccctaagcttttatctcaccctggtgacagctcagaaacacacaaactctgtgttaagaaaactaagaagtcattcatctgcacatttcccgaaatcccccagaagcccgtattagactgaatggtgtccttattgcaaactctccactttagccaaggtgcaaagtcctcccagtcccccaggagcttcccttctctgagcggtacttaagttttctgtaaaaccactcagttcaacaaatgagcttctcaatcttagtttctgcttgttgactttaaagttaatctataataaacacactgcagtcctcttccctgactcattgtccactttgtccatttgtgtcctcataccagattgtctcaattctcttaactggtgagatattatgaactcaaagcattttgcacaatgatattccaacatgctgcatgcaacaagcagacaataagtaactagtgagggaaatattccctcatactcaagagaaccctttatacatttttaaatattttagggccaggcttatgcctgtaatcccaagtactcgggaggctgagatgggaggatcacaggagcccaggagttcaaggctgcagtgagctatgatgatgacagtgcacttcagtctgggtgacagagtaagactgtctctaaaagtaaaatatcttaatactgtacctgacatctgactagatgtacccagcaaccactatgtgccataatctctggataaattctatgaacattcacttagaaatagctgcaagtccctgaagacagtatgacaaatactgaggcccacagtttttgggtgatcagttgcataaaatgctaaaatagatggttcctgttttgaat

SEQ ID NO: 44928 - DNA, 3869 bp, Homo sapiens
ccaggagtttgagatcagcctggcaaacatggtgaaaccccgactctactaaaaatacaaaaattagccaggcgtggtggtgtgtgcctgggatcccagatactctgtgaggctgaggtgggaggattgcctgaacccaggaaacagaagctgccatgagccgttatggtgccaccgcgctccagacctggcaacagagcaagaccctgtctcaaaaaaaaaaaaagtccaggatcaaaggactatggtctgggcctgcagcccttcatatgcccattcaataattccacaaatactcaataagcacctactatgggccatgtactggaatagtaaaactctgtcagtaaagatgggtggattctgacacaagagtgcatttacccccacagacccttctcaagcacctactgtgtgccaggcagcaccaccccaggcactgaagacaaagtagcacagggcctcagtgcctcagtctgacccttaggagctgagttggtccagagctggggtgggcagaatgaaggctggccctcggtagtctgctctggccttctcctgcctcagtggagaagtttaggcaacagaggagccctttcccctatctccccaggagaggggaggctagtcaaggggacagggaccccgggcggaacgggctctaaaccagggtctgctcctgcattcaagatctccacatgcaaacttactgctccagcttgacaatgtccatttgtaaacttacaagatttttcataaattaagctgaaagttactcaatacctggtatacaaatgcttgtcaataatagtgaaagaatgtttaaaaacaggagctacatttattgaaccccttccacaacgccacgtgtagcaaaatggtctgcgggggatgggctggattcacccaaaaagccccaagggtgtcagggtttctacttagcccttctccacaccggcactgttctaaaggtttcatgctaattaattcattttattattccccaaaactcatcgaaggagaggtacaattgctcccgtcctatagatgagaaaacgaaggtatggggacttcccagctgtgtgaccttgtacaaaccactaagactgcgggcctctaatccaaagtcaggctccgaaacagtttccagaatgcaccgccgcatttggcgaatgaatgaacgaccgaaccagtaatcactcctaagaccaagaaggccacatccttccccgtggggcctccttttccgaggccaaaccttcagcccaggcccgagctccggcctctaccgcctaagtcgactctcggccggcgcgttccgctctagaaggctctggcacaggcgggcggtgccgggcgccagcttctgcgggcgtgggccggccagggcgcgtgggcctggggactcggggccacggtcgtcacgtgagctcatccccgaggcggcagcgtggccggcacccgcccgctggcctggtccggcgagcgtgggcggcgaacgggtccccgccggatgcacgctggtgggatccagggccagagggcgccgccggggaaggtcacctagacgcgcggcccgccgggcctccacgcggccgcccttgcacttccgcccgcaagcccgggccgcctctcgccgccagccgcaggcgtctctggaccctcggcctcgcgctccccagcccagacctgttcggcacccgcctgtgcggccttctctgcccgcccgctcaccagccaggcccgcgccggccgctcgcgatccctccccgcggccgggctgccggggcccctcgcccgctcctccctcagcgcctccctctcagctccccaggggcctggcccccgccgtccagggcgcaaggaagccggggtccttttccgctgcgcctacctcagaggatgtggcggcgggctcggaggcggctacggcgggggctgcgacgcggaggcagggagccgagccagggagcggagccgagcgagcggctgggccaagggcggggcggcgcggacggcggcggcgcggacccgcctcccctcctgcgcgcccggcccggcgcgctccgcccccaggccccgcccgggacagcgtccaggccgggccagggtccccatcccgctagcgagccgcgttcttacccttccgggccccgctgccccggcagcagacacaggagcctgcgggcgtgttgcgggcgcgcgggaggacctgcgtgagtcggggcacggggaggcgccggactgacgtgtgcaccgtgtgtgcgtgcgcagggacacgcgggttcttgctggaaacctcggccccagtggcagcgctcgggaagggggaggaggccttccgattctctgagctgtggcccggaggtccctgcgctaatggaagacgcgcggggctcctgggcctcctgcttggcctccgcgctgctagatcccccgggagttgatgtggccggcgctggacccaagcctcgcctgggtggacaaagtggcccccggccccccatcaaagcccgcgtgggccccatcccccgagggcagtcccaggcccagcgcggacactgggcgcctggggcggcgcagatacagagtagaggcggcgactgttgctcccgagctccgcgctccggatacaatgtgtctggcgcctccgacccgcccgcgcggcgtctagacaatctcagagaaaacccctgtgcgccgattttgcactacagattagcgattttctcctgtagcaaagctactagcagccaatttccatgcatttgagaggcaaaaagacaaaataaaacaaaacgtggattgggttttgcgaggtccctgctgggtctctcggcgcgaggagatcacgccggttatggccggccggccgactgagggcaccccgggtaacccccgcgaccagccggggcgtgtcctgcgggacccagttagtgtgtgttgagtgaacggtcacctcgctgctaggcctaagcgagtggtctcgttcaccactgagtgtcccctgtgttacgcgcgaggcccactcgaagcaggtttcgagaattaattcgtagatggacgaagattctacacatccttcgcctttgatcaacaaacgtcctggaaggcttgaggcgtctagggccctgtggaggaggtgccgggttacagaatcaggacactcctcacagccagctgcgacactatctaaagcagtgggcaactggggctacggaggaggcaatcaggactggctgctgggaaaaggcggcagattaaaagtggcgactggagttggaaaaggtgctccagtgggatagggtgctgaggaagagggcagctgatacagagtgggagtggggtgcagacaggttacctaggccctgtgtaggggctgggggaggggtgactgggaatgtaaggaagagcccccttcaagatcctgaggagtgtaggacggattctatgaccctcccaggcgcacgagttgcctgggaactctgggcttcccagcctggtggtccccaccccgcacactgagactggtgggcagggggaggacaagaactcagggaggccgggcgggacaaggcggggctccaggaaccccacagggctaggaacagatgccggtgcaacccagttttgaggctgggagcaaatgtcgaagggcttcctcccctccagcgccacctctcaactccgctttaaagaaccaatctgggccgggtgcagtggctcaagcctgtaatcctagtactttgggaggccgagacaggcagatcacttgaggccaggacttcgagaccagcctgggcaacatggcaaaaccctgtctctactaaaaatacaaaaactagacgggcgtggtggcgcgcgcctgt

SEQ ID NO: 44929 - DNA, 2717 bp, Homo sapiens
atgaatgacgtgtggcataaaggcaggtgactgacgtagatgggcttatcacccctctatgcaggttgcacactgtgttagtccgtgtttgtgttgccatgaagaaatacctgaggctgggtaatttataaagaaaagaggtttaactggctcatggttcttctgcaggctgcacaaaaaagcatggtgcgggcatctgctcggcttctggtgaggcctgtgagtgtctcctaacgaggaagcttccaatcatggcagaaggccaacaaggagcaggtacatcatgtggcaagagcaggagcaagggagagaaggaggaggacccagattccttcaaacaaccagctctagcatgaactaacagagcatgaactcactcattaccttgcggagggcaccaagccattcacgagggatctgcccccatgactaaaacacctcccaccaggccccacctccaacactggggctcatattccaacatgagatttggaggagacacatatccaaaccatatcacacacctgggggacagctataggaatcgtgcctcttgggttgtcaatctgccagaaacaatggactcacagccttggcgtgggctggggactgtttagtctgcctgtggagtaaataatttaaccttgcccagggagaggcctggactttgccctcagcttccagaaggtaatctctaagcccttgcaatgtcatgccagataggaggatatttagggcagaggctggccacaccagataaacgaacaatgtgatttagggtggggttggccacattggataaactaatatgtgattcagggtgaggactttgagtcaagcatgctcagctggatctctggagaatggagacgatgtcagccctgtgggcatttgaccagggagccccagtaaaaactctaggtcccaagtctagggtgaattttcctggttggcaagactccatgtttacccctacgcatcatcaccgggaggactgcacactctccatatgcctccatcaggaaaggacaatggaagctctgtgtttggaaccctccttgactctgccccatgcatctcgcatctccccgcttggctgattttaatctgtatccttcccctgtaataaaatgtgactgttaggataagatcgcactgagtccctccagttacttataaaatgtgtgaaggtgttggaatgaaaatggagtcattcgtgttaacaaaaaacaagcaaacaaaaaaaaaccctacaagtagacacagggaaggccgtgaagggaaggttctcctgcatgtacacctaattacaagaatgatcacaaaagactgcaaaaaccacaactttggccagccacagtagctcccacctataaacccagcactttgggagtctaagggaggcggattgcttgagcccaggagttcaggaccagcctgtgaaacatagtgagactctgtctctatgaaaaattaaaaaatattagccagatatggtggtgaacacctgtagtcccagctactgaggaggctgaagtaggtggattacttaagcccaggagattaaggctgcagtgagccatgatcgtaccactgtgatgcagcctgggtgacagagcaagactctggctcaaacaaacaaacaaacaaacaaaaaatagagtatttatttccccacctcctatccttccaggcagcaacataacagaagccacatttctctacctaaggctacaacaactctaaggttgcactatcccacagctgccccaacccccatcacatacgcacatgcacctgaatgaggactgacttctcctggctgactgaggcctggtatcagaccaagcacctggcctgtctgagaccacactgcctatgtgctcttatttctctagcctcctcctgaatctggagaggacttgcttcctcactggccccacaccaacacctcctcctctgtcctggttgccaggaacgactttctctctgacatgggcaatgacaggtagatacacaattaatagccaggttggctaatgagctcgcaagcgtccctgcctttgtcctcaccccatcctttcatacctgccccctgtgacctactctctagcctttcctgcttgaagagagactgtgtggggaggggtatgctgaccatcaggattttctctgggaatatcatggctttcctaaaactcattcagtcccacctttttctaatgccactgtttcgccaagccacagataaagcctttcctgccagagccagcatagtcagaggcagcaacagcctcagatgcctctcaaagtccaaaagtttcaggttcaaatctaaacctagcagcctgccacccaacctgttacaaaacaggttcttccacgactcccccgctcacccctccccagctcctgtttacccctgaggaaatatttgcttccccttaactgtgctaaaggctcctccccatcaccacagccaaggaccccaccccttgtatcgctaaaccccaaacataaacttcccaattccgcacacttaaatctgaagagggagagaatccagctttgcttcctccctacttggtgtggcttcagtgtcatcctgcccagtcataaggccctgggccatataacctctccacaagcctcaaaaggtatataaacatgctgcatttttcagggattatggaacaggcttcttttttgtttgtttg

SEQ ID NO: 44930 - DNA, 626 bp, Homo sapiens
acaaaggtattatacttataggattgacacacagttcagtaaatgctagggcttaggttactatagatttgcacgcaagtcttccctctccattgcaacccttgccacttctcagagaccagcggagctgctagaatttccttgtctggtggttcacagctttgaccaaggtttgccaaagacacctgcagcaaaggcctctttcaagctaatgcacaatcatccttccatggggataaaggtgatttgtggattcatgaccctgagtcataaatctaccagcaatctgctgcagttggaaacagcagctttctggcccttggcaagcctgcatgtacttgtgagtcatctgagcacaggtgcatttcaattgatagaactggatatgggtcctgaaaggttagatgtaaagagaacctcatttcaaatgccctgggggaagcccttggcttcctagaatgggtaataccactgcctggcttttgagtgcagttatatactgatgtattgggagtgtgaggtatggtgaggaaggtgtgcacagtggcaagactgacacacacgcatataagtgtgtgtgtgtgtgtccagaatggcccaggttgtgttcctttagagcggtgtcc

SEQ ID NO: 44931 - DNA, 598 bp, Homo sapiens
gaggcggagcttgcagtaagctgaggtcgcgccactgcgctccagcctgggtgaagagtgagactccgtctcaaaaaaaaaaaaaaaaaaaaaaaaaagacatgaaatggggcagctgcctttgtgctccccagtgagaggccctaatgccaacgagcagcctgcagagtagggaggagctgccctgggccccacagctgccatgtccagggcaaagtacacactgatggggctgccagggccactgctgggctcctgcccagactgcaaaggcctggggaaacccaaggaaatgtcttcaatttaaccaagaactctgagtttcccacgtacatgctgcagaacccaagagtcaccccatttgggagcatcagttcctccacatgtccagtttccttttctagcatttcccaaggggaactccacaaaatgccaatagacgtgccatgtaaaaaaaggtggtgtggtcaaatacatttggaaaatttgagattaaataaaacggttgttttctaagcagaatatctcagtgcctttatttaacatgcaaatatacgtctcaaaaatccaagaggaggctgggcacaataacacacac

SEQ ID NO: 44932 - DNA, 1322 bp, Homo sapiens
gccaggcttgtctcaaactcctgacttcgggtgatctgcctgcctcagcctcccaaagtgctgggattacaggcgtgagccaccacacccggccaaggattcctttctttcagaccagtcctctgctaacctctgacaatgctcccctctcaacctcctggacaggtggtggtgtcctggtggccctgaccaccagctccatctttataacatgaagacccttggccccaggcctctaggccttctgcatgagctgggcctgatcttttccttggggctgtctgcagcctgcacaagtgaggggactaaggccacggtgaccagggcaagtccagctcctactcttaccctgaggggccctcccagagggttgagtcacctggggagggagcaaagtgcaaaaggtccaagttctagtccacaatgggtaggaaaacaaaccagctcagctgcaccagatccaaagtcatgtttgaaggcctgtaattttgaaggccgaacctgttcaggagcagtgggcaagccaggctggactccaggctctgatcctgaaggagcaatgagaagggagaccaggcgccgctggggctgcacaaatactgggtaaaattctgacacagaggagaaacggagactcatagagagacactgtaggagagaaggaaggcgggcagagaggtggacaggcaggaaaggcaggactcattgaaacttaccagctcacagcctgtgtgcttcaggtcgagcacagactcttaaaagtagggctttgggtggactgtgatttaggccatcaaaaaaagccagcatctggttgggtctggcttggggagggtggctccggcttaccctctgtcactgcagaactgctcttcaatgggaccagccttttacattcccagaaagcccctctgcttctcagggccctaaaggtgccgtttggggatgctagaggaggctggagcccatggggtccctctcacccgcttcctttccacttcctcctctggctcatgctccttatctgaccagcctggcgcagtccggcacagctgcagagggtcagagcatcacgtctggggagtcataatgaacatgctgcacggcctcctggaggcagcctttctcacctttctcaaccaccttctttttttaacttttactttttgagacaggatcttgctctgtcacccaggctagagggcagtggtgcaatcacaacacgcagcagcgttgacctctttggcttaagcaattctcccagctcagcctcccaagtagctggactacaggcgcatgccatcatccccagctaattttgt

SEQ ID NO: 44933 - DNA, 787 bp, Homo sapiens
cggaggagaaacctgggcgcagaaagcagggggaatatctggttgtaggtgagtaagcggggtcaggagttcccgttagagtctctgcgtttcgggagaagggtgatcattcccaggcttgtccgacgtctctctcagggtgcgctccggaagagcgagccctttaaggctatgccgagtgggcgcgtcccggcctctcccgggagaggagaggcggggcggacctgtgtcccgcccccggcccggcccgcccccagtgcccgccccgcccccggcactcggccggcggcgcctttgatgttccgacccgccagctcgcggagccgctctgccccgcgccctagcccgcgcctgcagcccgcccaggcggagtcagcccgcgctccgcccgccgcgatccgagctcggaggttcggactccgggctcgccgccccccgggccggctccgcgccccgcactcccggcgcccagcgccccgcgccccggcgggcggagcgcaccatgccgcagctggactccggcgggggcggcgcgggcggcggcgacgacctcggcgcgccggacgagctgctggccttccaggatgaaggcgaggagcaggacgacaagagccgcgacagcgccgccggtcccgagcgcgacctggccgagctcaagtcgtcgctcgtgaacgagtccgagggcgcggccggcggcgcagggatcccgggggtcccgggggccggcgccggggcccgcggcgaggccgaggtgagcccccgccggcgccggctcctcccccgcggt

SEQ ID NO: 44934 - DNA, 862 bp, Homo sapiens
cgaaaacagcctgggcaacatgaggagacctcatctctataaaaatcaatttaaaaaaacaaaaactagcaaggcatggtagcacacacatgtagtcctagctattcaggaggctgaggcaggaggactgttggagcccaagagttcgaggctgcaatgagctgtgatcacatcactgcactccagcctggggggcagaggtgagaccttgtctcttaaaagaagaatcaaaaagctcttcgggctactctgggcacactgcctatggggtagtcctgctctgcaaggagcagttaaaaaaaatcttcaaaagctaatggtggcaagcaaaagttaagcttgtaaagggtgctgagagcaagaggtctgctgctctctcaattttctcttttctggtggaaaatcaccttatattcccaaactgccttattgagagcctaggcaaattaacttaaacaaaatttatgttgggatcagaacacagcccataggattggtcaatttttacgtaaactgaaaaatcaatgtgatttggaatatctgcctgccctaagtgagatgcccacagtgactcactgttactatcctccctccccagctagttttaagataagctcagcattactatgatgtcatgttacaaggctgcagttacctgtccaaccaagtcacaatatagttcttgcttaattccaggagctggtgtattctgacagttgtagagtaaaaagtcacagctataatcccacacagggagctacaggatgattttgtgaatctctgagaaaatataagaactgtaaagcagtatctattttgtataccaagaatagattaaggcaagctaacacatggcacttca

SEQ ID NO: 44935 - DNA, 2494 bp, Homo sapiens
aacatgtaatttttatattagatagtactgaaatgaacagtgcagaatcacaaatctaacaatgcagttgattaaaattactctaaaagcaagacgaccgtttcatatttctttcaaataactcaagataagtgcttagtcatagtcaagtttgtggattgggttactcttaagggagttgagaccttactaaatagcagctggtcaatcggttaatctgtaattcgatgcacttggtaatactaaactcaaagataagttttagtgttacagtagaataaagtgcaaaatttttaagtaataatggatgaaatatttatttgaaatgctttcaaaacaattccattctaaagaaagaggcctaaaggctcctgcacttgtaaataattctccatggccagcataaagcgggttctatcacatcatatagaaaaaaaaacccctgcgctttaagtgacccgaaattctgacactgctttttagactgcacagtggaggagacggtattgttctatgaaacggatacattctactgtcacgctctaaaggaaaaatgcatgtccctaaaacccaaacgtgaagtttccattaaaagtgaatcaaagcaggtagacgtcctatttctttaaaagccagatacctagagttaagttatacacagttaaggctcctacaagtcacaccactctgacgatggtatctgctcaacgactccaagtcatggcaaaacaacgctaagaaatattcagatggagcaggcggctatgtgcagaaagccggcgcccgcacacggttagccaggaccgaccggtagctagtgacgccagacacggtggagaaaggatgggagccaagaaccgggcggcctcagaccaccaccgcagctctccctcccgaccacaacaaaagccagacaccgacacacgcccacgctcacgacagccaagggacccccattcacaaccccgccgccacccccgccctggtccccgggacagcaggcttaagaccaagagaggcccccggccgcagcctgggccttgcagccgagctccgcgccggctgacgctcggccggtgcagagaaggcccagcccggggttcggctcacttatggagcgccgtgaggacgcccggccagaggaggcctcgctgagtcgggggcggggcaggtgaacggaacctggtagggtctcccgaagaacagggtcgacaacgcgatccaccgggcccgaaagaaggccaggcccagtcaccgcccgccgcgggcaggcccaaaccgcagcggtgaggccagccggcacgcaatccggtagccacgaccctttccagttcagtgggcggctactcacggtgttcggtgttaaggagacggccggcgggaggctgacgagagccgggaggcgttagcgaaggaagagaaaaaccgaagacgaagccactacagcgtcgcagcgcggcgcggcgtctgctttataggagagggcgcaggcgccgaggaccccggggcgcgcggcgtcacatcgcggctgggctggccgccgagatcgcctgacggcaggccgagaacggctgggcgggcccaggccgggaggcggcaaggagctgccgggggcggctggccgggggatcggggggccggaagagttttcgcctctccccagctctgaaagcgccgcgctgtctcgtcaactgggtgccggaccccgactggcctagaaaggtctttcaggcagcggtgccctaagccgagtgaaagaccccagttaaaaagcctggaaaaaacaaaaccgggcgagtgtgtgcgtctctgtgtgtgttcctgggaacaacagaacggggcgtgtgtgtgtgtgttcactcctggggggggctgcgtgtgtgtgtacgcgcgtgtgttcattcctgaggtgtatgtgcgcgcgcgggtgtgtgtgttcattcctggggtggggtggggtgggggtggggcgcttgtgtgtgtgtgttttactactgaactgatacagcttgtccagcttccattctccacggtaaccctccgaggtgaaatagtgttagccttttcgcctctgcagtgagggaacaggttcggaacggttaagtggcagagctaggatttgaaccttactccacaattaggtgctgttagcccttatttcctactattgacttctaaagaggcttccatgccaaacatagccatcgttatagggaaaccccaagtctagagagatggctccatctagcagtaggtacctactccttcactaaacatgctttgagcccgacgtgcgaggcgtggtgctggggattccgccgtgaaccaggcagccagggcccggcctggacgtaactcttctctagggtgctcccaggaaggctttgatgaggtcgatggaatgaagccagctgtaaaggaaagggagtagtctgaaagccccaccctgttctgctcgggaacattactctccccatcctaggagactgggcgc

SEQ ID NO: 44936 - DNA, 2638 bp, Homo sapiens
tacaatctcagtcgacagttattatcactactactacttgcagccacaaaatactatcaagtaatttttgcaacaaagatacaaaatttaccgctcttccattttatgttgttcattttaaaaataaacggcaaaatgccaagtgtgttaagcttagagaaggctttgagtcagcatataaatcatattcaaccgacacttgatttccaatccaaaagctccttatgtagtatgactcaccaaattcccgatttcttccaactatgaaaaataagttacactcctcccttatagctaccaccatgaccttcgtaaaaattaggttaagagaataatttaaaaattcttaaagacaccccttaccttgatttctggagaagatcgcttggtgagtttaatacaaaccaccaaggggtactaaagctgtgtgacctttaggtatgttctgggatacggcctaacaagactgcctttgggggatcctctgggcagctctggacctaactaggcctgggtaccagcggcaagactcttactcagcccaccggagaggcccaggctccattcccaagccgcagaatccaagccagctcaccctcaaaaccgtccctgacgatgacccacagggtctccgctccccctgccacctcgtctggcgccaaggccggctgactcaaaagcccaggagtcgagtgaacggcgccattttaggcggcggcggcaaccaatccctgcgcgggaggcagggggcgccgggtcgttaggaagccgccgccggccaggatgggcgccggtctcggagactcggggggcccggaccggcggcctccgccatgttgcaccctcctcacggccgccttttcctcggcgggctcggccccgcggcggctgtccgcagccgtactacagctcaccttctcgcagaggctcttgacctgggactcggacagctgcttgcactcgttcagctgctcgatccactggtccagctccttggtgaacaccttctcgtccatgatgccacccgccccagccggctgccgctccgcgctgctcccgcgccgccgcccgcacacgggcctacacgcacacgccgccgccggttcctcgtgtacttctggcggctgttgaggctggcgctggcccgctggctctcaccgcagtactcggccgtcggccgctgcgcctcctcctccgctcgctgaggctccagagctcggctctctgtaatggcggccgccgggcgtggtgacgtcacgcccggcgtcaggaggcggcggggagcggaggggaaaagggccggggagcaagctgcgcaactgcagagccctccccgggcggccgcacgaccggagttggggcgcaaactgggggtcaaagcgcaggcgcgacgtagccggctggtaactgaagcgccttgactttttgggcgtggctcccggagggcggggtggtgggggaagggaaggatggagctggagcatgcgcagtgcgcacagcggcgaaccggactaatccctgagcactattccaggagaggcgagggcttgggccgcgcgcaggcgcagaccggatggaagccggggccactggcagcctgtaactggttcccctgggaaggccgctctggtgatgaactcagctcctcacctggggcctggcagtccgatcacggaaacgagaattgcgaccccgtggctcatctggggtgctgcggctctgtaatcgtgtgggtttccgtcatctttgggggcaggaacgggcagcgagtggccgcttggattaaccacccccacctctgggcgcggctggcaccttgtaattaggtcactcgtaggtggaggagcgtgtacctaccgggggagtgctgcgcagtgcacctgacttccgcggcacacacccgtccccggacctaggtgtctcgtcgggcgcgatggcgggggcgaggcttgggcttttctttgggcctcggaccgcggctcgcttccacgcgccccgctcctcgccggtggttgctttcctccaagtttaattctctctgggaatgagagaccctcaacccctgcgcgccctggcctactttcaagaggggaagcccagagaagatggatgcacctgtcctgaccgcgtctcggtggcgtgagaagcagctgtgatacgtgcttaaaagagagagctcgtataccctaggattggacctctgtctggttatgaatcgctttggagtttgcgaaacgttttcacattccattgtccctgcttttacataaatatctggttccatagagcgccagctatatgccagatccggaggggtcatccagacggaccagggaccatgccctggagcttgtattctcccaacagtactggctgaagatggtttgggataggcagaagagagatcataatgcccccaggatttgaaagatatagaagctttccaaagaacatttaaccataaagggcaaggcaagagctgaacctgatcgcctgtcttccaggaaccccaccctcagtatcaggcaacccttccacacccaagtgctcagcgatgcttgggaggagactgctcactctgcggctctgagggcatcatccccaccaacaggctgaagaaggcactggaggccccatc

SEQ ID NO: 44937 - DNA, 1255 bp, Homo sapiens
gcatagattcagccatccaggacagttctattaaactggtaaggtttaaaactcatcagaaattcttagaattcttgaattgatctgaattccattcagatacatttaagctctcttaaaacaaccatgtatggaggtaaatgaagcacctaaattataaagagagctgttactcattttcatgctgatgttttctcatgtcaaatgaggataatcacaatgataacttctataagaagacagaagacacaattcatgatgttttcggaaggaatcaatgaatttttcaggtgatttctgaaagaggatcccagaaatcaaacaatgactatctttcttgtgctcatgaacttagaattacacctcaggacttacaataagcctgggtaacagcccattacgcaaggatgtgaatcactctgaataccacagctatgaccattattatgggcaattataagtaagcaaggaggtgggctttgtaaaacagtatgaaggaacagagggagaaaggtatacaccagtatgtgcataaacaaacaatcagaatccagaagatatttactaccaaggggacctaaacataaaaaccataatataagctcggcatgcagaaagatgagcacaggttaaaacctggagacggctgctatgtgacaggacagacacagggattcacaaatggcctggatggttcccctaagacaaagacatccaccatccagtggtgcctgacctatcctttttgaagggctcagcatggctttattcccttctatcccttgccccagaaatgcatcaccccctcagggtcctagagcctacctgttcctgcagtgtctcttggttagatccccgtccctatatcctcagagtcattaactaactcacatctttgggctcttgatgttccatttaaaaaggtcagcattggcttctactccatgtgaatccagagtcagcatctttccctgctgtgtcagcccaggccctgctcttttatcttgaagaatcggctcctgtagctcattgcaaggtctcattttgagtttggattctcaggctacctttaccatcctcccttcgacttgattcaaagtctaaagtgtgccatgtttgtttatttgtgtatttatttattggatttaaaatatctttctcctgagaggctcaaagctcataaaaatttttcaaggagcagctacttaataatgattaagaagttatgctaccatatgactaatccagaaatagg

SEQ ID NO: 44938 - DNA, 656 bp, Homo sapiens
atgagatttcacagcaaacctaattttttattctttgtttattctgcaacctctgcctcccgcgttcaagtgggaaatcatgagaatgaactctccatgaaaggaagattagagaacctgcttcctcacgaacgactcaaaggttcccctctggagaagtagagattccatgtcatgagccaatgccatggtgtcacacgttgtgtcagagctacacacatagctcaggaatgtgagtgagcacagtggacaagggaagtacttgtacatccagagcacagtccagaagcaacagtctatgggagtttccccaggcctgatgctgctggtttctgttttgttggaaatattttaagaatttgacttttttatttataggtttatttcacctatttagtgccattcacaaaggttagaagaaaacatggagtcatgtaaaaaaaggttttttgttgtcgttttgtttttatagatttaggggtacaagtgttgttatgttacatggatatagtgcatagcggcgaagtctgggttatttcatgtaaccatcacctgaatagtgcacatcaggctcattaagtaatttttcatcccttactcccctctcacccttctaagtttcaaaaaacagttttagttataagggatatatggaa

SEQ ID NO: 44939 - DNA, 876 bp, Homo sapiens
ctcatcaagtatgattgaaataataggtgatcaaataaaattatatgactaaatgtaagctgcaattttattaggatgtaccagtcaggtagtttttataaattcatgttcaaattaagaaaacatgaataatttaaagattaataaatttaaaaacaaatttaggtgaatgtacatataactaacaggatttacgatatacctgtaaaattatctagttagcatttttgtgtatgtaacattaataaaaaggatttttaaaaaaccatacagtgattctgggattccctgaattttcagctgctgcattttctactctacatctggcaagttcttcttcctttcagtttgtgcatttcctgtattctaaaaagtaaatagaaacaggtctttaattgaggacatggtgagtctttggctaaggaaatacagccagagataaatacttgtactttgcccctatgggttgtttcataaggtacagggaaactatttagcaatgtattccttatcattatcatccaacaaaacaaaaggtggcctttgtatggactcttttctctcttgcctaactcactcattcccagtaatttagtctctctctggttatagaacctattcaatgcatgcacgcacatttgagatagctgaaagagtttaaaaagtaaacctggcagggcgtggtggctcacacctgtaatcccagcactttgggaggccaaggcaggcagattacctgaggtcaggagttcgagaccagcctggacaacatggtgaaaccccgtctctactcaaaatacaaaaattagccaggcatggtggcaggcacctgtaatcccagctactcaggaggctgagacaggaaaattgcttgaa

SEQ ID NO: 44940 - DNA, 1555 bp, Homo sapiens
tttcatgactgttccgtaacttccctctcccacttttccaagggtttcatacatctccattttcaagctgggcttttactactttatagaaataaagaaagaaaatggaaaatgttaaacgtttatacttttatttattaaaactagataatgcatatccacaataaacccacagtctcaaatatagagacattaaaaaaaaaaaaggaatcttttccactgagcctttttgtctttgggaactaaagacagcttgagtaaggtgtccttctgaggctccacctctcaccagaacttaggggtactcctgctgtctcggtcatgcccatcaacactgagactaccacactataagtcaccatccatcaagcatggggtccctacacttcctgtcatgttcctgtcaaataataggttcccgcactactgcagtcgcccacttatcaggcccaaggtcctaaaaaaagcctggtctcgcccgcaactcaaaccacacgtcttaggatgccggaccggcgtcacgccccacgtcccgctgttgactttatccaaacagccgccgccgcctcagcccattctgtggtcccgctggtctggctctgcgtagttccagtggagccaccgaacactgatactactttgttgctcagccccgcaaggaaccggccacttgccaccatggaaacgccggcggagttgctgcgttctagactcgtgcgcaagaccggaacatgggcagggtcccgacccggaaggggaagtgggaagaaacggaaacctactctgggtaggcgcaaggtggaagagtgctgtgcttgggaatgggggaggggagtacagattgctgtcgcagctgagcctcctcacaaggttgcttttgaatgtggataggaaggatctgcatcttttttttttttttttttttttttgagatagtctagctctgtcgcccaggctggactgcagtgtcgctgatcttggctcactgcaacctcctccttccaggtttaagtgattttcctgcctcagcctcccgagtagctgggattacaggcgtgtgccaccacgcccggataattttgtatttttagtagagacggggtttctaccatgttggccaggctggtctcgaactcccaacatcaggtgatccgcctgcctcggcctcccaaagtgctgggattacaggcgtaagccaccgcccccggtcaagatggttcttaaatcaaaaacttttcttgaacacttgccatatgccttttaattttttccaactgctagtaatcttttttaaagaaaaaaaacctccctcaccacatgtcaaactctaggaaagcaagtaattcgaagagttccaccatatacgaaatgatgtacaagagcacggaaataaagaggccagtgtctaactgcttaagtagacatagagttcaactggaatgacagtccctaatgaataaccaccatatcactagaccaagtgcctagggagtgctttctttattgaatagggctttctttgctttcttctataaaatgagttaaatgtaaaaaa

SEQ ID NO: 44941 - DNA, 2687 bp, Homo sapiens
acagttccccaaatggatacaaaagtactcagagtccttagtataacaaagtcctgaaggtaggaattggaagcaatagagggaaggacggtgaccacagaaaatattcaaggtctttgggaggtcaacacctctgaaccccctggtggtggggggcccttctggcccatttgcacctttcttgctagtgtagaaaacctgaagttatctcaggctagatatataaccctcactcatgtctgccggagctctcccccagaatatgaatcatatttgtaggtttctttgacaaccaaccactcattgatatgcttggaagactgcacccccacattccttaaaaatacaatggtactcccccaccataggcaagtccccggactctgacacatatcttcaattgaaagcagacccagaaaggaaaaactgcataatacaccatcctttaatatttgcccagaatttccaatactagaaaccccactgcaaagcagaaagactatctggtagcttcaaggaaccatttcaggagattgttgtgtgggcctcagtattcaaggctgccttagaagatcgtgcgatcctctcactcttcttgccccaagtaccagagttaataagccactgaaccaaccagaggggaattatttttggtcccggtttaaagaaaacaaaacaagctgttgattctgccatgacctcttgggtaatgttgtctctatacctgtgataaacagaaaacaactaataaaggtttatcccgccctcaccctcttaaacccgcttcacagacctggctgaaactcacatccaggcgaggcgctcacgtgacccgttctaaacgcgtcatagggacacgtggttctagatacttctccccctcccactcaggggtggattgttgacaaggccgcgggcagtcacgtgatcttacatcatcccacctcctttccctgaaatctctggcccggatgcgtccctctttctccaccccgccgagcctaaactagtgacggggagggagacgggatagtgtttctgtttcgtggtctttgaatccacaacctctagtctgaacacagagaacacaaatttgtctattacttcaggaagcccagggggaaccgcgccccgctgaagggctcggggaaggcgcgctcccgcgtcccgccccctcctcccccagcactcacactgtggtagcggcggagggcggagggatccggaggcggcggagggagacgtcattgcagggttgtttgtcagtctcggcggcggcggcggcggcggcggcggcggcgatccacagtgattcggccgccgcgccggggggtgggggggctgcgcgggactttttttttttcagactgaccgcggggcagctgcggagcatgtcgaccccggcccggaggaggctcatgcgggatttcaagcggtaagggccttcaccttcgcctagatgacggcccctcaaagctgcggggctgcagggcgtggatcccagacaccttcccctttgtgaccctcagagggccggctgtgggcccagcgggactggcggaagccgggtcctagcctcggccctactcccataagctttgccgctcgttctggcgcccgaagaaattttgatactgcttcccctccccacaaaaagtaaaacggtgtcgatcgactggtctagggttccctgctgcccatttcggccagctgcccggcgtctcgcccaggcgatcagacattatccgcccgcccctgcaccctgcggcgcccccttcttgtcccctcaaagtgagctcctgcgggagcttgttcctctccggcagcaccagtcagctttgtttcacggccccgccgtcttctccgaggagccgtgttggggcgaacccctctcccgactcctgccaatcctttccatttgtgccctgagggtggggtccagtgcgtgaggcccggaggttaacccatcccccgaaacccgactctgtccccgcccgcctgaaaggaccttgggaactgacttagagatctgggaccttagagctggccaccccggctgccagtgctttctggaactcagctctggctggtgaagaaagcccctatctatagcctcccgagtctggaaaaatgccttcccttagactggcgctaatctgatactccctgggcctcctttggtaaataaaatagggttttgttaggaggtattggggttgtgagatagaaaatgattattccgttgtttaccttttattggatacttagagacatagaaaaaataagtgagaaaacatcattttgatactctgcacatttttcttaacattttttctggggacacctgccctaattgaacaaaatatctagcataaaaacttagatttgtcgctcaggaagtcacctctcagctattataaagcctatgtgaggcacttggatttggccaacttatttaattcattcgtagcttctcttagccatttaaaggtaggcgtcaagcagtgcagttcttctaaggcttctgttcgtggtggcctaatttgcttgagattgactaaaaaccatttttttaatgtggactagttgcaaattatgatgccccatgaaaaacaactgcatatgtatttgtgtgtgtatataatgtagcatttttaattgaggttacagtctctgaaaggagatgc

SEQ ID NO: 44942 - DNA, 2215 bp, Homo sapiens
ccctattttcctaacacaatttcaggaaaatcgaagctctctaatagggagtctcaagatttgccaccttcctcatggaggggtgaaaggaatgccttatcaggcacttcaaaagcgggcctttgtccttttggtgctgcagccaggatgaagtgggctttgagaccttcacaaaaaggcatcggccattttcataagagggaaagcagagaggtgaagctggttcctacttaggaccccgtgggctgtggagtgaggagaaaaagccataggatacagattacatcctctcattagtgattaaaatccatcaatcctgccagaagctgcatggccccaggtatatcacttctctccctaagctttttcatctgtaaaatggggatctccgtttctctctctgcacgtttgccatgtaggtgacaggggctaacggacttcgaatgcatactgcaaaggtgatggtttgagctaataataatagtaatacaaataacaatagcaacctttgaacccgccatgtatttagctcttcaccctttaattattacagccatcataaccacccttttaccagaagagaaaactgaggctcaaagataaggatctttccaaggggcctccagggtgggaatcagtcttcgggccgaccaatgcggatggaggttgggcccgggttcagtctggggcagaggttcgggtcaggggtgagccctgggagaggccttgagggtcggaagataggggacaggatcagccggccggcaggggtccgcacctgcagcctaggaagagatggttggcccagaccatggagagggagagcagctggtccaggcggccactgccgtcgggcgggtcgcggtagtcgggcaggtggcgcaggatgaattccatgcgggccttccattgcttctcgctctctgagtaggagcggaactgctccgcgaagtcggccgcctgccgcacccccgaaaccagctcctccactgcggcagccgcctcgccaccgaccatggtgcccgccgcagccgaggaccggatagcccgccgccttcccgacgcgcactgcgccaccgcctgccggccagaggggccccatcagcgcacgactgctccagaagaccaacctggagcgccctcgcccggagcggcggcctgcgggggcacagagcggctcctggctcctcagaccgccgcagcccgtggctcctgccctgggtctacccagggctacaagggtcttttgcggtcgaccctgcggggaaccggtgggaaaactgaggtccctaaacacagattcggagcgccctcttccagttggcagctggatgccagccagagctatgctgtgcccttgccctgagagtttcccgggcaccgcctcatcctgagcgacatcagggggcccgggtcacggtcgacttccaggggtctccacagccacgaaggttggggcccgccttcctggagcgagtaatccatccatcccgtgaatacttgccaggcacattgctaggtgctggagaggcaatgagagcacattcggagccctgctcgcctgaactttaccatggagtggaggagtggacattagtgacataattgctcaagtaaatggagaatttcagcgttgacaagtattagtaaagagaagttcagcgtgctacaaccatgaataagcaagggacccaatctagtcttggggtcagggaagtgatcctggagaagtgaagaatgagcagttttctgagtaaaggggagtcggtcaaagcaagagagagcatggcctggtaagagaattgcaagatagggggtaggaggggttggggggcggggcagggcaggtagagaatggagaagatgaagttgcagaggtcagcaaggccagtaggccaggcagggatcctggctagatcccaagaatggggagccgctgaaggattttaaccagaacagtgacacctgtgtttacaaaagatgctggaaggagccagaaacaatgtgtccagaggaaatgagcaagtttggacttggttttaaatagagacagggtttcgccatgttgcccaggctggtctcgaactcctgagctcaagtgatccgtctccctcagcctcccaaaatgctgggattacaggtatgagccatcgtaactggctggacctgaaagtttttatttagctggcatgactctgctgtctgttcgagtctc

SEQ ID NO: 44943 - DNA, 1171 bp, Homo sapiens
atctctacaaacaattacaaaattagctgggcatggtggtatacacctatagttccagctgcttgggaggctgaaacaggatgatcggttgagcccaggagttcaaagctgcagtgagctatagtagcaacactgcatttctgcctgggagacagagaaagaccttgtctcaaaaacaaacaaacaaaaaagttaataattaacacttcacagaacaatgtggcaagtccagttattgaccagtttgttgtttctaactttttttcatgattcagacttttttttttgagacagattctcactctgttgcccaggctgtagtgcagtggcgtgatctcagctcactgcaacctccgcctcccaggttcaagcgattcccgtgcctcagcattccaagtagctgggactacagggacttgccagcacgcctggctaatttttgtatttttagtagagacgggggtttcaccgtgttagccagactggtctcgaattcctgacctcgggtgatcttcccgcctcagcctcccaaagtgctgggattataggtgtgagccaccgtgcccagctgtgtttaactttttgaacaaactgttttccacagtgtctgaactactctccacagtgctactggtaatgcatgagggttccaacttcctcacattcttgccaacacttagtattttcccttttttaatttttaaattatagccatcctagggggtacaaagtgatacctcattgttgttttgatttgcatttttctaataagtaatgatcctgagcatctttcttgtgcttattggccgtgtgtatatctttttggggacatgtctattcagatcgcttgccccctttttttcctctttcttttttccctttgttagagttaattttttgtttatgaaatatttcaggccaggcgcggtggctgacgcctgtaatctcagcagtttgggaggccaaggtgggcagatcatgaggtcaggagatcgagaccatcctggctaacatggtgaaaccccgtttctattaaaaatacaaaaaattagccgggcgtggtagcaggcgcccgtagtcccagctgctctggaggctgaggcaggagaatggtgtgaacccaggaggcagagcttgcagtgagccacagagcttgcagtgagccaagatc

SEQ ID NO: 44944 - DNA, 4926 bp, Homo sapiens
gagaggccgaggcgggtggattatctgaggtcgggagtttgagaccaacctgaccaacatggagaaaccctatctctgctaaaaatacaaaattagccaggcgtggtggcacatgcctgtaatcccagctactcgtgaggctgaggcagaagaatcacttgaacccgggaggtggaggtcgcggtgagccgagattgtgccattgcactccagcctgggcaaggagagcaaaactccgtctcaaaaaaaaaaatccacaccccagcctctgcccttcaagattttgtttcaggtggtttggggagggaactaggaatctgcattctcaaaacattccacaggtgcagaggtcattgtgacaggctgctaaaggggaccagaccccaaatatggggctgggagtctagggagagaggggaaatagatggggatgctaccctgaggcgagccccacctggcctctgcctgtttaaggggctgaagggaggaaaacatgaagaagaccatcaaactgggccaggagagctgcctggagactggtgcccggcctgcaaggcaaccttagaagaaaatcagatttgggagatgatgacatgggacattccaggtgacaaaggggcctgggacttgggggatggtgaatctgtgagcacctggctcctacttacagtcatggagtatgtggaactgggaagggaaactgtcattcacatctctcagtcaaagatacgtaggcacatgcatggacacaaacatagccctcttctgcaggagtcagaaaggctggtgattcagagactgggctctgtaatccagcagccctggattgaaatcctgactctgtggctctggctgagtcacctgtcctctgtgagcaacagcctcctcacctatagaaagaaaatgttgccagcagttaactcaatatggctttgtggtgactcgatgagatgctgcatgcagaggctggacacagtgcctgacacaaggagagactctgtatggaagctctaagggtaatactaaaaaatgcaatctcacttctgaagccagggagccataaagtatttcattcagagtgcaaggaagaaagtccacaggaagacatgaagcctttttttttttttatacagagttttgctctgttgcccaggctggagtgcagtggcatgattttggctcactgcaacctctgcctcccaggttcaagcgattgttgtgcttcagcctcccgagtagctgagcttacagatgcacgccaccacgcccagctaatattttgtattttaagagagatggggtttcaccatgttggccaggctggtcttgaactcctgacctcaagtgatccaccggcctcagcctcccaaagtgctgggattacaggtgtgagccaccatgcccagccagcatgaagcctttcatttgctgctacccattccgtatggctttctctgggtgtgtgtttggtgagtcctttgcctttggtttctaggactcatagagaaatgacagacccttcctactgcatttaattggagaggagcacagagacctgagattataatgatgacgtcttaaatgtcaagtgcttcaaaagtctgctgttgcactcactgtcaccctaaacagctctggaaaccaaaaccctgcagccacctaaagcatgccctgagtctctcagccaggtttcatctgggaaatctgagtgacagtgacgtgcaggcagctggaagacgcacagtaaaccgaggagcctgtgatgagctcagaggaggtgagttgatgatctgctatttatagccccactaagaggctctggccgccagctccatgtgagtctgggtggaaatgatgccttcgcagagctgagagcacaaaatgaagttggtgattcatgggcagcagccacttgaaaatatgaacactcctgcgtccccagccccgccggcctttcacacccatttggaggcgtgttgagcagagctgctagcctgctgcatcctagtctgcatgtgtttgggcaggatgtgaggacaggccggttctaccctgacaaggagcctgcaaagggcagcagcacgcctgggagcactccaagaacgtctgcccaccccccgagaggcctcggctggaacccagggcagggctgagtaagaggtaagccccgagaggacctgcggtcacagagaaaggacacttcctgctcctgccctctgtctccaggggcgacgctggcaacagagcagctttctgatgacgcttgttctgctgaacatacaaaaatttacaatgaggaaacccttgcagcttgacatttccccccgcacaattccacagcccagcacctgtcacctgaaatagctattgtttattttcctcagtaacatcttggcttccaggccaaagtctacttggaggcccaaactcaactcaccctatgtgaggaatgccctggaggtctctcagtttcccacaaccaaactggatttaaagggccaaaccaggataaggaggccagctgagctctgaagccagattgtctgggttcagattctttctctacacttgcagccacgtggcttcagtcaaattgccctctgagactcagtttttctcattggtaaaatgaggataattacagaacctacctcactgggttgcggtgaagggtgacatttgagtagtggtcagcccagcatccagcacatggacagacttgatactggacactgctgctgctgcttttgctgttgaagttgttttcactcctgggttttggtccctgtactgatagcactcctttgcacacagtctatggcactgaggttccttgtggaggtggtgccctgaggcttcaatagagaccctctgcccatcacaaacaaaccccatatcaggctgccaagcatagtggacttcaccccgggggcatctcagccccatgcttgaccggcccctgcctttgcctaggaaccaagtgcctttcccttggggctgggctttgcccgggttgactaccctgatgcttctgctcctctatgtcctggggtggtcttgggggtattaactgtcaccatccagtggagggtttcaccgagggtcccaggtgctaacatgaggtctgtggccagcaggcagcctggatgactggccggataggcagcagggagggcctggatgactggccggataggcccacctcacctatgggctgcacttgcagcacaaactgctgattcatggagactcatgaggccttggctatctgtacattctccatctccagctgtcggccaaaatataattgtagttgtcactttggcagagagatactatgatgtgtcctatctccaaggcagtgagcttttggaagataggagggatctgcagctgctcctgtggagagaaccattctggaaagtggtctgtgtgaagtgcacccaggtgcagtcccaggagtggtgtgagcagcagggtgaggccctatattagaatgggcactggtgttgcctgtgtctgcatctacagtaatgcaattctgatgacatcaatgaataacagagaggctgccattgaaatgaggcattgttggcagctatgcggacttggaaaacagccaccaggcttatgcacaagtcagaatccatcgtgtgtggggtaaatgagtggttagaccatggggtacatggtgtaagggagatgatgccagagacatagctaggaccagactgagaagcaagggactcgaagaccaggccatgcagcttggacttgatcctggacatagggaaagtgatgtgattagaggatgtgggggttctgggctcaagcatcctcgaagggtcgcactaagggcaaggctccccctccccacggcagttggcaagcagcggcttgctgtttgagaaggtgtttactcctctggagcatgagtcccacactcagaaggtgctgagactctgctcgtagggtaagcatatgaagggccggtcccagccaggacagctgggagtgcgcagtcagcaaggcaaagcaccaggcttatgtcttccctcttcttccatccttcttggccaggagtttattattgaagcacctgtgtgcagatgtgctaaatgtagatgactgcaccactcaggtcaaaggtcagggaggctcctgggactgagagatgaccccgctgcctgtggatgtggcctccctccccactaaggaaacagcagaggcaaacatccaagcttgcctgatggaggaattcctagaagaaaggttctatccttatgtacttaaatactgatttagaggttggttaatggagacagaagaatactaagtgttgggagccgttaccagtggaggacccacccatgagcacggaagccagagcatatctggaccatcatgtaagtccggaggaagacacgattcagttgacaaaaatttgtgtaccctcctcagaagtgcattgttgtgcaagaaatggtttggcagtgactctcccctttcagctgcaagccatcaagggctgaatgcctctccagttgccagaggaggagtggcttgtagagcggatgttcccagtctggcagaatcttctgtcaagtgttccctgagttgggctgccagggggcaggtgttgaacagtgaggaagtcctctcacctgagcagcttctgatgcaagaggggtgtcgtgagtgcctggaatcctatgcctgtgggtggagcgtgaacttagcctcttccctgagggtaggcagcatgtcataaccacttctggctgcccatggctggtttggggcaatatgccaagatgtagttttgcctatttggtttgctttttcctttaaaatgtacaaaagttaataacatgtaatgggtttttaaaaaattataaaatatgagatacaatcagaaaagtccaa

SEQ ID NO: 44945 - DNA, 2610 bp, Homo sapiens
gtcagataagccactcacttgtatactgcctgcctcatagaagagaggagtttggcgtttgaaaggttatctcatcctcccctctttttgaattgtttctttcataggtgctcccccaccccaaacgacagacagctcactaccttgcagagcagccctagggtgcaggttgccctttgctccttgacccctcctggggctcagactggctttctgtagcattgtcctggcactgacctatgggcaggggccagccagtggcagtggcagcgacgagggcctgctgttgctcacttgtcaagtccgcaggtttcaggggctaacttgtgagcaagccaggggctttctggatggagactcatccctccagagggcagggctgggtgttggtgtgggcagtattctggaggagggtcagggggccatccttgtgcccaagagtttccctcagagtggaggtcaaggggagcttagagctgggaactttgccatcacctaaaaccagactggacttgcctccaaatgacatacttgcattgagttagctcccaggccaggagatgtccaggttcttggttttgcccagtaaggtaccaccaggagacccactggcccctctcaaagcgggacataggggctgggaaggggcaggaggggtctgggcgcttggaagctgcagcccccaccactcagtagccgtgtgaccttgtgcaagtcacttggcctctcagagcctgtttccttgtctgtaagtggaggtcatatggcacctgcttctgaggcttgttggggataacaaacaagtgacctgtgaagtgcctagcacagagcgagcgctcagaaagtgccagcctttgttattatatacagcaagcggggaaacccgtgggaaatccgggcgcctctgggaagctgggtgtggtgggtcgtccttcccggagcggggggcggggcgtcccaggctccgcctctgcccatcgcccctcctcctcgtcctgctccgagggggccgcggagcttccttgcggccggcgggagctgagtcacggcggccctgcaagcggttggccttatctccggacttcgctgctcccgaaagccctcagcccgcctgccaggctacacctaacttgcgccaagttcctccagcagttctggaaatactcccaggggcccatcggcttggggtcccagggaaggagggaggtctccttcctggctggctggagcagttccagaaagcccgagcttgtgggcccctggcggcacggtgcctatctttccaccgttagctaaattttccttgggggtaaggattgtttctccagatctgtctcaaaatgcacattccccaggggtggagtgccacccgacgctttgaagaggaaaccagaagactggagaactggggcggatagatcttaggagccaagatggggagaggggctgatggggccgcagggatttggcagccgcctaagctccctcaggccccgcctgcacctttcccagcccccaggactctaggggaagtggtgggtgggggagggggaaacagagctgacagattctgtaaacagagccggtttgggcctcggccaaggacggggtgtcctggcccagcctgggtgtgaggcccatccgcggctctccaggacaccccgccctgcccggctgccccgggggtgcccggcccagagccagctgtagccaggatgtgtctgacttgggatgtggccaattccctagtggggaatgtgcctgggattggggcgaggggtgggggtagcaaaggagggagcttctaagaactgtcattgatcattcattcacccagtgcccggctcagcgaagagggcagcctctggtccccgcctgtgggaggtgccggtgctggattgtcgccccacccccgtctccatctccaatcctgtctcttgctcttctgctgcctgaggcagagtccccgcggggtagggaagctgagagtggggcctcaggttccgagagctcttcattggccaggcctgtccccttggcttgttgccaaatgtggtgttccatggcctcacgatggcaattcagagatgcaggaatgccctcaaaaaggggatgagggaggacaggcatccagggatactcaaggacactgttagaagcaggagctgtggttaggaggtggggagaggacacgggtggccccgggacactggcaccccagcaggtggaggcagctgtgggctatgccttttaagatatggagaggagttcctttgggaggagaggagatgggttggctgagactcgtaggctggggccagagtgccagctacagattctggactttattgtaggggtgagcatttcccaaaatgtgctcctgagtgatcgtgggtggggtgaacaaaaaagggtcctgggggcaaatgtatttggcaaacactcttcaagaaagcctgcaatcccagcattttgggaggccgaggcgggaggattacttgagcccaagagtttgagaccagcctgggcaacatggtgaaacccaatctctacaaaaattttaaaaattagctgggtgtggccgcgcacatctgtggtcccagttactca

SEQ ID NO: 44946 - DNA, 2110 bp, Homo sapiens
cctttatttatggacgctgaaatttgaatttcacataatttttacatatctggctgagcgcggtggctcacacctgtaatctcaacattttgggaggccgaggcaggcggatcacttgaggtcaggagtttgagaccagcctggccaacatggtgaaatcctgtctctactaaaaatacaaaaattagccaggcattttggtccatgcctgtaatcccagctactcgggaggctgaggcagaagaatcgcttgaacccgggaggcggaggctgcagtgagccgagattgtgccactgcattccaacctgggcaatagagtgagactccgtctcaaaaaaaaaaaagtaagaactattcttagctcatgggctatacaaaaatgggtagtgggccagaattggccttcaggccacagttggccaattctctgttgtagaatgtgccatcctggggctcagattccccataatcactgaggctgtaagtcctgtcctaccatacgggtggtatgaatggcgaactgtttggtttgctcaggaatgggggtttcctaggctttagattttttggtgctaaaaccagtacagtcccaggcaaaccaggacagaacagttggtcaccctaggtagtaatcattaacccagagagggccaggcttcaggagccagctggccagggttcaggtgtggcccccagggccccctccaggcattgccttgtccttgtggtttgtggtagggccttgtcccattggggctggccctctgcaaggagatgccccctcctccatgcaggaaaacctctgtggtctgggagctctcaaaaggcaggaagttgaatcatcaactccggtaacgtctctgtcagcctgtgggtctgcccagggagctcagggctccaggcccagggggctggctctgcgctttgtttgctgctttctctgaacaggaaagcttcagaatgaggcttctagagaaatgagagctgttgagtcagatggggaggagcgctggatgttaggttgaccaagactctcaccctgctctggcctggacttgctttgtggccttcaatgactctctcgcgctctctgtattttggctttggcttctaccacagaaatgctgattcttgaaatcctcttaaattaggagtatgaatgatgaccaaagtgggagcaccccggcttccgaagacccgttttatcttttctaccagggatgcaggctgctcagacacacttccctgcctcctgcctgcctgggagaaggacctgaccagccaccccagttctggccacaggggctttaggaaggtgacaagtctggatttagggagatggaggagaggggcagaaaaggaggtccaggttaaagacagttatccacagatgacaatgataaccataccacctgttgtttattaagcactgacgacgtgccagcctttcaatgatctcatctgatcctcacaatgactctttcagttaaggattatcatcattttcattttatggggaaggcaaatggagcccagagaggataagtaccttgcccaaggtcacacagctaccatgaggtgcagttggcattaactctaactgtgttagactgtggctttgagggttgagggctcaggaagcccacaggtagcaagggagggatgagactggcagagaagtctagagtagggtcgggggagaaattgttctttcttcctggtgctgcatagggacatccagagaatactaagaagtctggggtttgctaggcttggagaccatgttcccagaccagggatcatgaggacacagtccctaagcccagcaaagcccagactacctacagtctgaatgctgaacccctcgagaccatttggaaaatctgtcgagggcttgaggaggaaattggatacatagcaggattttgctacagagcagaaatgagcatttactttccgagcaaagacagcccttctccaaggatgcccctgggtgtctctgtatgtacctccccaacccagcatgggtgccatgctcaaggttcagacagaggaccacaagccccatgctgcaccatgcataatgtccctcttcccctttgacggggg

SEQ ID NO: 44947 - DNA, 2157 bp, Homo sapiens
tccatttaaaaaaaaaaaaaaagcatcttgttctgtctgctatgtgggctctaactggaattggtagggctatgggctccaggaggcttcattagccagaggacctactaggactgggcctgcactgatatcttgaggtagaggtgggggcctggaagctgggtgcagggctgaggcccctcactgggtctgcactgaacagctaggcccaggagccaaatcatggttgcagacatttggcttccattatctgactatttgggacagcctcaagctagacttgattactgcaaacctgaaatagttccttattagacagggctagctcaccctcctaaatgagtcttgttgggactctcggggtcttgcactgagcacacttcctcatcctatcctccagcccctctggcaggaaagtaggagcacccccagggcttctgccccgggcctctgcacagactccaggggcacctgtggggctgagggcaagtggcagcacagtgcctccggccaggactggcccagccctcttccctgtgcccagctcctccccatggaagaaaggggagaacaggactggctacttgaggacaccagggactgggcctgcctgagagtgacagttctgggactctccctgctcccggtgaatgccagccagggtgtggggcccaggaggctccagtgctttcccagtccaaaggtcactaactgcccagccgctgggagtgtgtgcagggggcggttctccagccagggaggtgcaggaataaagggggtgtggggagacaggaagaggctgagcttgtggggcctgagagcctctcccctgggcagggtggggtcattgggctgccttagattcccccccccacctctcagcctgctgcctctggacaaagctctgcagaggagccccatctccttcagccccctcctgcctttggggtgcaagtttcctgaaggacttgagtgagatgtcaccaagcaacaggctgtcaggctcttggcagcaagtactggcccagcgactcgcggcagagtctctccttggggcgtctgtccttatcaggggtggatgctgtcagacttgctaatggtggaatttctggcatgtggcaggtgggtaaaagagacccctgggctagggagccatttgcaagtccctcagatggcctcaggtgtgggtcatgctccactgcagccatggttactgggaagccaagtggactccatggggctccaagcagtgggagggagctcctgggagacacagtgtggcccagatgccctggtcatggggacatccaagcacaggtgagaaacttgggcagggagggtgcagaggaaatttggaaatggctgagaggctggactcaaggtctcttgggcttgaactgagctcaagcaatccacccacttcagcttcccaaggtgctgggattacagtcgtgagccatggcatccggctggactcaaggtctcttgttccctgatcctgggcttggcatggagaagggaggaagctgaagggggcaggtaaaaagatgcctacctgggcactgtagactaaatgaaccctcagactgtgaaagtctcagaaatcagagaaagaggcctggtgtggtggcttgcacctgtaatcttaacactttgggaggctgaggcgggaggattgcttgcgcccaggaggttgaggctggaatgagccatgatcactccagtgcactccagcctgagtaacagaaagagaccctgtctcaaaaaagaaaaaagaaaaaaaaaacagaggaagggactggcacttccaagtcagagagagctccctgaagaggtgggcctggtaattgagaaagaaagcagttgagacagacacgggggctatgggagcaagagtctggaggtgcgagcatgccgggcaggtgtaaggactggtgagtcaccaggggaaatgtgtaaaaaggctgtgggtaatgaggtggcaaacggtggagagctctgccctgagctccatacccttccaagcctttgcccatgcttatggttgaattgtgtctccatgccatgcacaacaaagatatacattgggctgggcacggtgactcacgcctataatcccagcactttgggaggccaaggcaggtggatcacctgagg

SEQ ID NO: 44948 - DNA, 4702 bp, Homo sapiens
agcctgggcaatatagccagacccggtctccacaaaaaaatttttaaaaattagctgggcatggtggcctgtgcctgtagtcccagctctttgggagactgaggcaggaggatcaacttgagcccagaaggtcgaagctgcagtaagccatggtcatgccagcggagttgagcctggaccacagagcaagacactatagggaagacagccaggtgaaaatgaaggcagagaccagagttatgcatccgaaaggcaaggaatgccgggggctgccagaagctggaagaggcaaggcaggatcccccactaaaggccttggagggagcatggctttagcagcacctcaatttgggatgtctattttccggaacagcgggaataagtgtctgctgctgtaagccaccctgcctgtggcactttgttacagcagcccaggaacctgacccagccaggctgctcctgctgcccagtgtgcccttctctcatccctccagctggtctctcactgccttcgagccccatcacctgctcgggctccccctctgtgtgtccccagttctggacacttattcagcagacctgtaagttttgctggccagcctatctccctggctagactgaaggctccttcagggcaggcctaacctgtgctagggcagcatgatgcctggtacagaataggggctccttagatgtggggtaaataaaggaatgctcgaagggtgatgggcccctgtgagactgggatgtgccatctacttcttcacagcctggctcagctcaggctagggacatgacagtgctcagagaggtcacagcatcttccacacagaccattcccagctccgccactctccagttccctcttggtgccatatgagtctgaggaacttggggaaattcctaaccttccctttcaattgagccattagcccttggagttagccacaacgtaattgctcaggtccctccaacaaggggactgtgtctgtggcttgatgactcatgcacactgctccattccacaaccttgggcaggacttggggctggggacagtgccagccagcataggcaaggagcttggacatcccattaccccaacccagtccccaggaacagagtgtactcaaggtttcaggacaaaaatctagaagcaaggaggcgaactgagtgagatttgagtgacgaaaaggagcagacaaagacaacagcgagtacaaaggccctgaggcaggaacgagcttggcatgatcaagaactgaaaagagcacaggggaggctgcagcacagtgaaagagaggtcagtgataggacatgcgattagacggggcccactagacaatccaggataatccctccctctcaaggcccttaatttaatcatatctgcaaagtgccttctgccatgtcggggaacgtattcacaggctctggggagtgcagcgcagacatctttagggatgggcattattgtgtctaccgcagtatctctctcaccctcttgtctgtctctcttgctctatcgctacatttctgtttacctatctacctatttatttgaacctgaccatggatctattgaccacaatttatttctcttcctacccctttatcaagcttcaataagttatttatcaatctatcattcctcagtggctttgatcttttactctgataacagcatcaccccttagccatctgtctaacaaactaaacgttaaactcaatctatcatttagttgtcctctgtccatgatgaattatcaatcatctacctccatctttgcagatgttgtacagatgtggacattttttctcaatgtctattgaaaagatcgatagatatgagttcagtaaatatccactgagtgctggccacgtgcccattgctatgtcatgtgtgggtgaaataaggggctgacactcccagtagccatagagggtcctttttcattttatcattatccccaacaatgctgtgatcaccaatccaggcacactgtccaattttgtcatccaccttggaatcttttttttttttttttgagatagggctcttgctctgtcacacaggctggagggcagtggtgtgatcacagctcactgcagcctcaatctcccaggcttaagcaatcctcccacctcagcctccagagtatctaggactacaagcaagtgccaccatgcccagctaatttttgtattttttaagagacaaggtctcactatgttgcccacgctggtctcaaacacctagactcaagcaatcctcctcccttagcctcccgaagtgttaggattataggcatgagccactggccctgtccagggaccatttttatataaactttccagtgaaatccaggctgctctagtctgccttttgcctactagcctccttgtatatgcataaataatgcagactcattttaacttgatgttgatcttacataaagtgtgggtggaaaagtatatctgctgggcaagcatctagtgcatcaaataacgaatcctaaagttaaatggaaattatttttaggttgtctgggcaaatagcacagaaggtggggggaatccagagatatgacctcagatgtgacacatgcagacacacgacacaccacacatacacacacacacacacacacacacacacgcatatgggtacacacaaatgcaccttctctcttccttctgcccccacactagcagctccttcctggcttcctccgcccctcactcacacaaagggccaaagcaaatacttcagcactgagtcatgtcctacctcatcttgtttccagcctaggaatctcacctccccacctgggctgtgaggtcttctggggcaaagatggtgtctgcttctccttaggtgtgccctcctagtctgatcagccagaggactggacacctaggagctgcttgcctttccttgagctccgagggcagttgaggatcagggaggcaagggagctagatgtccagtggtagacgctctctagggcagcctctttgcccccccaggaatctgcctctcctgcccaacccggatgccagataacataggtttcttttttctgtagcactctcctagaggagctgtgttaggtagataatctgcctagagctggcctagctggggatcaactcaacaagaatttcttgtttccaagcgtctccttcacatgggcatccagtgccaatttgtgtccaagtctcttccctagcacacgggatggaggtccagcatatttggagacagctcactgtgtgccagagccacaggtcctagaatatccagcaatcacagtacccagggccaccccagcctcacaagtcactgtgcccaaggccctgagggaagaacagcttgctcactagtgcctgaaggaggctcccaaggcagccaccttgtacactggagacactcccagcagtgggaggcagatcaaggccaggacaccgttaatgaagctttgactagggtgaggcatctcagggccagctggccttgctgcttctcaccccactctaagccttgatctgtccacatacttgaccctgttagaatctggtgtctgcccctcccccatcctgatgtaacacatctctgtagcctgaagccggcccagttcttggctcagagctactgcgtctgcagcacagatctgtccctgagcacagctcgcaccagcttccctgcaggcctagagcccaagccctggcctcaggcaatctccgcttcccttgaggccagcccagagccccaactcagtgagttctcatgaactgtttagactccaccaggtaatgaattgtccccactctgctgtctcaggagccaggctgggccaggtattctcagattgaatttgttgggaagaaagggcactccacctgctggaggagggagcacctcctggaggccatgccgctcagaaactttcttcccacacagcttccagccccaggctgcccacccaagtctcagcaggccaaaggcctagtgaggcttttctgtgcccctgctggagcccaacgtccatgagaaggctctagaatgcatttaggatctgagactggtccagctgaaacagcccagagagaccctaatcctggggcccagagagagccaaacaggccccaggccacacagagggcagccctgaggctagcctagagggcaggtttcttgccccttcctaccaggagaagcgtgtccttgccacaccaatgatgtttctgtccctgggtggattccaagcacctgcggggcaaccagcactgcccaaatgcagagggcttcttgggttcccccagtaaccccaaggtcgactcctcccctccatctccacagctcctgcccctgcccttccccccttcccagtcttgctccctacatactccagtacaagcaaattcatgaattcggtacatacatttccagacctttttttcccgtacaaaaatgcacatgtttgtgtctctgtgtgtgttcagagaaaaatgtaaactttcattttgtagggttttttttttgtttgttttgtttgcttttttttttttttttactatgagtgggatcatactgcacatattaccctgaaagttgtctgtcacttaacacttctctttttttttttttttttttttttgagacagagtctggctctgtcgcccaggctggaatgcagtggc

SEQ ID NO: 44949 - DNA, 4549 bp, Homo sapiens
ttgcaaaaactgcttatttcagcattcatcatctccctctttgttgggtagacaatccgccctgtcggaggatttgtgctgttattatgagtttgtttattattagatttatttctcctataagcaaatgtgttcacaacattccatcggggaatcttcttaattgtcacataaatgtcatcttatgtaaattgaatatttatcttcccatggaagggggtggaggggaaaggaagaataaacaatcttcagtcttggagagggaaggcgactccggtgtccattcacaactcacccacgtgccttcaaagccaaaggtgagctgaaaaattattggataatctgaggggcagccgaccatgagggggaagaaaaagttggccacgatgctttggggatgttgggccaggctccccacaacctcctcccgaggccagacccaccccctccccagctagaggcattccgaggaggttggagcttgacccccgattcctccccaaccaggaggccagtccttctccttcctcgagagaaggtgagctcggcgggcgcagcgggttgggtgggtgtggcccgcggctccgggaacagacccaaggccccgccaccgccggctagcagcccgacagcccgcccgcctggcgagcgcaggctcttcttccagaaactgcgaggatccgagcgtactgtttgtgcaccacaaggtcaagtcgggaagtggagccggaggaggaggggcgaggaggcgaagggtggggagaggggcgccccgcttcctcgccatgtgccagcctttggaagttacccctcggtttttaacctttcggggtaatgggaaggaagagcaaggaggaaggggtcgccccggggcaaaatcctgctggggccaggatgtgcaaccacccacccacccgctcatcactgccttctccaccccccggaaatgcggggcagcgctaggcgccaggaggcacccgggaggggggagggggcgacgagcccaatggggaccctctctacggaccgcccctcttttcttgaggtcgcctacaatttcaagttcccccgcccggaatgttagttttccatttggagtgggtgcggggaggagggccgcgccccctccccaagactcgcgttcgcccctccactcccctcctgccagcactttctgctcacttctggtgctgcaaaacgccacgcaatttattcgattcgcattttaaaaccagcgattcagaagcagggcctagggcgagggtcttccagcgctggagccccggggggcggggtgctcagtgcaaacctcgttccctccgcgagtgtcgcctccaggctgttatttgcaaagaaacgtctttttgacgcagggagaaatggcaaattttaagtacgtcattaatatggcgccaaaagatttttttaagtataagctcgcttttttttttttttaaggttgcggggggcgccgcccgggtctggggcgcgtagggggcggggtgtgagcagaaagtgtgagtgaaagagtggaggggcggggtatgtgtgtgagtgtgtgaagtgtgagcagacctgatgggacttgcacgggcgcagccgccgctcgggcccggccctggggacagggcgggctaggggcgccccagagtccatggggagtccgggcccagggtgccagcaggcgtggtggtggggctgcgagggagggcacccttcccccacggggcccgcaacgctacctggactccccgccggagccaaacaactgggcggggggttgggggggcggcgacgggggtgtcgggagcggagatccgagtgaataagaaaaaagtggctactccccctccctcgctcctcctgcccgcccccaccccacccccaccccaacacattttttttttctaaagagatcacaaggaagtcttggtttaaaaagaaacagaaacatacacagggggttggtgaatggtgccgaccgcggccatcgcagttggaggctattttttggggggggtgagtagcgtccatggagttactttgcgcccactcctagcggcaccggcttaggtcctgcgggccgaccgtccccggcggggggcgtggggcctgggacgccgcgggcccggccgcctccctcgccgcgaccccggatggatgcgcgccccccgccctcccgcgccggccccaggagctcccggcttcgggagcatccttcccgcgccggtccctgcagcggcgcgtagccgagggcagcgcccgtcaggggggcaccgcggagcaaggtaagatccagcccccggcggatgggccctgcgcatctccacgacgttatttggcgtttttgcaacagatctgccagcgctcttcgctccctcgctctctcttgctcgctcgctccctctctctcctgctggctgcctgttctaggaagccagcgcggagaggggggggatgcacagcacaggggagagagattgcgcatgttggtcagtcgtgttttaaagagtacagtgcggggaggctgagaggggcgcatgcaacaacaacttttggaagggtgagcttggcgaccttctttattaatgactgcggcaaagcgcccccgggccggcgagggggcgcgggcgggcgggggcgcgccagggctgcaacttccccgcgggctccggccgggcgtaggggctgcggcgggagatgggtacggtggggaggtcgagcggcccgggcgggggctccgagaacctggagctatctgccctcctgtctccccgagtttcattttgttgatacgcagcacgtccgggcgccgaaccgggctgagccggtgcacatgacctcgcgctgggctcacgtgcagccggtccggtcccagacaccttccgggggccaccgcctccgccctgtcgccccctctcccggcccggtgcacgcgggcgctgcacgcgggggcagcatgctcggctcctggggttggaggctctgcacaaattagacagtttttttggaggggcgggggacaccctttccaggtgagtgtggagggtgcggagcctcggcgccaggggtgaggactggggtcgggggcagcctccacctccggggccgcgcggtagtccagctggggagaggcgctgggagagtggaaatgtaccggcggcggccggagcggcgggtgcgcgcccgcggggcgacggcagggggcgtggcccttgtttaccttctcccaactctgccggttcgcgtcccgcttcagggacggatccgcagtccccagccctctgcctagggccctgcaccatgggtggtaccaggaagatgccggcttgtggcggaccccgtttgggacgcacacacctgactctcaaatgagtgacattgcagcccccgcccccacctagcgctgctgcagtccctttgccggatccccggccccgccccgcccccggcagtggcatcttcccggcctcacctccttcctccctctccctcccttcttcccacccactcgcctgcgcctgcggagcggcgcccgcccgcctcctccccgcctgggtgcagacttgtggctccccatggtttcttcccgcccatccctgggtcctgagacatcctctcctctcggccaagggacgagaggggtcaacttggcgattcgcagctgttctgccagaggatggggttgcctgcgagacagccaggaaggcttcactctagcttccagaggcccagccctgtcccctactacacacagctaccaccccacccgcccctggggctcggctgcccttcccggtgtctcttaaacccctcccccgacctgggtgttaagcccacccacctcccggcgccgcccccggtcgaacagcctcttgcccttccttcgcctgggccggagccccccgcagcctcctccggctcctcctcccggctccggcggtcggaatcacgccggcgcgcctccagcctgcggtcccgcggactgcctccaggggcgggctggaggcgcgcgcaactcccctcccaatcccctcagccactgccgctggcctgggcacttttttaccagcttggctgctggcctcttgctggaggctgggggaggtgaagggtcactgggtgtctttgccgtatgccgaaggcacactgcggccggcgattctggtctctgcagatttccaaacctcgccgctgcgtctagcacccctgggtcatcttctgcaggatcccgaggcacaaagttgtatcccgggtcagagtttgtagggggtcatcgagaggtgtcatgtttccattcagagcggttccaaagcgtctaggaaggggctgagtgggacctgctgccttgcctttgttggaaggaggacccctgagctctgatcccagacaggctgtcaggacgcccccttagcatttatgtttgcaaactgattcctggacctgggaggtggtagggccgcctggcccctcctctcggagtggcattaactccctcccttcactggtaaaattcccagtaggacatttggcaaaagggctcggcatg

SEQ ID NO: 44950 - DNA, 1294 bp, Homo sapiens
tagggtgatctgtggggattggaaggggaggggtcaggcaatcctgttccagtgactcctgatggctgagtgtttattaatacttgtctggggtcttcggagaatcaggggtgccccaggcctctccagaagtgagaatatgcatgccaggtcactgccacacataccagtgcctagggtgaaggggtgaaggtcaggccaccaggtgggcacagcgaggtcagtcttgattaggcttggcccagcggtctgtcctctctacttgatgtcagtgtcatttggttccggaaacatctcctggcctgggtaattaattgcagatgtttccacaccagtagcttggcttcagtctgcctgtagggtgctttatctgttgacatcaagaggagggcacgtgttccggctgctttgactttacgaggtgcattcccagcataggcatggctgtgctaagctgacgtgagctgggcactcctggcctgtccgtgatctttggagaggatggactgggggtggggaagtgctcccttagagacatctccacgcctcttctgttgctatctccctccggcccagccactgcatcctcctggcacctcccactgcacagccctcatctggaaggctgcctggtagctgcccgggtcagaattgttagagaaaccctgttcttgaggacttgctatgctgagcctgtgttcatcttttcatttaacaatcatattagctttacaaactgcatgtaactgtccccattttatagatgaggaagtcgggaaattctggggaattccctgcatggccaccggggcctagtgggctgggccaggaaatcaaaggccccgagaacaagccctgggctgcccctgtgaggcccagagacagagccctgtgcccccgtcatcccagcatgctggttctggctgccctcccccagctgccaccccaggccccctctgtccctccctccctggcctttgggtgggtctgcccacctcatggtctgaaatctgtctgaacaatgagcacttgtctcgcccctctccagactgaattgagtgagggcctgtcctgcccctcactggggccagaagtctcagccagggcagaacccacctctggtgtgtgtctggtcttctagggtaaagaccccctcccctcccatagatcccagccagctgacgccctcctcccagctgacctccgccgtcctggctacagctgagggtgaggccttggcctagggtcaggtcagtccatgcctggtaggagagcttccttcagagccagagcc

SEQ ID NO: 44951 - DNA, 2552 bp, Homo sapiens
cagcctggccaacatggtaaaacccagtctctactaaaaaaaaaaaaaagagagagagaaagaaagaaagaaaaaattagttgagcatggtggtgtgcctgtggtcccagttactctggaggctgagatgggaggattgcttgaacccaggaggcagagtttgcagtgagtggagatcaagccactgcaatccagcctgggtgataggacaagattctgtctcaaaaacaaaaaaagaatttggtaacactcctaggtaccctttaaaggcctccagttggttataccctatgacagattggccagcaactaatcagaggctgaagtggatacttggcccgtggtcaatcagaggctgaagtggaaatttctgtcttgttatcacaggagtgaggatgtggcctgtatgctgcctaatcttgcctagaagtggctgcacctgctgttcttttgcttatgccttgatccttggtgaccctaattccctattctcctatctcaccagggccctttaacttgaggccagctgggtgaggtggggctagctggcagatggggctgggtgagcctccatacacaacttgggcagaggagagaaggaagaagctttatccactcagcttgtcacctttgcaccatcagaacaccattgtggcggctgactcatctgtcaccaggtgagtgtgccattaggagcacaggattagtcatgggcgtggtcatggggtgagatgccaggtcgggctgggatagtgacacggtgaagcatggagcagggcctagaggcactggaagagaagaggaggcatccctcctcaggcttggaagggggcctaggcctccctgatagggatggaggcctctgtctttgggataatgctcaagtgggttgcctcgggtctagaggtttgtatttagtgggtggtcccccttattcttccctccattctcaaactcctgactttaggtgatccgcccacctcagcctcccaaagtgctgggattacaggcatgagccactgctcccggccacttccctccattctcaatgaacattaagcaacatgtggccattcaagtctagagaatttatccatgaatccaccacgaaagaggaagctgctagaaatggaattttgttgtccttggggtaatggaaaattattgacctgcattctggcccttagtttcctcatttgttaataaggatgagagctcctgctgggcccaccatgcagggtggctgagaggctcaaagaggacatgggtatgaagtggacaaaatgaggagccacaaaaggtgttagaggagggcaggacacagtggtacaggagagcactcacagacttgctgactgaccagaggcaaggaggccagagggatttgtttaccaactctcacttcccggattctgagccggtaaaccctgtttgtttacaagttttcacgggcctccctaagcccaacggtggtctggggtcagttccactctagggactggcccggtgcagcccctagatgggggctggttgcaaacagctgatggtcagagaagccgcttcagtcacatatctgacagtcagctgcctgggccaaaaaaccacacagctccccagccttgtgggttactcaggccccttgtcagctctgtgatcatccttcacacctgaaagcttgtaacccgagaggctagaggtagttgaataggacatccctcctgtgccctcacctcaccccttttgcaaaaaaggaacattccattgctagggattgaatgttgtgattaacatgaaactcagaagaacagccaagggtttgtagaagccaaggaggaaaagtgactcagcaaaataaactttcacctgtgggtactctgaactgctattttgggactctgggagcctgcctggttctagtgcctgttgcttggtatcaaagcattgctccctaaatgccagctggaatattcatgcccattccttactgaagtagcatcctaggaggcttgggagggaggtctgatggatgggccttatctctgccacatccaggtaagagtcacaagtgaagcctgggcaacctggcaaaaccccatctccacaaaaagatacaaaattagctgggtgtggtggtgggcatctgtagtcccagctactcaggaagctgaggtgggaggatagtctgagtccaggaggctgcagtgagctgtgatcataccactgtaccccagcctgggtggcagagtgagaccctgtcccaaaaaaaaagagtctcaagtgagccaatgtcacaggagaagtagacatgcccccgtagaggcatcggggatcagaggggactctcaagaagagagtaaatcttagggattcctctcccctccaggaatacttccatccagtcaagaaagggcatgggattggcactaacttgccccgtcaattttaactccttcatggccctcatctgaaaagcctcatgtggtttgtaggacctctgagtttggggagagtgtgagagctcatttcatccaatcactatcccatggagttcc

SEQ ID NO: 44952 - DNA, 1358 bp, Homo sapiens
ttttgatatgataaaacaataaaggactcattttctaccatatcatgtcataccaacgttctttgtcaaactttccccacattttaaagtgacctcaatgaaaccataagctaaattcttctgtcttcctaaggctcttcctgtaaatgtttactctgctcatcctttaaaggagtgacatagaacgtatagagccagcaccttagaagtgaacagatgtggtttcacttctggctctactgcttttgagatgtgactttgggcaagttagcctgactgaagctctagagagaattaggaacagtagcatccaccctatgaaattgagaattaaatcaagtaatacgcacagtctctggaacaaagtaggaactcaggcattctctgtccttgttttgtaaccatagaacctacctggacttttccacacgtacaagtatttgtttgcctgctctgggcagagccatggtatgatcaaccttcaatcaaatcatggacctgcttactctgtggccccagatctggtgctgaccttgcctgctgctgttgggcccctttacaaaatatctgacctgggatactggaggggaggtagctacatatgcctctgctcactcctgggagtagtgtcaaagatggcatgtcctatcatttccaggctgtggcttaagatatagcatcttagcatgaccagggactcaagatcaacccactccaggaatataacagacatgaaatatactaaaagggtacattctgtacagggtgagcttcttaagtcttcataaaagatgtctgtgttagtacttcctcaatagctacaattactcagttactccctctgcattctaagtaatcactacttaaagcaatcactgagctcaacaaattgccaagagtttcatcagagactgcagaaaagctgcactctgatacctgtatctctgacctacttctgcaggcttaccagagtgatttgactatatttagtttcagttatttaacttacatcaagttcttcttttgactctaacagcctttcgtggtctgcacaatccaccagaaatacaatgccattgatagcaggaaggtagtttttccacactcttcgagctaacaaaaacaatcaggggttagagtttacttgttggtcaaacccagcagatggtttaagcaaagagtccaaccagatatcaagtgcggtaatcccttagctgctggtacttcacaatatattcaagttaatcttttacccagtggtgccaaattcttctgagaataactaagagggaatttcaggctttccttgactgtgggcaagtcaaatactttagtctcttccaattatcatatgtaag

SEQ ID NO: 44953 - DNA, 675 bp, Homo sapiens
ctgcaccacagcctgggccacagagcaagactctgcctcaaaaaaaaaaaaaaaaaaaaaaaaaaaaaaaatgtggtttctaggaaccttaaaacaaactaggagtaattagaaacagaattaactgtttttttattgttattttaagtagaagtaaaaatgcccaactaagaataaaagttacttagctgcaaacagatacctgagcccagaaaacaggttacacaacaccatgaacacactattaagacatgtgaagagcaaaggtcaagaacaaggaaacatacacacgtcagcagatttatttattgcaccaataccaaacaggaaaagtctctctgcagattagaaaagtgatctactcaagtaacatgaaaaccagtgcaaaggatgtaatggaacagaatctcagattacaagtaacttcttaaagccttgttccattaaactacatggatggctcatttaaatgaaatatcctggatagataaatccatagagtaagtatattagtggttgtcagactgaaggaaggaaaaatggggaatgattgctaatgggtactgggtttcttcttgggatgatcacatgttctggaattagatagtggtgatgtttacacaacaatgtgactatactaaaaacacttaatgtacaattttaaaaggtcgattt

SEQ ID NO: 44954 - DNA, 1571 bp, Homo sapiens
tcacgcctataatcccagcactttgggaggccgaggcaggcggatcacgaggtcaggagataagagaccatcctggctaacacggtgaaaccccatctctactaaaaaatacaaaaaaattagcggtgcgtggtggcgggcacctgtagtcccagctactcgggaggctgaggcaggagaatggcgtgaacccgggaggcggagcttgcagtaagccgagatcgtgccacttcactccagcctgggcgacaagagggaaactctgtctcaaaacaacaacaaaaatttaaaaaattaaaacaaaaatcagtacagttttctcaacagtgtatcttttttccacttaactgggactttgggctacggaaaacgttaaccagtactagtaaggaagctcaatttgcctctacactaattgggagcgctgaaaacaccaggccgtgtcacagcctcttcagctgtcagtgagacccgccaccttcaccttaccaggtaaggaaactgaggcccaggggaaggaaggggcttgcctgcagccacctcgttctttcctgaaaagaccaagcgtctgacagcagcagtgttctgcctcgagggctatcagacggccccgcggagcatggatgagacctgtcctccctcgcgccgcctaaccccggggtgaaaaacaggcgccccttcacgcagtgccacaggcagggactcagagtaggtcttggccctaaaagtgcgccttctaggggatccatagctgctgcccaccggtcctcccagaaggaggggctgtcactcacctgcgactggagggaacgcaatcccctacttggcgttggccgtacaccaggagaccgaactgcaaagcgcgatggctgccgtggccccagttcgcatcagccccttccgggccggcgggtgcctcactagcgacagtccgcaggaccgcgtcgccgagcgccctaggttccgcctcctggcagtcttgccgccaattccccagttgagcgaggctgctcgcaacccctaacaccgcctgggtctcccagccgcctggtctccccacacccgcccgcccgaagggattttaggggcctgcgtgccgagaaaggaacaccccatgcctccctaggggaaattacttttggcattttttttttttgagacgttgtctcgctctgtctcccaggctggggtgcagtggcacgatctcggctcactgcagcctccaccccctggattcaagagattctcctacctcagcctccccagtagcggggactacaggcacccgccaccactgtccggctaattttttttttttttgaaacggagcctcgattttgtcgcccaggctggagtgcaatggcgcgatctcagctcactgtaacctccgcctcccgggttcaagcgattcttctacctcagcctcctgagtagctgggagcacaggcgcgcaccaccatgcccggctaatttttgtatttttagtagagacggggtttcaccatgttggccaggctggtctcgaactcttgacctaaagtgaaccgcccgcctcggcctcccaaagtgct

SEQ ID NO: 44955 - DNA, 844 bp, Homo sapiens
tctcagctacttgggaggctgaggcaggagaatcacttgaacctgggaggcagaggttgaagtgagccaagattgcgccactgcactccagcctgggtgacagagccagaatccatctcaagaaaaaaaaaaaagatttcataattgacctggcacagtggctcacacctgtaatcccagcactttgggagggtgaggcgggcagagtttaagaccagcctggcgaacatggagaaaccctgtctctacaaaaatacaaaaattagctgggcatagtggtgcacgcctgtagtgacagctactagggaggctgaggcaggagaatcgcttgaatctaggaggcagaggttacagtgagccaagatcgtgccaccgcactccagccagggtgactgagcaagactctatctcaaaacaaacaaaaagaaacaattcatgattgattgcatgtggctagcaaaagcaaagaggtagcaaagtccaaagttttacctgaattagtaagtctacttctctctatctctagtgcaaagaccttactgcaggccaccatcagctctggctccagttacagcaacaactccattatttcccctccaataacttatcctcacagtggttggctagatttttttttttttgagatggggtcttgctctgttgcccagactggagtgcagtggtacgatcatggttcactgcagcctcaacctctcaagtgatcctcccactttagccccccaagcagctgggaccacaggtatgcaccaccatgcccagctaatttgttaaaatttttgtagagatggagtctccctatgttgcccaggctggtctcgaggtc

SEQ ID NO: 44956 - DNA, 3097 bp, Homo sapiens
gtcaggtgttcaagaccagcctggccaacatggtgaaaccctgtctctactaaaaatacaaaaattagccaggcatggtggcaggagcctgtaatcccagctactcgggagactgaggcaggagaattgcttgaacccaggaggcggaggttgcagtgagcggagatggcaccactgcactccagcctgggcaacagaccaagactctgtctcaaaaatatatatatatatatattttttaaatagagataaggggactctccctgttgtccagactggtctcaaactcctggcctcaagtaatccttctgtctcagcctcccaaagtgcttggattacaggagtgagccaccttgcccagcccgacacagtggtttagatctggcttttttttgtatgtaatataacacttcatagcaggcatttggtattaaatgaattaggtaagatgtacttcacactgaggtttcgaaaccgcgtggcatgacattttaatccacagtacaaatctgtaaaggagggctttatcgtcagcacagagcaggaaaaacctaaatagaatgaaggcagctaagatgattactcaatcattaattaactatgttgtccaatcaccgcagtttcgacctccctttggcttcaaaagtcaaaaaagtcaacttgcaaaaaaaaaaaaagtctacttgctctgaaaggaagtttgagttctttaccttactgtaaactcttagaagaggaaacaaaactgccatttaaatgtgctaatgaacttgagcgtgactatgctgtgaatcagcgagtttcaaaattaaaattcctctgagtcctccagtcaaagacaaaggcctccttcttggcttgatcacactattaacatgtacacatatttaaccacctctttttaaaaccccttataatttacatctgaaacacgaagacgaaatgtgaatgaaatactgcgatgaacattaaccgccccagctcccagtggtggtacggtctcaacagaggacgatgacttctatggtctcaggtaatcttcacaaaacccgaggagaggaactgtcagtcccaccccacgaaagcggctactgaatctcagattgccccacgatcctggctctgcgagcgaggtcacgttcacaacggcgggaatttccgtagcggtgacacacggcacttccggccggccgtgagagtcggtgacgtggcggcgaggccgggcacggtcgtcggggtcggggcaccaggagctgtcaggtggcctcggggcagcccggctggcagagaagagttcgccggcgcggcggcggctgctgcgagcccggagccggaagtgccacgtgtcctgattgcggctgcgcggccggcggctgacaggcacttccggccagggcctccctccttctctctaggtttggctgccgccttctagccgggcgttcgcggccccgccggcccgactctcaagcctcagctcccaggctaggctgtggccgccggtggcctggggagagtgcggcgccatgcctcgggcttaatgcgcccccccctcttctcccagtcttcagtcttaagtcgttagcctcctccctccgctttcagcagtggtctttcagctctcttcttgtgcgctgttgtcgaccccgaccagccccttccaacccagtcatcatgtcccagccgggaataccggcctccggcggcgccccagccagcctccaggcccagaacggagccgccttggcctcggggtctccctacaccaacggtgagtgctgtccggggggagggcgcagcctggccagggctgactgacctttgcgtgccactgctgcttgaggcgacatagatagagagagtgacctccttaccgggttctggcgcggatggtggtgggcggctgggccaggggaccacggcagttgtgcacctgtagccccaggctcgtctcagtctttcacatttatttagtcggtcaccaaaacagtaaatgagcacctgctgtatgcaacgccctgggtgaaacacgggtgagaaaatgcctcaaaactcgaatataaggatcatagtgtttgtgtgccttcgccttccttgccacctcaccccagtctcctagagagcaggatgtggggtctgattcttctgggttccgcaggccctgaagtggggtgggggtcgtactcagtctgagtttctggagatgaatgcatgcttttgggacacccctttagggcctactcatctctcccagaaccttcccagaattgtacctacaacagctgttcaatgtttcagctgtggaaaaaccaaatagaagggaggatctcctggttgacttctagatgtctggacagcatttggaaagtgggtggacacaactctctgaatctctgacaagagtctacatgtacattatagtttgtcatttgatgtgagaatgtcttataattttatacctcttctaggattccttaaatcgtcctacattgtgatttgctaagattatttcagttgttacaatagacaaagactttctgccgacagattgcctacttaccaatttacttacaaatctttggtttacagaaataagactagtagaataatgctaaagaacttaagttgcccattagagtctaagagttctgtgaagttggagaatacagacagtgactaaaatctctaatttacattgtttttagagaagaccgctgttttctttacaaagatggctctaaaagacttttaaaaatgtctgtgagtaggcaactatgtgggcagaagaaagaataagtggaggaaagccactgaaagggtactgagttaaccattctttctcaaaattatggtaacagattatgtacactacattttattctagaatatttagtaacatttacactgaggatgagaaaaaatgttacatggctatggatttttcttataatctataaattgcagttttacattaactttaaatgacaaatcctcaaatgtgcttcaacatttatatatgagtgtagttgtcataatattgaaatgttaaagggatttgaccactgtggtatgctgtattagagatactgtcactatg

SEQ ID NO: 44957 - DNA, 2197 bp, Homo sapiens
acgtgagccaccgctcccggcctttttgtttttttcttttcttttccttttttttttttgagacggagtctcgttctgtcgcccaggctggagcatctttagcatgcgaggtggtcatgaacgacaaggagaaaaaacaaggtgaaggggaatggggagtgttggcaatttagatagaatgtgcacgaaaggtttcaatgggaaattctaatttgaataaaaacgcacaaaacgcgaggaaagcctaggaacacatcagccgtatactttgccgtagagaagttaaggatgaggaacaggcaccaagaacaaatcccagcgtaaggctccctttaagtgcggctcccagggttacgtattcccattgcctacaggcgaggccgcgggtctgtaaacaagcgactgccgctgcaacctccattttgcttcctggcaccaaatctaggctgacctacttactgccatccctttcccactcccggttttcttttctttctttttttttttctcgagacagagtctcgctctgtagcccaggctggagaacagtggcgcgatctcggctcactgcaacctccgcctcctgggtccaagagattctcctgcctcagcctcccgagtagctgggattacaggcgcgcgccaccccgcccggctaagtttttgtatttttagtagagacgggtggggggaggggggagggggtcaccatgttggccaggctactctcgaaatcgtgacctcgtgatccgcccgcctcggccttccaaagtgctaggattacaggcgtgagccaccactcccggccctgggtgctggttttcttcacctccgagtgaacagcagagggggctgttgggtgagggccagaagagttggggaggcacgagggcgtccagcgctgccctcactcaagatggcggccagagcctcgcgcttggtcgcgtggggcggtgcgtgagtgcttagctcacaggctccgggaccgcgctcgggggcgggtctatagtgggaaggggacgcgcgccctgcggcccggcctctagtcatcgccctcgcagcggcggccaacatcaccgccactgccacccctcccagactgtggacgggaggatggagtcgatggccgtcgctaccgacggcggggagaggccgggggtcccagcgggctcaggtctgtcggcttcccagcgtcgggcggagctgcgtcggagaaagctgctcatgaactcggaacagcgcatcaaccggatcatgggctttcacaggcccgggagcggcgcgggtaagagcctcgatttcccctcagtctcccgcccatcaccttgaatcttcagggtcattcttccctctcccacctccactcctctgacctttttgaccaagccttgctctttgatttcctctctgtcccgccccttcggtgatatcccaagttctcatccctgaaccccaggatgttcctagtcgctcccctcaattttcccggggcctcgccgtgagattttccccaccctgcctgcagagctctcactccctcttcccagttacgttgaacagccccttttttccttagccactcctcgcctttcttgaagggcgcacgttgtatccccagactgtcatgtctactgctccccttaggaagatggctttccttcttaaggttccaagtgcttttccttacagtgccttctctagcgtctaccttcttttgccttttgctgtgtaactcctgtccgcccacatcagcctgtctttactgaactgcccgctagttcatcctacgtgtatcagggactcttgtgctcatatcctagtgtttgtgttcagtgccgtcaacactgtcacctacgggccggctagaaaaggtgggaaaagtgagagtgagcattcttcagagacccagcaagtgcgaagtgcacacctgagagtttcctctcctcatgaggggatattgttgtgattgatgtctggagctgcatttctaaggagagcgcctccttcctcccccaaacacatgtccaatgattttctttaaaaaaaatttatttcacgtgagtataattgagcaattagcgcgccctagtgttatctaagtttccagtgtttcctttagtaattggcctttagtcactggtcgcaagctccttatatctttgtgacttttgttctgtaaggctttaggtgtatagct

SEQ ID NO: 44958 - DNA, 1332 bp, Homo sapiens
gtcaagtctattattattactattttctttgcagagacgagggctacgttgcccaggtcttgaattcctgggctcaatagatcctcccgcctcagcctcccaaagtgctgggatttcaggcgtgagccactgtgctggctttagtcatctgtttcccggatagactgtgagctccccaggatctagcacaagcctggcatatgacaacataaataaatgagtgaatgtatacatgaataaagagcgtgtacggagaaagttgccgcattatttagcgcaaattaaggcagacatcagcctgcccaggacgcctctttggctctggcgcgaaacaccctcacgggccggcgaggctgacgcgctgcgctccatcgcactaatcagccgggcgtggtgcgggcgccgggaagactgggcggggcgaaggcatcacctttcgatggggccggcgctgtgcgtcctccagtcgaggtggggcgctgtggaagagcggcagcttccggtcggcttttctcttccttcggctgccggcgccagcacgtcctgttttcgttggccgcgctgggatggccgccacagctgtaggtgctgctagtgtttagcgctggtctttgccgggcgttgagggcagctcagcctccttgtttgtccggttcgcctgtgcgtggtactcaagggcaccagtattcccgcggtcggcagcatgggtcgggagtcacggtgaggcagagcgccgagcgggctagcgggcgagcggcttcttggggtcgtgagaagaggcgggagttgaggtggccgccgggccaggcctggcgcggccccacgtgcggtcagcgctgccccgcgagcattggaagggctgggggacctcggctgagggaatggttgtgtttgggccagcgacggcttcccctgcactaccatcagagggttcgagcccctggagcgggaacaaccctccaggacgttagtgattgggcaccacatcccgccacttcaagggagcctgccctgattacttcagtcagaagtgatcccagttggattgcttattgcttcgcgtttccaacatttcctcgactcctgtcattctgtattttagttctttgtgcgcgtatgatcttttcccaagttacttgaaaggagcgtgtgggcagacatttttaccgcatcgacagcactatacacgactaggcttttactgggctacaataaatacttgttgcgtgggcatttacttcgcaaatagatttcgtatttaagcaggtaactttgttacctgcttttctgtccttttgaagttgtggactatgagctcttattagaactcat

SEQ ID NO: 44959 - DNA, 751 bp, Homo sapiens
tgaaatcttccattgaaagcatgagttttaagttttgagagtttatcttattcccttctctattaccagagtttcctgggaacctcatcataaaatattttgtggtctgggcatgtcgtaatagaactttatggtattttatactctgctttgccattcatactaaacctctttggatcatttatttaagagatatccatttgggtacttctaaaccagtattcctaaaactttaatttgcatatgataatcacctaaggttttttaaaatgcagattttgattcggtagtttggagtataaccctagattctgcatttccttttttttttttttccccgagacagagtcatgctctgtcgcctgggctggagtgcagtggcgcaatctcggctcacggcaacctttgcctcccaggttcaggcatgtgccaccacgcctggcttttttttttttttttttgtatttttagtagagacggggtttcaccatgttggtcaggctggtctcgaactcctgacctcatgatctgcccgcctcggcctctcaaagtgctgggattacaggcatgagccaccgcacctggcctagattctgcatttctaacaagctcccaggtgatgctgctctggtccttggacaaaaccgagtagcaaggctctaaataacctacagggaaaggagaaagatctaactcttgtcaatataggctgaatgtttctgccttttctcgctttggctcccaaacaggt

SEQ ID NO: 44960 - DNA, 2057 bp, Homo sapiens
aggttggagtgcaatggcgcgatctcagctcactgcaacctccgcctcccaggttcaagtgatttacctgtctcagcctcccaagtagctgggactataggcatgcgtcaccatgcccggctaattttgtatttttggtagagatggggtctctccatgttggtcaggctggtctagaactcccgacctcaggtgatccacccgccttgacctcccaaagtgctgggactataggcgtgagccactgtgcctggccactttatctgttttttcatatataaaattcagatataatatgtacatcttaggattgttatgaggatgaggtgaaataatacatttaaagcataaatatgcttaaagcacgtaaaaatagtgcctggcatatggtaagcattcaataaatgttggctggcactattattataatgggtgaataggggtagattttcttatgctctctgctatacactgaatgtttgtaccctccccctacccccaaattcatgatgttgaaacctaattcccaatttgatagtatttggaggcctttgggaggtgattatgtcatgagggctagtgggatcagtgcccttataaaagagaccccagtgaactcccttgccccttctgccatgtgagaacatagcaaaaaaaaaaaaaaagctgtctgtgaatcagaaagctggctctctaccagacaccaaattggccagtactttgaccttggactttccagcttccagagataaaattttgtcttttgtaagccattcagtccattagtttgttatagcagccaaaacagaccaagaccctatctttctttttattattgatataaagctatatatttagcagggacagtcagctgttactgataagttaaaatgtacaaagcaagattcatttttttcctatgtatatgaaagtatctaagaacacttgggttgggtgtggttgctcacacctgtaatcctagcactttgcgaggcagtggcgggaggattgcttgagcccaggagttcaagaccagtctgatcaatatagggagaccccgtctgtatttaaaaacaaaacaaaacaaaaacacttgtaccctcaattgaaaggtctttagaggcagccaaattccagatatagacaaatattccttttattcacatttatataatcactatttatcattcaaaagacaaattcactggtgatttgcctatgtgatatggcctaccttgggccaggctgaagcttttggagaaactatgaaaaatgttatattgagttcaaattgtatttcaaggatgtatacttttgaagaaaaaatgttgggagataagtggaatagtgtgatgtttaaaagtgcactcccggccggatgcggtggctcacgcctgtaatcccagcactttgtggggctgaggcaggcagatcacctgaggtcagtttgagaccagcctggccaacatgatgaaacgccgtctctactaaaaaactacaaaaattagccaggcatgttggcaggcacctgtaatcccagctactcgggaggctgagaggagaatcagtgagccgagatcacgccaccacattccagcctaagtgaaagagcaagactttatctcaaacaaacaaataaaagtgtactccaggcacagtggctcatccctataatttcagcactttgagaggctcaggtgaggggatcacttgaggccaggagtctgagactagccttggcaacatggcatgacctcgtctctacaaaaaaaaaaaaaattgtctaagtatggtcttgttgcagatgaagtacttactgataaatacctatgcccttgaaaaagcctctgcatttgacagtacattatgtatgtattgtgtgtactatagcacctcattaagaccaatctggccaggtacagtggctcaaacctgtaatcccagcactttgggaggctaaggcaggaggatcacttgagcccaggacttcaagaccagcttgggcaacatgaggaaaccctgtctctacaaaacatacaaaaattggcccggcacac

SEQ ID NO: 44961 - DNA, 1254 bp, Homo sapiens
gttggctgcacacggtggctcctgcctgtaatcccagcactttgggaggccgaggtgggaggatcacctgaggtcaggagttcaagaccagcctggccaacatggtgaaaccctgtccctactaaaaatacaaaaattagccaggcatggtagcacatgcctatagtcccagctactcaggaggctgaggcaggagaatcgcttgaacccgggaagtggaggttgcagtgagccaagattgggccataatccagtgacccagcctgggtgaaagagtgagactccatctgaaaaaaaaaaaaaagctaaagtcaacatatagcataaatgagtagatgtgtcagagggtgagtaaacctggaatgtctcctattccttgatcaaatacccactagctagtggttcaccaaatggctggtgttattttactaaggtcatcagctgatgtaagtgtgcagtttcatcttggtggctagatctccttctaaagagagctggctggagatttcttgctgatatttcctggctcatggtgcttctgtgaaatatctccagactaaagtggcatttaaagcccacttccaacccttcctggagcattcagtgggcaaaggttccaccattataaatgtacttgcttttgtcttccctgtagccaccacagcttctactccaccaattcatgtctggcactttcaaatccaaactcgaaactcaaatcctttgcaagtcttcctcagttattccctttagctgtaatgatgaatatttgtccccataattttttttttttttgagacagtctcactgttgcccagactggagtgcagtggccaatcttggctcaccgcaacctccacctctggggttcaagtgattctcgtgccttagcctcccgagtagctgggattacagatgtgcaccatcacacctggctgatttttctatttttactagatacgaggtttcgtcatgttggccaggctgttctggaacttctggcctcaagtaatccacctgcctcggcctcccaaagtcctgggattgcaggcatgacccaccgtgcctggccttattcccatgaattcttattcaagattttattggaattatttggttattttcaagaacaatataacttgtatgagcttaaaatattttatggaaaatggtaaatatttgaaaatagaatagtataatgaacatctaagtagtggtgaatattttcttttttctttatatcttttgggacag

SEQ ID NO: 44962 - DNA, 2917 bp, Homo sapiens
gagccaccgcacccaggctgtccagagtttttattggtgtaggtttgatcaactgttcacatggcttatctgtctccagtccctcagtagtttgaatgaatgggcttgcttgtttcgtgtgttgtgtcctggcttgtgtgtttgtccagaaaagttgtttctcctcctttctttcctactggcagggcagtacctggctcagggctgtgcttatggtagaactcagttctatgaattgtccatcctcaaatatccttcattacatgggggaaaagggcaagcatcctcctctagcctcttcccactgcttaataaagtgtctccctttcagtagctgccctaattctggatcctctccattctgacatctggaaattcacaggaggaaggagtgaggaaatgaatcccttctaagtgggtttgtgtgaggtgactgatatgtcagatatctcacaagaaaaacataatagcggtagtttgttgttccatcctttcctgtgattatggaataatgaatgcgacaattcctggggcgtggtggcttacgcctgtaatctgcgtggatcataggatgtcccataaaataaagcttttcattatcacatgatcctgggcatgaagagtcccaactcccctgactatcatttatttgtcctgtatctaagaaatggggtcagcaggagttccagcatctcagaattgtggtgaaaaccaatacaagtaaggaagttattaattccccatttggtgggttcctcaaccccagccactggggacggtccacgccggatcaccagcagctcaggcttaaggccacgacgcgcaagcgcagcctgccagcctggctccctcccaaagcttgcgtgcaggttggcggcgggagatcgggtctcgcgatgcgagtgagcgtgtgcgtgcgcggccctcgcgagctcgcgcacgccgcctctaacactacagggtggtagcggcctcttcgtactgcgtccggggcaggaccgtgcgcggcggccgcggcgggtgctgggagccagcgcctgcctcgccgccgccctcgctgcctgccactccgtcttggcccgttctccgcaccgtgcagaggcggcgggctggggagggagcggcgccagcacgaggttcccagccgctgggaagcccctagacgcgccgaggggccgggctacgagcggctgaggtaggtaggggtgcgcgggctggtcagccggccgggagcggggtagggcggcggcgagaacgggcgcctcgctgaccggggagaagaggcctcctgccaaggggccctagtgtagccggagtgagaggaggggccccggacgtagcctgctcttccccggtgtggagccattacggggggacattcctcctgcggcggggggagggagccccctttcttttctttgagaggtcagaatccgcagtccgcccttcgcctttaaataaaagcctgccggctcgagatcggcgtcgcgatggagtgcccgtggacttctacgcttgcggaactccgagtggacggatagcggcttatgaattttgctttttagagggtacacaaccctttctctagggtggcgtgcatcttctgcaaacttgttattgccaatacgctaatagtcgctttcagcacacaacaggtaatacattctaaacgcctcgtgtcaaaataaggagagtccttatttgtgcaccgtggggcacagttaaggagcaggaagaagacaaaggaggccgttatttatgtgccgtcctattatcaaaactttccgtggtggggcagggtgcgtggctattggcctctgctgaatggactttcagagtgattgaggtgagttgcaaatcttcatttagaattatgaaacgtatatgattatacataatagttagtcaaatgacctgaaataaatctctgagaattacgtgatctttgatctttggagaacagaacttgggtttcttgaaaggaagctttctccatgtttagaaagcttcagggatgctttgtgaagttactaaaaatagttacatttctttatgttggcagtaatgactgccacattcaagagaagagaaaggaattgttctataaagaacggctcattttaggggttaaactttaggagttaaacacaataaaacaacttcaaggatggtaagttttagcttatgctttaagtattcgaatttagtcacagtccaaatatatagaagctcttagttgactcctgtacattcagggaactatttattggttgtttttgtttgttttgttttttttgaaacggagtctcactctgtcccccaggctggagtacagtggcgcgatcgcggctcactgcaacctctgcctcccgggttcaagcaattctcctgcctcagcctcccaagtagctgggattataggcatgcgccaccacacccagctaatttttgtatttttagtaaagatggtgtttaaccatgttgaccaggctggtctcgaactgctgacctcgtgatccacccttctcaacctcccaaagtgctgggattacaggcgtgagccactgcacccggcttcagtaactatttaaaaagatgatctttaacctttgatagtctacacaacctgttctataactcttggcttctattcagtccacgctgtctggaaatgtagtattcatcctattttttttttttttttcctgagatggagtctgtttcctaggctggagtacagtggcacgaactcggctcactgcaacctccgcctttgggttcaagcgattctcctgcctcagcctctggagtagctggagttacaggcacccgccaccatgcctgactaattttttggatttttagagagagggtttcgctgtgttatccaggccaggctactctggaactcccgacc

SEQ ID NO: 44963 - DNA, 1839 bp, Homo sapiens
tgggaatgcagagccctgttcctcatctccccatctatgctttcttcattctaagccctttcctatctactttatgctcgaggtggctccacctccaccatgagccagagccaatgatgctcacggccccaaccatgattaaaaagagattgccctgcaaggtaaatcagttaaaaccaacctctcctgccctgagtggataggtagggttagggttgccagatgtcacgaagttacaggatgctcagttttaaggtatatcccttatactataagggttatagtaaaaaatattcattatgtgaaattcaaatataactgggtatcaggtattctatgtggcaaccctaggtaggggagcacaggttaggcaagcgattagaagatttgcagcctccaaagtttctgcacctcgatgggacactagaacaggaaggctcctgggcctttctggctctgggaatgaagcgtggaaaaccctccttaggcgggcgcagtgcttcaagtagccaagctctgacttccgagggaagaaaggaggccatgggcctctgccagagccatgctctgcactctggggtcagcagagttcaaaacgacctgcaacgtctggcgcttagctcctaaagaggtctccagtccagcgccgacggccagcggctagaggccgtccgcccgactccaagatggcgcccgccacagctgccaggtgttaagatggcggcgcggggccgcgcccgcgctcccaggctctcctcccccagccttcctccggctggcagcacgactcgcgtagccgtgcgccgattgcctctcggcctgggcaatggtcccggctgccggtcgacgaccgccccgcgtcatgcggctcctcggctggtggcaagtattgctgtgggtgctgggacttcccgtccgcggcgtggagggtgagtgtgggccgggggcggtgcatgagatgatggggcgagctgaggtccacccgggcgacgctctggacctgcgcgaaggccggcggtgcgcgactcgccccttcttggcgtctccccgggcgcgtctccccgacttctctccccgcgcaccgcccgctggtggcccgcgaaagggggccggtgggctgagggccggtggacgggagcccgggggtggttgggccgcgttcaggccgccctcagcccgtggctggtagccaggagggacagtgcggtaagcgctgctgaggcataccctctggtgataagcaatttattattaataacattatatcaaataccgacattgttgtggccgtattaggagccaggaactgtgcatcgtgctttatttacatcattatcccatttaatgctcccacaaaccctgtcagatcggttccgtttagtgtctccatttcacagatgaagatgctcaggccccgcctaagtttgcgcttctgatacgtggcagaagcctgtctctctgacgccaaagcccagtctggagtccacgctgctggaccactgtcttaaggaggccagtcttgctcagctccctgcatgaaaaacagacgagaaacacgggagactcccggtaacccccaacttgccggtagggaaggcagccactctagaggcatggcgagggtggagagtggaggccttactttcatgctccttcaccccactcctcatagtcctgttaaagtccagaccctcggtctcgcttgtcatttagaccttaacaggaataggcaggtctttcttttccctggggtgtcctggatggaggcaggacagcagagagttgtggagaagggtgagtcatagtaacacaattaccatgaatgaaagcgctcactgt

SEQ ID NO: 44964 - DNA, 2090 bp, Homo sapiens
aggccatcctggctaacactgtgaaaccccgtctctactaaacatacaaaaacaaaattagccgggcgtggtggcgggtgactgtagtcccagctactcgggagactaaggcaggagaatggcgtgaacccgggaggcggagcttgcagtgagccgagatcgcgccactgcactccagcctgggcgacagagcgagactccgtctcaaaaaaaaaaaaaaaaaaaaaagatacaagtgagtattcttaatagtatgtcaattacatctcaaaaaagtcaaaaaaaaaaaaaaaaaaagaatgaaagaatacctccccaaaaatgatacaagaaaagattcacctaaatctgttcacagctgtctgcagagctcctactgtgtgctgagcctgggggtaaacagggcacggacacgtttgggaggggattacaggccgggtttccacactttttggtccaggcaaacccagacgagccagctggctcaagaacttggcagctgcgtgatgactgaacagaggctgcgttcgaacccactactgcaagacttaggagcccccgatgggaactgccgtggttcactgccccagccccgccgctcaactgccccgccctggcctacgacatcctcctgcccgcatggactgcgcgcagcgccgccaagcggggagcccagctcggtgctagcgcccgcgaagcggaggaggccggcgcccgaggctgggcgaagttcctcctagcgcagcgaggaccggagggcaaggccagcgcgcgccgggcgacctgcgtcccgggcacagacgcgacgggcccgcacggggcggggaccgcgcgcgcctgctgggcctacggctgtggggcgcgcagagtccacctggcggccaagggcgctggcgaccgctgaagctcctgggggtgttcggggtccgggctgcgcctgtgcccgcgggaaggctgggcgcttcccacacacagaccccgctccgggccagccccgcagggagactaccagggctggcggtagctgggcgtggtcgggtcgggggcggctgtgggcggccggcaggcagcgcgcggggcagccctcggcagacggccaatggcggcggtgctcggggcgctcggggcgacgcggcgcttgttggcggcgctgcgaggccagagcctagggctagcggccatggtgagtgcacagcggccgcgtgggtgggggtccggggtcggggggcggtgcgaggcccggcggcgtcggctgagggaccagcgggactggggcgaacccggcgtgggccgagccttggagctcgggcgtcgggtcaccgcgtcccgggactgaccacctgtccggtgcgccgctcagagaccggggtggccgcagcctccgccacttgcccttgactttacacttccgccgaagcctacgaacttgccaaccggaaacaaatgggaacgaattttgttcagcaactacaaaaggcagatgtgaaaagtagttgcagaacaattcggtgcccgctgccgctcgttgtgctgaggacgaacggcgctgcgggcctggctccctatggcggctccctgctcgcgcttcactccaaggggaacccacagaggttttggaggagttattaataaattgtcttttttggtgacatattgacttttctttccttttccaaggggccgtcagttttcctgctgtagaaattaatattttggagtaaatggagggaaagttttaacatgcagcaccacctagtggaaaagtggtgcgttaaactcaccatctcattttaagttgcattttaaccgcccatttcagtttgaaatgttttgttttgttttgttttttcgacacggagtctcgctgtatcgccgagcccggagtggagtggcgcgatctcggctcactgcaacctccatctcctgggttcacgctattctcctgcctcaccctcccgagtagctgcgattacaggcgcgtgccatttcgcccaggtaattttttatatttttagtagagaggggttttcgccatgttggccaggctagtctcgaactcctgacctcaggtgatctacctgcctcggcct

SEQ ID NO: 44965 - DNA, 535 bp, Homo sapiens
gaggggacacacatccaaattgtatcaaaaggcaagctgactttaagggcacaagaagaaggctttcagagagcagagagctggtgggggcagaggtgacgtttacagggccggcccagcactgctggcagagcaagctgatggatatttggcacaaagtcacaaagcagcatttctgtttggctctattcgcctgcagagcaaacacggcagattggaattcccacttgggctctcaccaactcaaacaggcttggccaagacctttaattgatttgcttggggcagaagtggctctgcttacccacgcctggctgtggaaagcaggaccctcctcaccctcccccgaccctgggatctagtagggttgaccctaaatggctccttcgtctccagcctgccagtctgatggtttgggggccacagtgggatacaggggacttgggcccgagtctcctcctggtcatgcccaagccctcccccagttcttgtgggatggatctggaattcaaggctggaggtgtttggaaggtgg

SEQ ID NO: 44966 - DNA, 944 bp, Homo sapiens
aaaagatgtttaaaaagtataaatcatatacaattgtatagggttgttattgatggaaggacatggtggtgtatggatagtcattggcaacagatgacttgtaaaattctgtagttagattttaggtgcctgaagtgaatgagtgagttgaaaaatatgccaggcaagacagctgtttacatttctaggaacgcatactctgtggtttttccaattacacatcttttacttaaatagaacaggatattacaaaatttaacctgttcttgttgcccttaccattaaaaacattgtcaacagttgagagctcttaggggccaagcactgactatgtactttgactgtattatctaatcctcatcacaaacctaggaggcagatcctataattgccagtactattttatagtgaggaaacagtctcgccgaagtggggcaacttgcccagccagggtcatacagctaataagacacgggcaggtgattgaacccttgaaatctgttgccctccagtattgccagtaagtcaacacaaacatttgacctttccccgcttcctccctcttttcctcctcttttctgtagataatttaatcaaaaaatcattgggttctggtatggtggaatgagaagtttgaaaaatcctctcccccaaaagcaatgataaaactggagaaaatcagtaaaaatcacctgaaaggctctagaaactgagcaagatcatacatttcatacaaatataaaatggcacaaccactttgaaaaacagcttggctgattcttaaaaagttaaacataaatttactatccaaccaatatacacttttaggtatctacctgtattggttttctatcgttgctgtaacaaattaccacaaacttagtggtttaaaacaatgcaaatttattatcttacacttttggaggttagagtccaaaaggatc

SEQ ID NO: 44967 - DNA, 2120 bp, Homo sapiens
ctgggtcattaaaatcttacaaggcctttatagtcattgtaattgttgaattcaaggtttgtcccagttgtttgtacagaagtctctcactttgaaactcagaaacatttcccctaacatcttgtctaaaagaacctttcaagcaatgtactgaccaactccttgagtgatctgtggcccctgcaggagtgggggtagggagcgccatgtcgcacacctgttgtcaggtgacactgccagcagcatcctgcacactcacctccccactccaccccacccccagcgaggctctttcctgctggccttctccacccggggaagcctacagccttccggagttaccttttaaaaaaagcaaacccttcctaccacaaagcaaacaaaaggctgataccgagacaatcgggagcagcgggggttcccgtggcccctctccagcccatccttggaccactccccaacccggtcccccgcaccagcccggcttcaatcccgcgagtagcccccgccttcccctccctgcagatagcgagccagacgcctacacctcggccccccggggctcgggcccgacttattgtgccggggccggcaactcgcgggccggcgggggcctcaccaagtacaactctgctcacagcagctcccgggtgcccaggcccagactgcctagccagcgccgcggggcctcctgcggcctcgggcctggcccgtgagcccgccccaggaagggtcgccagggtaggcgccagcaccgcttttttcccacaaaagcgcccaggcgcgggcagggggatgcgtttcgaagagaagttggtttccaggtttcttttttgaacaaaaccaaagggaatcccgcgcggcccgacaaggcctgggaggacgtagtgcacgcgcgaggacccggcgtgggccacaccgaacccggcggcccgagcccggcccgcaccacaccggtgcgcgccaggccgggccgctcccgggcacccgcggccggacccgagcggcggggacagggagtgcggcaagggggcccgcgcggcacttacgcggcggctcggtggcggcggcggcagctgcaaggtgtctcggcctgagccctcctggccgctcgcgccttttctctccgcgctcctcgctggcccgcccgcctcttcgcttcccgcccgcgcggcccgcgctctccccctccgcccggcgccgctgccgagtgaactggaaccagtcctcgcggccggcttcccacaatgcacagcgcgccgctcgtcacatcccttcgcggccccgagcgtccggcctccgcgcccgtgccgcccggcgccccggccttgaccccgggcccgcgccctacccgttgacgccggccgctctgcgcccaggcaccagcccgcaccccggacgcgaggtctgacccatgaccccggggacgcccagagcccagtccttgggaagggccaggcccctggagaggagcttcttcagggcgcgtcccagactctgcgtctcgagtgaacgcctactgtgtgcctggctctgagcacgggactgtcgctgccacggcatctttaggaaccttcccactaacccagtgggaaggcacaatggctgttaccagcgatcgctcttccctccccagtcaatgccaactcccccctgccccgcctcagagaccccgctgtctttagatacaggccaccgccaagccctggtctgccccaagatcaattactgcgcacccggttcccctggggtccttcagttaatcctcctcaccccgaagtctggaacctgccttgcacatggaagcggttagctacttcgcttcagcaaaagttcactttcggacccaagttgggaattactaatgtagacagtgattccttatcatcacacacgttttttaaaaactgcggacaggccgaaagaggaggagccgccacaaagcccgccacgtcttcctaaattggtttaccgcctgaaggcattggtgccccatcccgggtacttaaatgggggcctgccctctactcccctccctccaaagtgtggagccggaagccacttctccatccagctgtgaactaaatttggataataatacacatccctcagggttgatg

SEQ ID NO: 44968 - DNA, 2866 bp, Homo sapiens
tgtgcttggcaggtcccttaaccctttggtacctcagttaaagtttctcttctataaaatgggatagttgtgtttaataaccctttggaaaaaaacagttgagataagtgaatgtgtgaagacattcagaaggaaaacattgtgtttgctccctgatcttttccttcttccacattctgatcccaatttatagctcatacttgaagcagagttcttggaagctgctccaaagacagtgatgtaactggttacatctctggtttttcatgctgtcagaactgtgagcccttgaggcaaccaacgttgggcaaggacactaagaaaagaggttagggaccaaagggttgggtgggtggttgtgcaacttcatacctttgagcagagtactgtccacagccatggcggtcacacgtccggatctcattggaagacttgccagcacatatattagcccatggccctgccagtgctaaaaaggagaaaagtgagagcagagctcctggcctcagacatttcctatccccatttgccttatcagtcacacagttgatcctgacaattctgttttcactgtagttttccctggactttatgtatttatgggaagatcgtccttccagaattttatttcctgattcagatgtaaaattggctttttccctggccacagaattctgctttgtgacgttagagtatcagtgaatacaattttttttttttttggatcggagtctcactctgttgccaagctggagcacagtggcgtgatctcagctgacttcaacctccatctcctgggttcaagtgattctccttccccagccgcctgagtagctgggactacaggtgcgcaccaccacacccagctaatttttgtatttttagtagagacggagtttcaccatgttggtcaggacggtcttgatctcttgacctcgtgatctgcctgcctcagcctcccaaagtgcagggattacaggcgtgagccactgcgcccagctgaatgtgtttctttataagcattggcctccatcattatactttgcttcagatccattagtaaatggtataagttgtgcttttctatttttctttgctcattatctgccatggggatcattatttttagattaagcaaaaataataaaatagcatggctcagaaaataattttagaaattgtaattttgaaatggttagttccactaatcaaatccaagcaaatgtttgaattaaaggagaaacgaactctgtactagccaagtttgtttaacactagataaatctctcatagttgccaacatggaagagggagattcttaaaaataatctgaaatgtcaaaccaatttagcctagactgagattaggggtgaaggtaggagaaggagtagaaccaattatatgaaaaattatgaaacgtggaggaggggctgctttctcagcagacttggtgcaaactttgtttcaggcacaatttgtttctttactatagtaagcacttaataaatgttcaatggaattaaatgtcctggatttccagtgttaacattcacagagagatacagtgagcacactcaaccttgcactttgaaacaaacaagcaaaagcgagagcctggtaatttgactattgattttatttaaagacattttactcttcattaatacctatcctgtgaagagaacctacagaatatggccattaagcctcttctttaaaatacttttaaaaggtgggtttcaaaagttttatgccttggagccaagctccaaatcaacaccttgatcaagatataatcccatcactttggcaactaatatttatccttgggaattgaggcaaatatcagacagtgtagtaatttattcactttttcctccttcggtgagtattaagggagccatccctttgtcttaatccataccagtctctgtattagtatctgtatcagaatttgattttgatcaaaatcagaatcaaatatttatatcaactttttattatctagttttgttctagttaagtcccagacccagactcagactgaaaggctttgtaatgtcttctcaacccactattatgtttccctcattaaagaaccggaacattccatttaaattacttaaaacatcctcaggaccatgtgtcattcctatttcatttttaatagccaaatacacaagtctttgttgtgatcatgctattaatgactttttaatctttttagtcttcccctgaaatcagtttttaaaagttaatcaatattctaaaattgcactttcgacttaccggtagaaatcagaccagccaaaaggagggctttggtggaaaacatctggttttacttcctttagtttcttcctctgattagagttgcccccacactctctttgaagaatattcaagtttgaatgaatacttcctagctatttagccttagaattctgcatctctcatttctttagtgtgagacacaaaaagtttaagaggatggagcaagtcaagttctaatattccatggatagctatttgatttgcaggtagggcctatgtaaaagcctttgatctgaagaagaagccaattatattggaaatactgactaaatattaacagaaaatgataaggctaggtgcatatcgacagtcttctgggctgtggcttgtaggagaatgttcgtgcgaatgatggaatatttagtgctgcctgctggtagatctttcttttatttccttgatagcacatatttcagaagaaaattggtcattaataatgtgtagcccttcataacatattccttaatatatcccttaggtgtttttgaattctcagtttaattatatttcacctgtgtaatatttgcaaata

SEQ ID NO: 44969 - DNA, 2376 bp, Homo sapiens
tatattaaaactaatttggacattttatggaataggatgcaaaaatctacataacttagtaaggatgtaatataaaacttcaaagacattgaactctactagcagtagacatctccactctgtattcagtacttacatgaagttgtgtgactgtatctcacaaccagatccacaaccctacggaaagtatgcatgtaaaatgtacaaatgttcatatgtagaacatatgtagaatgtaagtgtcctccctctttctacctaccgagtgctaaaggaagagaaccaaaaggagattatctcttataacttggtaaattacatcgtctacctttacagcttacaactattcatatttacctaaagttgctctcaagaattcttgtgaactgattaactctctgtctctgtcatatcttttggcccaaaaaaactgactgatgatcatttacatgaaataaaataatattactctagcctatgatgtttaaattagacacaaacttttaccaaaaatggctttttacatcccattgggtgcaaataggcaatcaagagactctacaattactcgttatttaaaactgttgtattcaaatgagagtttcttagttttaaaattctgtctgagaattttgtgtggaaactgaccatgtggttctaagatttcagaatgtactaagccccagtcaatagaaaatcttcattctatcaaatacttacagaactgtagtgggcatagttcctcacttagcttcaccatgtgctagtactttgaccagcagaaagcaaacagcccggggccacctagggaaacagacttacattactccagaccatggtaaacagatgtgtttggtccactgagctttgaaccctgaaattacaccacacacagacatagtcagagagttgccagaggttacaacacacacattcttggcaccattgttctgattgactcaggccagtggaacatcttaagctagtggtaactcaacaatgataatggaagaaatgaaggtagccagttcaggcatgaaaatccctctcctgctactgatacctcctgaaagaagaaactggcaagaaggactgtcacagttggttacaatactacttcacctttcaacaactcagtcattcccacacccagtgtgcagtgcgcatgccactgaactctgcacagaaagaacatgaaggtgggtaaggaggaaagcaagccagtaaagactgagaacctgggaggggtcaagccctgaggtgagaatgagggtgagcatggacccaggaaaagggagacaagtggaggaagtgctgggtgtcctgtagctcactgagcctgtgaagcattgtagagggcattgggagccaagcctaagccccctacttccctgtttccaacaataaagttggagtttctgaatttcatttgactctagggagatctggaattgttccaggaatatttctgctggctgctatgagagagaatagggaactaattattggaggtttaaaagcatttgggcaagaactaaatacattcatgtttttatctgttttcaaagtttactttaaaattttttatgagcacatatatcagatataaaacaatcccttctgttattgctaaataagaactgtcaaggaaagaaacttggttggatctgctggacataaaagagagaaaatgtgaccttcagagtgcatcaccctacctaaattgaactttagccaggcaacagggtaaacagaaattttcagggaaaatgtaacagtcctagcctggaaacatcttctgtgatttcaagttcagacagtttctttctgttggagatgatgttttctcttgcaattaacaaaagagcacccatctgtattagggttctctagagaaacaaaaccaataggagctatacatatttatagataggtagatagataaatacagttatgttaaggaattggctcatgcagttgtgggaggtggcaagcccaaactctgcagggcaggtgtcaggctaggagacccagggaggaggtgatgttgcatcttggaatctaaaggcagtctagaggaagaattccctctttcctgggggccttccatcttttttctcttattgcctacaactgatgggatgaggcccactcacatcatgaagggtaatcggcttcattcaaagcctactgatttaaatgttaatctcatcttacaaatgccttcacagtgacatttagactgtcatttgaccaaatatctaggtaccatggcggagcgaagttgacacagagagctaaccgtcaaacaaaccattgtagtgcctttggttcaggagcaagactttgactatgtcctttgacttcaggagttga

SEQ ID NO: 44970 - DNA, 1912 bp, Homo sapiens
ctcttctcttccttcccttctacttaaatgcccttcccatcctttaagtttcaactcaagtcctactcactccatgaggttctcctacttgtttttagattttctgcactccttctctgaactccttcagaacatttttctaggacacttaaattatttcagaattatagtcttatgttgtatcctttgtatagatctcatttacctgtgagaatgcaacctctctaaggataagaactgggcttccctaacatggtcaaacgctactttaacccaaacatgcttaacttttttaagtgttggttagttatccagtaaataaatgacattactaccataaacttattttgagactatttggtgaactttgtcagatttttgatgtttgagaatttgcaatatgcgtcccagtcacccatgaaatgtttaaaatatctgtcaaataattcttatttccaatattatctctataaaccatttgcccctaataaaatattcatgggagcagggatcccaagcattcatttgcacagttattaaactatgacagaatcaaaagaaccaagattttcttcagatgttttacattttcttggattaaaaaattgaataaatttgtattatcttttaatacggtgaccagcatcttgcaataaataaatactatgtgttaggttatgatgaagaaaaattagtgtattgtacagagggaatttcttcatggaccataatggccgccaagaggtcaactctgcctctaaggagctggtggcctttctccctccgtttccctgtgcgatgatgcaagggaggacttgcagcttcacagtgcagagcagttggagccctgagccgtcccgttgcaccgccgctctgtggccttccgctagtgggcgccgctgagcggacttcggcgcttctgcctcagcactccagagccccacagcctgcgtcaatttccaatcctgactgacgcatgtggggctgaaatggccaggattgtgaaagtcggtggaataattcgattccatcagctattctaaaggtctgccctggccctctggttttgagtcatgcccacactagaagtttgcagttttgccaccatggcctgttgccattgaaacaaagttcatccttggtggaaaatgctgatcttcatagagcactgctgtcttttttattaggatggttaatcccttcctacatgttcagggcgggtacgggcctccctgggcttctggactaattttcacacgcaaaagcttagagatgacttgggtggtagaagttcagagcggggagaaagcttaggaatcgttctagtcaaatcctcttcttttacagaagaaagtccagtccagaaagaagggattggtcccgtagccatccagcccctcagtgacttaggcagggttgaaactcgtagataactgacaggcagaggtagcaccaaaaagggaccctcaaccagaggttcccagcacctttcattaccttaactgtgctctgggagccttcagtgctgtggatggggtgtggattgcagcctgccttagtctgcttttgtgtaagcctttattggctgctcagtatgggtcaagcagtggacgaagctctcatagcatgtatgtctcacttaatccgaggccgtgccatctggtgctacagagacaggatctggagccagcagacctggactcaagtcccagctccacttctcaagagccacaaggatttgggcaagtaacatccccttcccacacctccctttcctctgctgaaattggagaccatagtagaatctcccattgggtgagataaagcatataaaccacttagcacagaacctgcctgataggaagtacctcaggaatgttagcttttgttttttttatcagtcttacgcact

SEQ ID NO: 44971 - DNA, 6077 bp, Homo sapiens
atgggctgaggcctgttctagaaagctcgaggcaatgttagtgatgctggcccatagaccactttttgagtaggacttgaccatgccacatcagcacagcacttgcctgcattttcacttctctagggaggagaaattccaaaaatactttgaccttttttcatctgctattccctgggatgttgggccctgctaagagagggctgcctcattcactggtggttgttgctcttcaaggacaaatggagacttcaaactggaacacacacatccttggggctacaggaagaccttttagggagcatgcataatttttaccagaatcaacttccaagtccccattttccacaagtgccctctcctagaacagatcagcctaagcatgcgcctcccctctgctgatgctcctacttccctttcctcaacctcccttcttcatgaaggcaagatttccctcttaccagcttaccatggggcattgtgccaggacttctaacaaaggggaattagaaaaggcagcctctcaatgttcaattagagtttataataatagcaaacatttatacagaagtgtggagcagtcctttttctaagtactttacataaaattatctcatataatcctcctaatagtcctgtaagtaggtattattcttattctcaatttgcagaaaacattgacatagaagcagttaagtaactcatccaaggctggtatgagggacagagttgagatatggcagagattttctatcaactgcataaactcaatctaaagttccaatattttgacaaaaacgtaatgtaatgctcatattcaaaatacaatgctctgacatcttttacagttatttaaacacatgataaaaaatctttataagtcaactttaaaatgtgcaaaaaaggtcaattctttgagttgggttgtgagcaaaatatttgaagatcattgattttgagccaaacagccctggctatgactcttggcttagtcactatgccatcttggccaaatcccactctttctgaggcttagtctctcatctgtaaaaatggggacaaccatctcagcagggttgttgaaaagatcaaatgagacagcccaagaagtggcctggcctgcagccaactcagggtgaatggcaagtattattaatgtggttggcgtctggcaaatcttggcatgtggtaagagctccatgaatgtgagtgcccttccccttagtaatggttcccagatttgattcccatggaagcctagacatcttgtggagagggagggggtagcatgaggcccccaagtttcatgcctcccattgttttcccttttcaacttcctcaaagaacatctcaaaatgcacctcccccaagttgccttccctgactaatacagcttcacagtgacctttctctttcatcatttgactggctcatgccaggcactccatagttaattaaccaatgaatgaatgaataccgggaatggggtagtgaagaaggcaggcattatccctgccctcatcaaacttgccgtctggtagagaaaacagacatgtcactgatagatgctatggtgggagaagaaaaggagccagtaaaagcccacagaaagggcacctacccaggctgaaggcatcaaggaaggcctcccagagaaagtgtggtctaaattaaaatctcatggacacatggaagccagacagcaagaataaaggtctgtgttcacaggtttggaggtggaaaaaaagcatgctaggttcagagaactgaaaatattttagtaaattggctataaaaatgtatgttttccagtcttgaacttgatttcttgcctttccttggccttcacagacaatggtgtgcttctggaagacatgaaggaccttctacatcttttgtgtttaccctgtatttgcttgactatgcaatatccacagctgacactttaataaatgcttagtgggtgtggaacttactagaaaaggagacctctccgaagcttccttggagctcatttcatacattccctgggcctgggcagcactgtatagaatcccttctggccagaaaggggctaacagaatccacctactggcccttaagacatgtatctacaggaagccatgctctgaaatatcttttcatgcattatcccaaactcagggttatgtattaataggagcatttcacctgcaagggatattcataaccagtggccttggggctggggctctgatcctgtgggatggatgaatggcaatggatggcttgtctcattctgcatttcctgtccaagaccaaggaaaggcacagggttggcaggagggatgagagagcaggattgtccattcagactctggctctatcatggacaggtcagatccagtcaccagtagatggactcggcctttcttgctgtcccaaagtggcccttgctagccatctgttctcctcttctcacacccttcaaggctttctgatcaagtccacaaaattgactcgtgcaaatgacactgggaaataagctgtggtcaccaacaagtcaaaaccagctgagatcggatatttcttttgaggcatgaaaacaaagatttttggtaatcttttagagcattcctagctggaaacttttcccggaaatccataagttaagtgctccttgtgtcctagagagcaatgaaatttattcttacaccatccacaccaactgaacgctagttatgataggctctaaggtggtccatgataccatcgcatacataggtaagcttacttcctgtgtgtctgctggagaaagctgtgtttatgccaaatgaatttatgtttccagttttcaaaattcagagctgattttccctggtttgtggcaagcgggttggccagcaaatgaaaatcagcaggaggagactttcccaaaagtcaaaggaggatggaagcagaatgtgagaagtctgagctcagctagcctggtctccaagccttgggcaacatgcagcctgcctggtacgtgaccaaggtctgaggtcaaaggtgagattccacacacatggagacaggccagttgaaccatgccagaaactaccacttcctaagtgcacatcttttctctactgaaagcagacccaactgtccttagtgagtcctttaatatgtctgttttgtgtcatgcgtatgtgactcctcttaggcaccctgaagtcaggaacaatcttctctcacctctcccctccagaacactagcggaagcaaccatttcatctatgataagaataggaccctgagctgacgacttcctgcatatcatttccttggtgatgagatgtttttaccccaaatccagccgtgtctttccctgttgtttaggattattagatgtatgcacttttctaccaccttcttcttcaagagacatcttgcactgaggttcttgtgtcatttgctgttcctagcgtatgccaggtaaacattcagcaagaggcaaatgctttcagccacgtgagacctctgaaaggaaaacacaagcaggccttctgccggaaccagtagccgcctgctgttagctggggagaaaggactttcattcgtttttgtcatcaagctgatactgtgccaacacccacatctggaaacagttatcaagaaagaagaggcatgcaagcctgggtctcatgaccctgcagccttcctttctgctgctctatttattaacatactgatttagagtgatcaacctatgtccccagagtaagttacagaaactaaatttttaaaaggccactgccgtcacaccacttcacgaaaacaggccaaggtctaacttatggggtcttggatggagtttgtatctaaataaacacattttaaagttgcttattgtgttgtactttaatcactgagccaagcctttttaagctttgtcttgagctctgtgcccctcctcagcttggcagaactctgtcctgtcagtctcaagggcttgatagaatttgtacttattggatctggacacacagatagaggagtctgttatttgcacatcacacagacccacacacacagatacacacttgttgcccttccttgcctccttcactgtaagtaactagaaatttaagaaggaacctgaattatgtttgtgtagcaccagtgctatgtgatgttagttgctgatcgtgccccaaaggtataaatagactccacaagggctaggggcctaccttgaggcttattggttttggagtttgaaaagtgcccacagagaagacttgaacctatctttgagaaggaccaaatcaagtcataagatatttagtagatctctctacaatagagggaggaataaacgtggccattaagagtgaatacagaggaaagcatttctttcaggcttatatatgtctcaggaattgtaaagcgctaacaagaaccagaaattcagaccagcaatcctgtctctagtactaaccccgtctccggtttctgttttgatgagttgcagtctaccttgatgacttggcttcactgtccaccagatgatgaatcatcccttctgggaagaatctggtttccctccggctaccccaaactccccccgccaatccttgctaccctcccacccccgttgtgtggtgtgtggttgggtacttccctttggagtccttttgggtatagccatgcatttggcacttatttcattgtatatgtgcctggctccccaccaaagaatgactcacttgtgtctagaaccgtaataagcagccgactgctgggctcctaacatgaactcagtaaatattggtagaatcgatcaagaaccactttctggagcaagctggttgttcatatgttgtcagtagtagtttttaaaaataatgtagaataacaggactaactgaacttctggttagactgttacttcaggaatgtgctaactaacgtgggaaaatcttttctaggcaccctggaggtcattttaatttttttgttgtcctgggattttggtgtatcaaatgttcattgaaatgaccgtgccacgagtttgaagatttctcaggcacatttaattgctatttcatcagtaattaaatgaggaattaaaggttgttgaggattactaagcaattctagttgatccactgaaaggaatgctgattcatggtcatctagagagtgatccagcagctcaggtcccctgtctgtctggagaaggggatgagtggctgcgtgctggctgctttcttccccaagcctgcctcacttaccacagcagctgctagagtcttgctcagtgaaaatgtgttcaagggagaaggtttgaaggttgtattagttcgttttcatgctgctgttaaagacatacctgagactgggtaatttatacagaaaaagaggtttaatggactcacagttccacgtggctggggaggcctcacaatcatggtggaaggtgaaatgcatgtcttacacggtggcagacaagagagaatgtgagccaagcaaaagagatttccccttataaaatcatcagatctcatgagagttattcattaccacgagaacagtatgggggaaggtaccaccatgattcgattatctcccacccggtccctcccacaacacgtgggaattatgggagctacagttcaagatgggatttgggtggggacgcagccaaaccatatcaaggattttccaaaaatatgcaactaccctagctggggagggggtgcatagtggtttaggtaggacaagtacttagggctgggctgcctgtgttcaagtgctggctctcctacccactagctttgtcaccactccaacaaacttcttcacctctccagccttgccttcttcatctggaaaacagaaaagagaacagtactcaacccataagagtattttaaggatggaatgacttaacacataaaggtattgagaatagtacctgacattggtaaactcttatttttctttaataagccagtattctacgtgggcacatgcatgcactgttttttttttcctactgtttttttttttccttctgctttcttccctgcatcattctcaaacgtata

SEQ ID NO: 44972 - DNA, 2228 bp, Homo sapiens
ccacatttttggcgtttctgtggatcacacgatttactcatctgtctttcaatgagcatgacaggtggggtgggggtggagggattagagattgaggagctggggagggtggtcagctcctggggtgcagaaacaagtctgatgggccatggtgttctgggaatcagcactgcctcccctcacccctccctgcagtgttttgtagcctcaagatcagtgagggaatcttcgggcccccagcatgcaggaccgaagcccccgagacagctgtccctcagtcccaaggtccccatttggaagcagccacaggaggcctaagggacctatacccttggtttgaggaagactgtggcgagggagagagggagggagggctggcagtgagggcaagggctgggaaaactgagcacgggcacagtgcgggagcgggtgggtgcccagggcagccaggggcgcacgggttgggaggcgccaggcggcccgccctccttgcacgggccggcccagcttccccgcccctggcgtccgctccctcccgctcgcagcttacttaacctggcccgggcggcggaggcgctctcacttccctggagccgcccgcttgcccgtcggtcgctagctcgctcggtgcgcgtcgtcccgctccatggcgctcttcgtgcggctgctggctctcgccctggctctggccctgggccccgccgcgaccctggcgggtcccgccaagtcgccctaccagctggtgctgcagcacagcaggctccggggccgccagcacgggtaagccgagccgcctggccaggggctgcggaaggtcaggtagtcggggctcggagcgcaagccgctgggggcattgaactgggctgggggcgcaggggacaaagcccgaactaaaaaccttgcagcatggagcgctcggacaccagccctgcacgcggtggaaggagagagggagggaggtggaggaccatggagggaaagcgggaggccgccgctttgtagaagggagtggggaagtggaccagagactttcgacgcaggccaagagcctgagacggacagcgctttcagcttctcctcccagccactgcagaaagggggaaatggcaactctttggccataatcaccgtgggagggtgccaagggcaaagcccacccagcagtacacctattccaacccagccaggcccccggccagcgactccagacaagaacctgggccacacacggtggcagcatctaaggtgccccaggctcctgtgctcctggccaggccctgcactcagacactgctggcacccgacactgctctctgggtacagcaagggcaatgtggcacttcttgtcctgcccgatgaagagcaggagaatgcactgggccctcacacacactgttcaaatggggaaactgagtcctgagtggttccactttcccacagtcctgaagtgtgcactggagccaggattggagtctgtcttaaagtaatagctgggtttgtaaatgtaggacactatcattgcaggaattcctttgagaccctgaagatgtgttggctttaggagacaaactcaagcagaaggtctggtctgatagtggccctaatactgacccaggcagaggcaggcaacatttctacctcaaaaaccaggccatacctgcgtcacaaatacccaggctttgctgcagcttccagcctacctggttgcaccaacttctttttcataactaggtaaaactatatatgagtagaatcttgtagtgactcctcagaggaagcctaaataccatcggggtctggcgttcacacccacaagcaatgcccaaacctccaagagactgggcagatctgtgctcaaatcaaaactcattgttgggggtgatagagttgacttcacaggccctgaaagtcttggctccttgcactaggagtgctctgggtacgggtacaggctgccccttgtagggcatagttgctcttgtttcctctacttgtggctttatggtctaggcctttcaggagtttggggctctggcggagagggcctgctgggagcacatctggccaccctgcagagtgaaatcaaaccaggcctggctgcaacctcaacaccctcctggaaagaggagaatactggggatatcctggggtctttctggaagtgggagaatcagctttgacttgggcagtgtgcagaatagagtgaggggggatgtcagaaagatga

SEQ ID NO: 44973 - DNA, 429 bp, Homo sapiens
gagccctgggcttcagagggccatcttttttgttaattcaagtttctctgaaaatggagacccgtttatgatgacaagctggctacagggtagcatctgccacactgtttcgggggtgccgctgggctgaagcatttgcccagctagttaacaatagctcgataacattccctatcagtgtccaggctgagaatactgtcagtgatgagtcgccttggctcttgtacctgtatctttgtgtgccaggacaaggcacaagcaacagagctgtgtgttgccaaaatgttcctgatgagcaggtcaacccctcgggggcaggtttggatatgataatgtggtgatgtggtggcgcagctcccttacccagtgagcacaaggggagtcctctaggaaaaggaagaaatgtctggatgaggtggggagatgggg

SEQ ID NO: 44974 - DNA, 3559 bp, Homo sapiens
gacagtgtggttttggttcccacacttgggatcagattgaaactcgcctccgtggtgagaatatgggacatagagcctcggtgaccttggtgagcagcagtccaggccacctgctcagcctggggttggggggggctcctcctccttgactggtccttgcatttgcctccatccagcctgtctgggctctccgaggcaatggagaccagcaggagtcacgatgggtcaggagccccctttgggcctcagccctgccctgccccctaaagtagcacttggataagcaaataaattattatacttactatttatgggtgtggtgaatgggatggcaaaggccaagtcttactgatcaccaaaccttaagatatatcctggcagctagtagacccttgggctaaatgaacagaaaactggacaaataaagtgtacacaaataactcaaagctgtcatttgtacacttttcgtcttttcctactacagtttacatttttataaaggtgagtagatttctaaaatcccgtggtaggctctcttgagtttttcttgtatccctgaagttcagctacaaataagctaatcactaacatttgttgagcatttactctgttgtcaggccccgtgccgagtgctttaggttcagaatttcatgtcatccccacagcagccctaggagatgaatgcaattcttatgtccacttgactgataaggaagttgaggttcaaagaggctaaatgactctcccagggtcccacagctggaaagtggccacagggccccagctggttttctagggcagcaggcagaaggcgaggaggatctgggccctgtggtgccccagcctcatctgagggtcctcatctgagagaacaggatcctcacagcatgggcaggctgcaagtggtccctgaggttatcgtggagtggaccctgacttgacctgagtctgtttggaccccagacctgctgaacaaccacatcttgaagtcagctatgtgtgctgaagccatcgttgcggggctgtctgtagagaccctggagggcacgacactggaggtgggctgcagcggggacatgctcactatcaacgggaaggcgatcatctccaataaagacatcctagccaccaacggggtgatccactacattgatgagctactcatcccagactcaggtaggccaggcctccgggggccttggccctgcctggcccaccatctcttctgccatcctttgtggcgggggaggggaaattcagagatctttgggcgacttccctgcctggacccagctcacagcttctcggccactgcaaatgtgtgggttgtgaccagactgatgtgtcttgagcttcaggcttgcaagtgcagtggagaggcagtggggagctattgaaggggtctggggacagactcaatcacagaggcctttcagaagatctgcctgctgtgcatgggcaaagagggccacttgctgacctcagagcatgtgctttctcagtagtgcccaagctgtcccatggtcactgacccagttagaatgactgaatggactttggcttgtgtctcattaggaatcctagccccattctagtcttccagtgagatctgtccatgagtgaaggaatctcacaggaaaaaacaaaatgcttctatgggtgtggttgctggccttatctacaccacagaagccatcacacagactgtctttcttcccattgttagaatgtgccctgaccaagcagcccacagggcctgggacagaggctgatctctgcctaactgagctcacctctcctccctctcctcctgactggttagattttctaggtgactgttcccctgatgacacaagcccgctgggccccagcagtgtttagaggggttgttgactcacgagatgacattcctgctgatgtgtgtcatgccctggggtggatgaatgataaatgaaaacagcgcttttaacttttgaacccactttctccttccttgtagccaagacactatttgaattggctgcagagtctgatgtgtccacagccattgaccttttcagacaagccggcctcggcaatcatctctctggaagtgagcggttgaccctcctggctcccctgaattctgtattcaaaggtaacatggggaaggcatccctgttagattgtccctggaggcagcttccccacccctgtcacctccacaacactctccgatttacagcaccccatgggacattagaacttccactcagctcaaccaaaagcagatgtgacttcagcagaaacttcagaggctctgttgtttcattaggcagtgcagagaatgcctttggggagccgttcctcagaactcaagacttgacatctgggaggcagccgttcctcagaactcaagacttgacatctgggagagcagagcattcccttgcctttctatttgcagggtcacttgccaatgtatagtcaagaggtcagagtgagggtacagctgagctgcagccccaggaaggcagagaagggggccaagttgtgtgcgtgcctgcccttccctcttagggcaaaactccaaacacccttgattatctggatcttctttaattctccatagaagataccagatgttaaggaatattggcagcttcacttggtttctcaatccctgtttccaaactcaaggagggatgggctttttcactgtatttatctctcatcactctcttcattgcaggagcacatctctctggacctaaccatcaccctttcttgtagatggaacccctccaattgatgcccatacaaggaatttgcttcggaaccacataattaaagaccagctggcctctaagtatctgtaccatggacagaccctggaaactctgggcggcaaaaaactgagagtttttgtttatcgtaatgtaagttctgggtcctaaatcatgctcctgggaagctccttactgtgggacttgtattagtgtaaaaaaaaatgtcctcaataagcaggagtttgcatgagaactggttgctgacaaggaaggaaataatttctggaaaatatagataacaaaatgagatcctgcagaaggattggaatctctttttctggaggcctttgagaataaaccacacaattatccaacctgtattgtgaaggaataagtccttcttgaattcaggaattaacacctgggaggagggatggagttcagactctttctgagcttatgagaagagaagccccctaaactaaaatacagccctccttggtccaaaaggtgccttctctcttctgctgtatcttctttgttttcaaacccaacagttaccctggaaatcaaaaaggaagtacaactcaacatagctcttgcctgggaccaaccagcaccatttggctaaagatggttatcatctgttaaacaaagaaataaataaatgggttcaacgtatttatttcaacattgtcaatggacctcatgtgtaactgatattctcattatgggacctctgtgtgactttattggggcctctctaaccgttctttccttaaggaagacca

SEQ ID NO: 44975 - DNA, 4684 bp, Homo sapiens
aaggcaagggtcgccttgaaagcttacattgggaagaagggttacttctaagagtgtaatcttcacatgcatgggaagcagggaggggggactacatttttatgactgaagtgcaaggaaaacatcaccctctcattgtaaagctccaagtgagccaagagcacatagtttacagtgcacgatgagcctctcactctctgcgcagtatctgtttattgcaactgaagcacccttgtgagtttgttttcttgcccggctatctccatttctgacttgctcattcaccttggggtgctgtcatattgaatgtttccctgtcactgacttcagccacctgcacaagggcttggagaccacacccctctgccctcccagaatcatatccctggaggctcagctagtctctgggtcagccatacctctgccctttcttttccctcctttctcctgtggcctctgacgtctggccatttaacagagcttagcatttttgctgggtggagagagctggagcctggaatcactccctctttgtgcatacggagggcatgaaaaccaaggtgtgtgcattccagtggcctggactctactatcctcagtggtgaggtatttaaggaaaatacctctcagcgtggtgaggtatttaaggaaaatacctgttgacaggtgacattttctgtgtgtgtatctacagcatgctggtagctgccatccagtctgcaggactgacggagaccctcaaccgggaaggagtctacacagtctttgctcccacaaatgaagccttccgagccctgccaccaagagaacggagcagactcttgggtaaagaccaacttaagtacacgtctccatttttctaaagtagtgatccctcagggccccagcagcaaacagttggcacatcaaggattgacttgaagggattttatgacaagactattagtgaaagagtgggcgggactaaaggaactagcaaaggatgaggccaaccagggactagcaaccctgggaagcctttactacccctaggcctgggggaatgggaggatgagagcaggaaccagggaggtcatgagccttggacaagggcacagaacagcagccagagccatgtgcagccagccactgtcagaaccatgcaagggggaccactcagcgccccagcctccctctcagacagttgccatctgggtctcttgttggctgatgcgagagcaggagggagcccactgatgcagttcatagagctcagcctcctgggcaggaaaccgggcagagaggagtagaaaagaattaagggtggctgcgaccagcccagtcactgaggcacgtttcccactggagacctatgagcacagtgataataaagccagttacctgcactgactatccctccagacaaaagctttcccaagaagttagtcatggctctgagagatctagttgaggatgtttggcaggggatctagtggttacgggtggctaagaaaaatgaggaaggtaagagtatcttgcagcctgtgttgggaggattaaataggatgccacacacagggccaggcagacagcctggtcagtaatagccatgacgatgggggcggggggagcaggaatgggagttgcagtgtttagctcagatgcatgcctgtgagagatgcttccactctcacagaaagatgagaccaaggaaaaggaggaggaagaggaaggaccttgacaaaccttggggcccacattgtctacacctcccttcctgctctagagcagaatagaaagttcaggttgcaggcagctctaagttgaattcgtgtcctgtttaattttctttattgctaaatgaatgcctgtgtctgtgatgctgacgtatgttcctaaggagaggggagaagttcattctgaacataaacttttcatcctctctctgtccagcaagaatggaatattccccaagtggcctgagccagcttggctttctttttgttttcaattatgtgggagttgaggagggggatgggaaaagcttcccaaacacaccctcccccaggcctgaggcacccctgggggacagagagtgttagaggttggtacaggtgttagagatattgaaaggacatcccatgcaccccaggggctggtgtggctctgtacttccaggcaatattttgtggaaggggaaccttgtcagctccaggttgtggatgtttgaaaatcagttggtacccagtggctccatcctctggcaggcatgtggatttgtcaataaccaagtgaactctccaaaataagttaaaacttcctcccttctcagtttcaagatgctggaaatagctgttcataagccctggggaaatttagccctttggctggtaatgggagtatccgagatgagagggcagctggaaactttcggaatgacctcccacacttaatttgggaaatgcctctgcacctttatgggcaaccagatgcctgccccagttgctggagacactgatgtgggctgaaaggaatgctgagacgtgacgaggagagatgctgcggagggaatatccccctcagccctgacctcatcggctccatggctcctccacagtacagctgtctactcttttaagttctcccttcaggaaatagccatctcaaacagaatgtgcatttgagggcagaatgtgtaaatattgcactactgtgttataaccgtcaggagccatgctgatgatgaaacgtcccagatgccggtgctggaaaggtccctggctttccaagcaaatatttatctcatggaaacatgagtcatactcacagaggagtatggattaactccttctcagcagccagggagcccagcatcccagacagcatatttaacccagaggccaactgactgctggggcagatttgtggtcatgaacatgtgctttgtgtcctctgaccattagacagattgtgggtcacaacgttgagtatacagtgggagcttaataagtgcttattccctgggcagggagttcttcatttcaggggtgaccacttacatcttctcctctgggccctccttgaccaggctaattaccattcttgggattaactctatctccttttcccgcaacctgcaggagatgccaaggaacttgccaacatcctgaaataccacattggtgatgaaatcctggttagcggaggcatcggggccctggtgcggctaaagtctctccaaggtgacaagctggaagtcagcttggtaagtgtcctgcaaatcaaaggctggctaaatttccccagggcagggctccaggacatatctcacccccaggatggaattatacacacacaaccttcaagttgcagcccgaatctctgagtgtaattcgtccaaagaaaaagagaaaagagaagagggtcttcagggaaatcaagtgagatcatagttagacatgagtaagaacttccagatttacaagggaatagagcatctgatttggcatctgagagaggctattagatcttccttctcttaaggaggttgtaggcaactagttatgtgactgaagagatcagtctgtactcacaccatcccaccccccaaacccagggcttcactgagttgtaccatgaaccagaccatcccaagaggctttttgagttctgacacttgctctgtgagccttcccttgctctgcacattgatgatataactttgtaactgcactaagagtgttcctaaagcagatagccagccgagctccagaaatctccctggctgcacctgcagaggccactgacccctctgtggagggaccgctcttcagtgtgtggctggcttctactctctgctcctctctcttggtcttcagccatccattgctcaccagtttctcacgaggagcataggaagatatgcatgtagggaggtaggcacggggatgacttgtttgactttagcaggtcattcaagaatctcctcgcacctggtttcagatgctggggtcctgtctgtcacaggcttctgtgcctcctacccccttgagtttgtcacatggcccttcaggaaggcctgagatagatttgccctgggtgggcctcctatgagaaaatcttaagtgaggcacccaggcaaaatggaaagagccttttgcccagagcaggaagcctgtcttccatttccagctgttccacctacttagcttaaaagaggcacttcgcctgtcttcagtctcagtctcagtctcctcttctgtggaatgggacaataatatctactctccttatcatacactgctgtgaggactgagtggatcacacaaaaaagcattatgtaaattgcaaagtgctaaatccacacaggagatttgaattaatccaccacactgaaggtctgtcaagggcagggactgtttcattcaccagagtatccccagtctaacacaggacttggcatatgaaaagtgttcagtaggccgggtgcagtggctcatgcctgtaatcccagcactttgggaggccaaagtgggcggatcatctgaggtcaggagttcaagtccagcctggccaacgtggtgaaaccacatctctactaaaaatacaaaattagctgggcgtggtggcacatgcctgtaatcacagctactctggaggctgaggcaggagaatcacttgaacccaggaggcggaggttgcagtg

SEQ ID NO: 44976 - DNA, 1612 bp, Homo sapiens
tgctgcagaaatagaagcttagagagctaaagtagtttgccaggtcacagaataagaagaggctgaaacacaaatccagccattcttaaccacgcttctcccttctgctcaactataccagaggccaggaggggtagtcaaggcagccatggacaagcagacatgaatgccaggtggtcagaagggctcaaaaccccctaccctccagagaagcccctgcaggccaggtctctgcttgcacagcctagaacataacttgtttctatggtgccagggcattaagaattagcaatagccacgagtgccccagaactcatgtctggaaaaaaagagaggaaaatacctctgtgcttgaaagcataattcagtgttatgctcttagaagagatgcctggaatattatgctcagaactcttttcaaagccaggagagaaagtcatggaatgagggatgggcccgaagccctgtccagagaagtcaaatgaggccaccttgggccatccctatctggcagggaaagaaactcatccattccagaaagccagagagccagcccagagaataagtggtgggtggagaggggaggagtctgggacaacctctatacacacgcacattcattcacacacacaaacacacacacacacacacacacacacacatgcatgcatgcacacacacccctgcatgggaaaccgaagacacagccttaggcagagaaaacaggcacagcacacccacttgtggttggggagaggactccaggacctggaggtggaaggcagcagctggagctctggcctcaggcctgttagaggaggctccctggagctgctacaccctgtcacccatgcaggccctaacagtccctgcagtgctggagctccccatcacttggggaggcgatggaggtcactgagacctgaagaatgaagagggtggggaagagaattcagtctgaagaacagtgtcataaaggctctgagaaaatgtgagagagttttgtgtggctagagagaagagagacaattcctctggtgagaggtttgggagctagactgtactgggcctcataggctaagtactatcataattagtattaagaattttagacattatccttaagacaatgagaagccactggagggttttagttgggggagggagatagagaggggtgtgcaatgatcagatatatattttatatttagtaaaatatacatggcatagaatttaccacttcaactattttaagtatacaattcagtggtattcagtacatttcccattgttgtgcaaccaatctcttcatcttgcaaaactgatctgttccattaaacattaactacccattctcccttcccttctgcccttgataatctctgttctattttctgtctctatgaattggagttctctaggtatttcatgtaagtggaatcagtatttgttctttgcgactggcttatttcacttagcataatatcttcaaggcttatccatgttgtagtgtgtgtcagaatttcctccatttttgaggctgaataatattccattgcatatatataccactcactttgtttattcactcatcttttgatgtacattaggc

SEQ ID NO: 44977 - DNA, 3073 bp, Homo sapiens
aaaacagtagacggcagctattgctgttaaacttccgtcctacttgggacgaaatccataacgcactccgcggtccgaagttgtggggtctcggagcttccaggtgtgtctcgtgaactgcacaagcatttttttgtccccatgcgtcctacctggcagtacaggctggtcacgcacgccctgtaagaccagtggccagcctccatactttctgtcacaccttcaaagtgacaccaacttatgttatcagcctattaatttagcaaagttaaaagggataaaaaataacaaagccttcagagtgacagattataccgaatttattgcataaaagggtcagtaagcacccgcgggtctcgaaccccagcacagagatggacagatagaaagtccggcatgaggaggtaaccgcttgagctaactccgacccgggtaggagtgtgcgactgaaacttctaaaccatagaagagtgacgatgtggagagggacgggctgcatgtgctccccgcccccgagaggcctgcgtcatgcggtctcgcccgctctgcgccaggcgtcctgctaacgtgtcctggagggactctcagttcctcccgcccgcatcctgcgcgggaaccgtggaagggggcaaaatccacccactggaggggaggcaggagggtgcgggggggcgtgtgggccgtctacctaggtccagcagccaggctgctgaggagtacccccgccaaaggcttttcggggttctctccagcagacgggggcagcctaaggcctccataaaatctccccgaagcagcctatgaacttgccaaaggcaggggttctgtggtttcatttcttgccaggtcctgggctggaccctggagacggagttcatcatcagcaaatcctctttgggtggggagttgaatgaattaatgagtgattagcagggcactagggcccaggagtaagcccagaattgagatcacaggctgaagatttaaaagcttcatagctcaagagaaacgctctgttaaggctgaaggagaataaatcattcctctttttccccaacccatccccttgtctacactacttttcttttgaaagattcaggagctggatggagaaaattgctaacaaagaaaatgggaccttcagaatattaataatgtccctgtttgttgagcacacacacaccatgtgccacgctctgggttaaacatttacctcatttcatggccggaacaactctgagatccataatgttgcccccattttgcaaatgaataaactgagaatcagtggtggtaagtaactgaaatgttaggaattaacaaaaagtgacatattcaggaacagaaccaaagtttgaactctcaagaaagagttgcctgtagtgtatgtctgtctgcctgtcttgcttaaaagtatctcaaacaactggtaagctgcactagacagggatcttccattctgttctttgctgtctccctatatcctcctcagttcctagcctggtccacagtagacactcaataaacatttaagtgagtgagtgactggggatagtaggaccccattatactagaaactgcgctgtcccaacctgggtttgaatccagcttcccctcttcctagctgtgtagctttaaactttttaattgtttttcatattcattttgtattaaacaaaaaccacgagtacagtaaaaattaaaacaataaaggtagtgaaagcccaccacccttgacctaactgcagcttccaatccagatctctccccagaggtaaccactgttttttaaaattttgctgtgtctccttctagtcctctttctattatataaagataattaaaaatatatagctttatttgggttatggctgtgttttgatatgaaggactgcactgtacacattgttctgcacctgctttgtgggaaattccacagcatgcctgggaggtccctcattatttataatggctccccaagagtgcatgaagcatgatttgttttgccatcccctgttagggctagacattgaaggtttttttgtttgtttgtttttttccatgagtttaccaatagcgctccaatgaacacctttgcacacgcctttttgtgaacatgggcaatttcatgaatgtgaggataaactctcagaagtggaattgctgggctgaatagcatatatgttcattgtaattgccaagttgtcatccaaaaatggggctattgataacatacccctgatggagggaggtatgggaagttatgctgaaataacacattttattcaggctaggtacctagtagtctcggtaaacaattacaaaaataactgccaatgaccatttccccgctagccatttccagctgctgatctgatccagccctggcttcgttgcctggagcctggatttagtaatgaaaactggccagcagaaaggacccagcgggtgcgttccaggtgctccccctggtggggaaatgtccctggacagtaaggaaatcccctgtctttgtacactctaaatcaaatcacatcccctcccagctcagcaccttgaaagacctcctctcttataatccaatccagacagggtttactggatgatcaggtgcccacctaactttctggcagtacctggtgcccctctcctctttctttgctctgctgcaaccaccttgccttctctggtttctcaggcatgccctttccatcctgttcactctttctcagagattccccaccctccaatctcattctttaacactcaattcttatgccaccacctcagagaactctttgttgaacactctgtctaaagggccaggccacctctctcctctccacacactctccttactctttgttgcatcaccctacgtctttccaccattaacaagacattaacccagacattgccaaatgtggtagagacaagtgtcacgaagacagagaccatatctgtcttacgtatgctatttgtctcccagtgcctgccacagcacctggcagtagaaagtgctcaacatttgttacgtgaatggatgaattaattaataaatgataccaacaag

SEQ ID NO: 44978 - DNA, 4484 bp, Homo sapiens
tttcttggtttattccttttttttttttcttttttgagatggagtctcactctggtgcccaggctggagtgcagtggcacaatcttggctcactacaacctccacctcccaagttcaagcaattttcctgcctcacactcctgagtagctgggattacaggcgtgcacaaccatgcctgggctaatttttgtatttttagtagagacagggtttcaccatgttggccaggctggtctcaaatagttcctttttttaaagtagtcatttggtaggagaatttaattccaatagtattaatatttaatttttccaaagaagcttaaacctatattcctgtaatcagtaatgtcctaaatgaaacttttgttggcactcctctatgtaaacatcattcaaaagctttcactccctcctatctttcttaatacttaatgactattaccactatccccagtcacattatcatcattggtttgagatttaatcatacaccttacagtgttcatgttcccaaatgttttttaactcctcgtcttactttaatttgcatgcttcattttgtaatttaaatttaacccacctagagtacttagtactttttacctagaaaacactagtgtactttctaagtcctggtacagcgagaaacatggtttttacataagaatgataacttggctggacatacaattcttggaatatagttctcttttctggatgtctggtatcattgtttcactgtcttctaattttcactgttgttgatgagaagtttcgtaccaatctgattcattttccttcataagtaaactttctcttcacctggaaaagtgttgaactttctctttaatctcagatttaagaaatttcaccaggagatgacgagtttggggctttttgtgcagtttggaatttgatttgcagccatttagttcttaaaatgtaaatttttctacatttaaagttatcttgcattgtttctttaatatttttcttcttctgtgccttttgccttaaggatctcctgttatttatttatcagacctcccagacctacttattatgaatcttatcttgtactcattatttgcatttatttgtgtatttgcttttggttgttgtggatattttttgccttttgtaagtgtgtgggtgagagatgtttcctttatttgattttccagaacacaaattccattttaatcagtaattgttcatttcctgttccttggttaattaaacaaaattgcagtttttacatcataacttccttaaaatattccattttagagacctcttgttgttcttccattagaactgcctccataggtgtaatcagtgcctgttggggacatggcttccctccttaaaatagcctgtgaactttttttctccaaaacattgagagtttcctctcctgttaaattatctcctgctatttagtatcgttgaggaaaagtctaatacaggcctgatttttgttcttttttggggatccagtttttttctccagtgcctagtaagcactcagaaagcagtgcctacgattgggtggctcatggggcagcttctctctttattagaaaaagagatatcttacaagtggttgcctccactgagatcagttggaaactccccattatctcatttatgtccccattttctccctgcagcccaaacaatcagcctttggactttatctaggctgtcacagatggagagtccccctgatgtccggaatcattgcccaacagtctggtgtctaatgttctaatgaaatgtcatatttcatcatttgtttgcatggatatgtctgtgagaaaatggttttgggggaggagaaatgattcagtataatagttaaactgcttaattgcaaacaatataaactctgttattttatttgatagttattgggaagctccaagaagggctggacaaattagagaagcaggcttagaaaatgggtaggaactaatggaggtgggatggtagggaactccactatgaaaacagtctgattatgacatgttgcctgttctgctgttcccagacactcaccgtgctgctgctggactttgaacttggctactgccaccataaatagtcactgactgtacctgaatctttgtgccactgcctggcctcatatgcagcaggcagagtataattattccccatttgggctttctcagtggcaagggggctcagtctctctcaaagacatgcagaataaagaagtctcccccaaagaagggggttttatattctgggcagctaaaaattggcatgtgttatctaggcaaacgtcagtagacttctgatttctatcactaagtagcagccttcgattctgctggagattgtgatacatcccaaaagatgacgaggcagaggttgtcgctgccctgctcatcctctctgcactcacccctaccagcagaggtgattctttccaacacctgcagctctctgccagctgcagaagcacacttgacctctccccgggacaagcaggaagagccagatacctgatgccccttgattcagttctcatccaacaattcgatatggccatgatgaatgaataccatagcttccgtgtcccacagctggggtaactctggggtgtgtactacattgtttcccagcaagattagtcccagctgtccacagtgagaagtggcatgataagacaccctttcttacctgtctcacttctgcacacccctacttgtaggcctgcagatctcctgccaactaagctactggcacttgaatacttgccttagggtctgctcttagatttgctcaaactaacacagttggtgaagccctgttgagtagtcaagagtacttggaataaaaggacaaggcagaagagttcctgatcttattctcacttcccacttaaagtttttgaagaagtggattatcctgaaattctaccctgcgtaagccctttgacccagtcttttccctcgtagttgtttatcctacaaaaggacttacactcatgtgcaaaagtaacacaaaatgatgttctttgtggctttggtcgtgacagaaaataaattggatgcacctaaatgcccatcaatgaagttaaataaattacagtgcacccctacaaggtaatacaaagcagcgattaacaatgatgctaccgatttctagtaactaatagggaatgaggcccaaaatatattgttaagagagaaaaccatatcgcaaaggagcattatagttttatttcgccaacagatatttcaatacatatttcctgagtgtctactatgtgccaggctttcactgtcctgtttgtaaaaatttcatctattctattgcctgaactgtgttttggcaaacacagtttggaaaattgtgtctcttccaaaagtattcaaagaaaaggagagtaagcttgatggtaacttttgaaaactgcttacagttaacagtgtgaatatcttatagaagcatttttctccattttttcataaatgacctaatttgaagataaacattgaatatgtgtatgtatgtgtgtgtgtgtctgtgtgtgtgtgtgtgtgtagttggggggcagtggtagagagatagattttctgactgtaataaaacttaaatcaccttgtgccttccgcactatttgaattttaccctgaggatgaatcactttcataatacaaaaaacatactagttcaggccaggtgcagtggctaacccctgtaatcccagcactttgggagggaggccaaggcgggtggatcactcgaggtcaggagtttgagaccagcctggccatcattgcgaaaccctgtctctaccaaaagcacaaaaattagccgcgcatgctggtgcgtgtctgtaatctcagctgctcaggaggctgcagcaggagaatggcttgaacccaggaggccaaggctgcagtgagctgagatcgcgccactgcactccagcctgggtggcagagtgagactgtctcaaaaacaaaaacaaactagttcattaaaaaagcttcacaaacacacacacacacacacacagtttttctctataacagaattctgtcttcagtgacttgctactctctggaagctttgccctttcttgtgcactgccagatgcctcaaggtatcctttgaactgtctgccccaccaggaagccatattcaaccacctgatctgttggttttctttttccaggaccctaacaattctctcttccaaagacattccaagaagatgaggaagaatatagaggagtgttttagaatcgtctgagttcctagcttgaataccttaataacagctttaagaaatgtttttcttcataaaagccttgagttgaagaaaaacatgcgctgaaataatttcctaagccccaccctgtgcatgactggcgtaaggaatcgctcattgtaaagctattggttattctaactccttccgcaaattaatttacctcaggaagcc

SEQ ID NO: 44979 - DNA, 1972 bp, Homo sapiens
ttttttgtatttttagtagaggcggggtttcaccatgttagccaggatggtctcaatctcctgacctcgtggtccgcccgcctcagcctcccaaagtgctgggattacaggcttgagccaccacgcccggccggtgtgtattcttttccactgatatctttgtctttgaatatccttatttttcatgaataaatagagaaatgtatagaataatttcttaccttatagttcctagcatataatggaaactcatctagcaatcataagcaggtaaagtaaatatttactctcatatgagaacagacttccttccaatggtcatggaagccagaagcagtccccagatggtttttgctctgatctcagagacattatacccaagaccactttggagctcagaagtcgtacaaattctcatttctgacagaatgacctggcagggggctccttctgctccatctgtgacacatttgaagcagaggactttgttgactttctaccctctttttaaaacctttgaaatttagttttcagtacacaatgcaacagtgctctataaaagcaggtctgtggaggcaacacagatgagatcaacatccctggactgcttagcatggtctctctctgcagtggaaaccttacaccacatgaggtgggtagctagagttgacttagaagagcttaactgatttgattcaacactttaaatcacctctaatgtggcacattagtaatgccaccatattgtaaatgatacatccacagaagcattagtcattatacaaatagaatgaataggtttcactacacttcaagataaacatgtcgaaacactaactccattcactcagggccttttgagcttgctcagggcccttacctggctgttagaataaatacaaagttttatggcttactttctctgtatgacttcaccatcacccaatacaaattcaggctagaaattgcagttgtgcacattgacacatttatttattcattctcttacttagtaacctattgttttctcagcttggtttacagagtattatggttccctgacattgatcacaggattcataagtaccatttttgttagagtgcaaaagtttagaatggttctgcatctcaaaaagagtgagtcaagaaagcaggcagtattgtgtcatggttagagcaagagcttgagagttaggttcacttggatttgaattctagtttcatcgctatgtgtataaactcaggaaatgacttcacttttctgaacctccattttcttatctgtaaaatggttgtaaaacccctcacctctctccatttcagcattgtgtatctcttttcctttttatgcaccttccagaatgtcaagcatcaataaaagatccttgaggatcagccaggtcatgaaggaggaggagatatgtaaggtggcctgggaaggaaaggtagcactggttacaggaagggacatctcctttagtgattactataaaagcaaaggtgtgctgatggcaatgtgatggccaggtgggaggtgggaacagtaaggacagcaaaaacaccagtttaatgacaaggaaaaggaaggaggtataggagacgctaggagaggttggaagggactgagctgtagaaagcagagaatgcaagattttacagaatatagcaaagtaagaaatgggcttcatgtacaaaatatttcaaacaaattctcttatatcctttaatgattaacaaagcattttgcaaataccagtttctaaaaaaatgaagcttccaaggcaggttacaaacacttctgagagttgtaaaccctcacaggctataggaatatgtgcattcacaacagctagttctttaatggcttgtgccttagtttcttcctttataaaaaggagaatgataatgttggtaaccatgactacattgtaggttatcgtagcatttcatcaaatataaaaggcgtgtcact

SEQ ID NO: 44980 - DNA, 2202 bp, Homo sapiens
atggattggattagggtgtcaaagagcattccaaaatgaccccgattttgatttttacttattttaaaaagaaaacctataatagaacattggagagccagtattgaccttttcaaataaaaacaaaattattcaaaagctttttcttactagtactattcaaatcgggtaccctatgtggtaccaatattatattctaggaaatactgacggttttggaaatttggaggaaaaagcatcgagaagagctccaattacttagaaaagagagtccaggagatggggtggtgtatataagcctatggatggtgtctctgcaactcagtggccccgcctgtccaggggctgggtccccacgggatctccctccccacaaggaggtggagaggctatgtgtcttgaacaactggggttgcgatccagtgtatgggcagtcccactcctggaactccagggtgggcactcgctccatttccacaggccctcaagggttccaggattgccccgtgggaggggttttagtgctgcatctagtaagaagctgtaagatgctcagaaacatgttttgaagctactttgcacagaaagaagactcttcattcagatttgtattacagatcaataaaagtagctaagtcgtatctgaagatgtttttgtttacactttgtatgtgacagaaaacctccagttgtctgtgtcaaggacaattacttaattttattacaatgtatactgatttggttagtggaagcttctagcgcctactgtggtggtggtgggagctatctgattcccattcccaggcctggccatcgacgcgaaggcctccagctgatcggaagtcggcgttggccggcgcggagcccggcgcggaggcttctttcagccgcccgggcaagacacccctccctcggtcccgcagcggtcactccgcctctggcgcgcatgcgccgaccccagcgggcgtcctcccgggctccctctccctccctccctcatccgggtcctgggcgagcgggcgccgtgcgcgtgtcccgcggccgagctgctaataaagttgcagcgaggagaagcgcagcgacggcgtcgggagagcgcgcctagccggctcgcgagtgagtgagggtccccggcgcgcgcgggcgaggggaactgggggctgcaggctctgccccggcggactcgggccgaggcgggggcgttcggccgcggacggagcggaaacgacccagggcctgtcgggcgggaggtaggccgagtcctggcctgccggggtcccggctggcggacacggtgcggcccagcggctgcggaggcctcgctggctgcccggggcgtcctgaggcggggccggggctggccctcgtcccagccccgctgttaccgcccagactttggagggaggcgtctgggacgccctggaggggaccccctgaccccgcgctgtcctggggagcggtttgctttcctaactcatcggatgtaccaccctggatacacacccttgataggactgcggtgctcggccgggcagcctgggctgctgcactgcgaagctgtccaatggcttgatgaatccgtgccgccgtcgctttgtgtttcaaagataaggatccgcgcttatcggtgggaattacactctgggcagttgtgaccggctactgcaatcagctggtagttagacctggtttctgccacttgccatgtcagttttcaccactgcaaggatttcttctacttcatgtaaacttctctgtgctgcaaagagaatgccaaagcagcgtctttttgccttcaccatattcagccgctggccgggtcctatacttcaatatcagggctcaaattaatattccagtctcttcccctccccttttcccctctcctcctttcagctgctgttactacgtggagtttggagcctaagctttgaaaactcccatgtggcgcgcccgtcttaagtctgagcatgctcagtagccaaaacagatttttggttgcagaactcgggcgaggatacttggggtatttggacgtttgccggcttcccaacagaatgttccggttctggtggtgatggcattggagaatggggcttaggcaagcctgtaggtgaggaatggctgaacaccctgagccagatgtttatcttgattgtaaagacaatgtttcctgaccagctggagctttggggggggggg

SEQ ID NO: 44981 - DNA, 549 bp, Homo sapiens
cattccatatttaaagagttgagtgtgagatttgctcctctccctgtgctagttttactagtaagagttctaggtttttaaaactgacacctattgttctttttgaaaccaatctcttgaagtttagtggcatacccattcaccaaagtcactggccttttctttgtttacattctctttaaactctcccatatgtttaatcttctgcagtaccattgtatctagttctgtctttttaatagtgcattatcagtaactcactatcaggaaactctttcctaacagtgaatgtttcgtaatatttaggtgtttacttactgttcttttcactctgttgcaaactttttttttttagctctttgtgcaaaatcttaaatctgtttctcatctttacctggctaaacctgtatctccagtcatgaccttttcccagtggagtttaccaccatttctactgacaaagctgccttctgaatgtttttaattctgtgggtagaattctcattttatcattatcttagtcaacgtgggtttaaaatttgaaattat

SEQ ID NO: 44982 - DNA, 391 bp, Homo sapiens
ttctcctgggctctctcttcaccccaggtgccactttattctgctctgacttcttcttccttcacactccttccttgttttgttatgatggccaacatgatcctggggcagagtgggatctggggatttctggctgactcatcaccttcaacactccggggaatccggcctctcttccatgatgatcataggtggcatgggcaacctttgatctcaactcttcttctaattatctggcatcttttcaattcctgttgccatccttttctctgtacccagtcagaaaggaataatttctattctacaatagatacaataatacattttctatacctggtaatattaataacaaatagtacaaataattaattagtagaagacagatatttta

SEQ ID NO: 44983 - DNA, 1688 bp, Homo sapiens
ctctcactggttatttctggacattcccagactgtccaactggaccttcagaagaaagcagctttagtagtctcagggtccccatgggacaaatccagaagagaggtctctgtgacttgatttttaacacagcgaaaggatcagtagtaaagaaatccagtagactgtcacacacgctcaccccccaacttagagaaacatagagaaacaccatggtctacacacacacacacacacacacacactccagggtctgtattgtccctgtagaaacaccaaaacaaagcccaaaggtgctgcctggggatgtcaagaccccccttgctcagggcataggccagagcacctcaggggaacgggggtgggtaatggtgtccacactgcgatgaacaacaccagtctgccaagtcagaggagagcggttctcacagcagcacagaccctcccaagcaagttgaatccagtcaccaaggtcctgctgttcagagtcacaggcagcacctgctccttcctccacctcctggcagtaggagtttgggtcacaaggacttgtgaatcacggcaacacctaataagaaagggggagaaagttatcatcttagcttctccaaaattactcagagtcccagtgagttcatgaatccaagatatcctgagtcacagccaagggaaatgtgtgcaatttttatcctaatattgaagtggactcaggctgctagcagctggctgttccccactccaacagccaagtcctggcaagacacttgaacctacgagcacagtccctcaaacaccactgactagtggcctcaccctgtgtcatcacatggactcactgtggtgactcccatccccagccctagcacccagcccaacaatgctcagcgcccaggggcagctatgcagttctaaatttgaatcactgtaagagaagcaatgggtgattcatctctacttttagaagacactggaatgaagcggaaagtacagcaggctgccttcatgggagcaagaaagactgaattccattcctagctctgccaccagtcaacctgcactatggcctttggcaagttctttgacctctttaggctcagttcccacacaaatgtcatctaagagaccctgccagtgtgacaatctcgactttgataaatgctccagacatgtatgctatgttactgttttagtccgagtgaaccatgctcagcacctaactataaatccacgcatgacccaaaatctcactgtaagggactgaggctacatggcagatattacaggttgattccgtcaacatccttcctacttgctatcctcgactacagccaccagcaagttgcaagctcaggttcccagactgcctggcagctagatgtgccacgtgacccagtgctggccactaagactgtaaaggcaagtgtgccagtgttgcaacgctggctttgttcttgttgtgactggaatgctcacgcaaggccaaggggaggcagcagcccttgataaagctggcagaatagaaaagagaagagaaacctggttctgtcagtctgagcccccaggccaaccttggatttctttctacttgagacaaatacactcacttccttatttaggaaagtatctgtcagggtttctggtgcctgttgctaaatgaaatcctaacttacaggtgtttacaggcagga

SEQ ID NO: 44984 - DNA, 700 bp, Homo sapiens
gggttggaatcttagtgggtaaggcagagtcaaaggcagatagtctgcctttgccaggttaggtgatgggcagccacaaccccattctgccttgtatgtggttggttagccacacctctttctacttccctttatagactgtgagcctatgcagagtgagaagtgtaccagctctgtctctgcacgccatctcccaatgctgcctagcacaacacaaggtaactgattggcaaagcttagctgaagaatgaactacaagtccttaagcgggtagcatttattgatcacattcttccccatcaaccagcttaatttttgttataaaaacaaaaaagcaagctgaatctaccaaagtcgatatttaaccttatctttatttttggcttcacttgtgtaactagttccacttagtcacactgtttatctactcagctatgaaagccacagcattcggcaacaacagtgaccttctcagcagctagagaaggccacatatttttttcattcagacttcatgcttgaaaaataaacaagcaaataaacttccaacttgctttagctttcaatgtacccaaaatggttcccaataacccttcccaccaagggactctccataaacatcgcctccccaaattctcaagataacccaatgattaaatactcttaagccttattaaatgacttgcccaagtcccagaac

SEQ ID NO: 44985 - DNA, 1908 bp, Homo sapiens
taaataaaattatgttggaaggcagccacactcatcgtttacatattgtctatggctgctttcacattacagtagcagagttgagaagccacgacaacataaagcctaaaatatttactatctggcccttcctagaaaaagtttgtcaacccctggtctataaaatctaagcagagactatagattcaatcataggatagggtgatatctacttagctactactttttgtgatgaaataatcagctgctcataggtacacttagggtttcactttttaaacaaagaaatagccccatttcctcactgattaatgtcctagaaccaatttcttgcatgctacaagactgtcaagtggaaaggagttggagaaaatcagattccatagctcccagctcaccacacttcagatgtaagcacaggtcttggccagagaataccagatgaatccagaccttccactccaacactctggacagacaggcagccaagctaggctggacttgcacaccccaaggaaaatgaggagtcctggggtactttccctgctttcaaaatgtgttttgaagatcaagaagcactccagttaaaaaggcagggcactgacttggcaaggggagaagttcaattgggagcaattctcagcaaaacataggaagaagagaaagacgctaattttgacaatatcagggaaaaaaaactaggttcctatacatggacctgaattgttactcaatctgagaaggactaactttattaataacaacaagcacagtgctaggcattttacacatatgatctcatttaatccaccaacaatctctgtgaagtaggtgtcactgctcacattttacagatgaggaaacagcctgagagaggttagcaagctgtacaaggtcacactgccaggaagaatagatctgatgtgaattcacctctaactccaaaaacccatgctcaaacattatgcaatttgcatctcagagacacaattaattttaaaaacctaggccaggcaaggtggctcacacctgtaatcccagtactgtgggaggccgaggaggccaaggtgggcggatcacgaagtcaagagattgagaccatcctggccaacacagcgaaactccatctctactaaaaacacaaaaattagctgggcgtggtggcgcacacctgtggtccccagctactcagaaggctgaggcaggaaaatcgcttgaacccaggaggcggacgttgcagtgagccgagattgcaccgctgcactccagcctggtgacagagagagactctgtctcaaaacaaacaaacaaaaaaaaccctgggcagactgttgagttggggaactaacttcctaaacctataatcctaattacaatcctccacgccctcctgggacacctcccctaggtctcctattcctttcccagggattgaggcaataccatttaccaaatctcctgccatgcttttaaatcaagaagatagtgcttctagacaaaagaatgattctgttggattcctgtttttgtttcttaaatgaaagcttaacaagacttgtgttaagcatactctcacctcattgccacacacaactccagggacaactgggagcagtggtgtgcggcaattggagctcactgtgcacgtctcttcctaactccacgtttagtgacattacactggtagttgaagtcagccttgatgaaaatatttacaccatggaaatcagcaaatgaatcaacagatgaatcagggcttttagaatgttttttagcgagccagttgttaaacatttaccagcacaccactggctgagcgatgtcctggtctgaagtctccctagaaacctacccagttgaattcttctttctgaccataccatcaccatttcacacaacacttaaaag

SEQ ID NO: 44986 - DNA, 722 bp, Homo sapiens
tggagcttagagtctactggaacaagattcattccaaatccctcaggactcaggcaacgacactttattctcccatcaaacagatacaaagcaaagaacatctttaggtacattcttagagaaaggagagctaagtttccatttaaaaggtcacaggacacatgactatttatactatatcctgaaagacagaaatagttcttgctcaggtgtatatgcatgtgtttttcctaagggtcagggaagactggcttgagcaggcccgctgggtgctcagacagccaacctctatcaattttccctaggactttccctcagctgctgaagcctgcctctagatcaaacatacaggacaaaaggccaaagtcctgtcccactccagctctgctaccctgcccttcacctatggaagcagcaggtagtctgagaatgattttccaaaaagaaatttagaaaaaaaatcacactacagaatagcttgatttaaggctgcttatcttggggaccctggcatccacttcaccccaaaataatccccttgccccaggcctttgctctcagctgctgccctggctctgagagagtgactgagccagctacactctagctgttcccagccacaagggcttgcccaggaagatatgggctgcagatgcatttgttttcttgattcaggacacttgaaaaagacttcttttttttttttttaagtgctttaaatt

SEQ ID NO: 44987 - DNA, 796 bp, Homo sapiens
atgaggctagatggagtaatgtataggatgggtgatcatgaaagagatcaacagaattctcagtaggtatatgagtgagcagtggaaatgggaacaggagttagagttcagaagacttgaacgcgtggcatggtaagctggacttggagcaggaacaaaaggtatgacctgggtgacctggtgaacattggaagctgctcggtttggatttcttgtctaccatctgccttcagcagaggaaaagtacaagaacatgtgcaacctggtgttctaaagccatagacatcagccatcccagctgagaggccccaggacaggggcaaggactcactatatttctgaacacagaactgggaacacagtgcccaaaactgtttgatccgctgctggtagtctcacactgacctctcaaccccagttacaccacaggtcaagcaaataggcatggcccagaatctctaaaccttcatcgcatcaaccccattctctgccacctaccagatcaatgggacactgttttggggaccaaagacactgctcacctctgccccacacttaggaaataggccttcatattctgctgctcagcaggcctcacagagttcaacactaaactcctgttgcaaagagcacccagaaagagaatgcaccagcagcacagtcagtcccaggctcttcctgtgggagtcatcaagaaacacagttcccagggcctctacagacaaaagaatgacacccaatcatcatgctagttctaatagggtctagagatgtttaatggcatcactgtgccccg

SEQ ID NO: 44988 - DNA, 3102 bp, Homo sapiens
aaaaaccacaggacctcttaagtttctctaagtacacatcaagaataaagaattaacacgtaaagtcttaaacaaatatcccttaaaaaacggtacggaatggatcctagaaaaaaaatgttagacatgtacggtcaaacacaatgatttattaaaaataaaacgtaaaaatgatttttgtacatatgcttccaaatttcaggcatgggatccaagtagatttcatagaaaacgctgtagccaggttatcaagtccttacaacaaagtaaactaccccccaccccaacccccacccaggttttgctacagaatcagcaagttcactccctccctccccccaaaaaacacaaattaaaacaagacattttgctagtataaaaacgaccaaggtccaagtaataataaaaaaatagagtccatcaatgactgtaacacaaaaatgtgtatgtggggccgagtccatcttcagagggagagacaagagaggtggcaggcaaatagaggaacacccccaagggtaagcagccttagaagtggctcccccaagggcaaaacagggaaggcggtgtgtgtgagggggtggggcttaggagttgaccccacttgggctgttggaaagagctacccctatagccactcccaggcattttaaattttcttttagaaggagctgcctccatagccacccccaccgccatagccgcctctgtaaggtccactattactgcgaccgccccagctactgcctccaccgccgccgccgccgccgctcttcatgggcccataggaggactgatgctggctgtagctgccgaagccgccgaagccgttaccgtagtcgctcccaccgtaggacgaaccgccgccgccgcctccgtaggcattgtagccgccgcctccgccgccgccgtaaccaccgtagctgttgtaaccgccgccgccgcccttggaaaggccgttctggtctcgaccaccgccgcgcccccggccgcctcggccgccccgggaggatcgggagccgcctccacccccaccggagtagatatcctccttggggactgctttcttcacctccacgcgatggccctgaatcggatggaacttgaccaccgcggccttgtctgccgcgtcgtgattctggaaatacacgaagccgaatccacgcttcttgccggactgcttgtcggcaataatctcggccttttccacggtgccaaactgcgagaagtgctcgatcaggtcgccctcagccacgtctcctttaaggcctccgacaaagagcttcttaaccttggcgtgggcaccgggccgcgccgaatcctcccgggacaccgcccgcttcagctccacagtgttgccgtccacggcatggggcgaggcggccatggcggcgtccgcctcctccacattggagtaggtcacgaagccaaagcaacgggagcgcttggtctggggattcaccaccaccacgcagtccgtcagagtcccaaaggcctcaaagtggccgcgcaggcccgactcactcgtctgcacattgaggccgccgatgaacagcttacacaactgagaattctccatctccaaggcccgggccttgcccccgccctgcgagctccgaggtttcgccgtcgccgccgttatcgttggttaaggcctctacacagcttgggcccagccgttgctggagccacccccgccgctcaccgacggggaagggaaaaagggaaggggagggaaggaaggaagagaggaagggggagggaaggggagcggtgccggctaaagggcgagccgaggagactggaagacaaccaaggccaccgctaccgccgccgccgccacctccgctcccctatctgggcaccacacaaagaggccgctgaacgcgcgcgcaccctccccgaggcgtgcgtcaccgccgacgtacggcagcctagggctaccagccaatccccgcctcgctccccttaatcccgcctaccgcgccgcagcgccgctctagatcacggactccccgccctccgcggtctattcaagcccgcggcctgtgccgctcccgcttccgcttctgccagcccactttcattcccgagcgccccactgtcccttgacatgggtccctccctgccctccgcgcaccaccgcgattcatttcctcctagcaccgcggctgttcccagtgtttctccccctcccctttactcatcccctcgcccaactccgcagtggcgttcgcgccagccccttgagagacatctgagttcagccaatcaccgtgatcccctcgcacccacttccgttttcggcagctgttggacgggcgcgctccccggtgcgcgcttgccccggcgcccccggcgtgcagagccggcctaccacccccgcgccttctcccgcccagggctttgccggggagagagcagggggcgcgctgggggccattcccaacggatgcggtctggggcgccacgcgcgggctttttgaaaacttgactgttggggttgggggcccggatctacccgccgcctctccgcttgtccgctacacctggcgtccccgccccacctcccgcccgcacaaagatggagggcagaggcctggtccacgaaggcggttattaaccgtttacagtgggcccgacgtgcggttaaactaaaactttgccacgtggccctgcgcaaaagcgagcccgaggcggcggtgtgaaagacaacagggaaccaaaagaacttcagacattaggaaccagacgaggcgcgacatccctgcctccctgccaccctcccgccctccttgaagccctcccacgatgccctctcagaggaggccctttcaggtccccttggcacactccagcagacattttcatttaacctcagtgaatggttttttatgtgtaatttacatcatctatgtgttgctttctttgaactagaatgttagcttttttgttgttgttgagatggagtttcactcttgttgcccaggctgtagtgcactggcgcaatctcggctcagcaacctccgcctcctgggttcaagctgttctcctgcctcagcctcctgagtagctgagattacaggcgcccaccaccacacc

SEQ ID NO: 44989 - DNA, 806 bp, Homo sapiens
aaaagaaatctctggagtggctctcataactcaaaaattctggccagttatctacctttagaaagccatctcatttcttatacacatctcacagagttgcgcaaacagacattgagttaagggcatgcactttaatgtcattgataattttaatcacatcctgtaaaaccttaagttcgggtgacaattttcggctacccggcatttctctgtagatgacacagtgcatagactcacattcagaagtgacctctttgacctgagtagtgaaaccagaaagccatccagtcatatcagccactctgtctgtgcatatactgacacaaaatgaccaattccgtttttctgatatgtaatcaaagtcttgaatagttctgcacctgtggtgttggttggcaacaaaagtgcacataacatattcccctgcacatcctcctgaaaaagatatggcacaaaaacaagcattgttgtcttgtcaacatcagtagactcattaacctggattgcataccatggtgactcattaatcctaacaattgtgccccaatatcctctgtatttcatcactttgtctagttatggtactagccgaaaaaggaacatgtgtcaccttttgaacttcagcctctcctaaaagttcatgataaatgtccttagcagcaggcaggaacaattcttcaccaacggtaaagggcttcttagctttagcaatgcagttagccactaagaatgatgctctcagtgcagatacatttgatgaagtggtggccttcaataattgcttctggttttttgtttgcttgttt

SEQ ID NO: 44990 - DNA, 548 bp, Homo sapiens
actatagaatcagataacctagaagggtttactagtcaatgcctagcattctgaaggacatttggtaatttttttttccaaatttcacaatttctcctgatatttctctggcaataacacactaccatggcaaatggcctctcttctctggacttcaggtcctcatttgttttttaaaaaaaaaaaaaaaaaaaactgaggagttggatgacctgaagctcaccttgagctttgacagtctgctaagaacctgcttccagaggccagatgctgagtcacagattcctacagattacaagccctttaagtcaacagcactcatgatcacatcacataaattacttctctaatgatagaacatgccatcctttgatgagggaggccatgtttctaatgaatcatccttaaacgatttgcctttttttgcactactactggaaatgggataatactgagttttcccagcttctgtcatacacaacaagcattatttagtttttaaacaattggctgaaactagaaagaagtagtctggggctaaaaaacaa

SEQ ID NO: 44991 - DNA, 2143 bp, Homo sapiens
ctggccaacatggtgaaaccccatctctactaaaaatacaaaaattagccaggtgtggtggcacgcacctgtagtcccagctactcaggaggctgaggcagaagaatcgcttgaacccaggaggcggaggctgcagtgagccgagatcacaccactgcactccagcctgggtgagtgcaagaccttccagcctctatccattacccagttccaaagcaacttccatattttaggtatttgttacagcaacacccactcctcagcaccaattttcttagtccattcacattactataacaaaatgccatacactaggaaacaacagaaatgtatttctcacagttctagaggctgagaagtctgagatcaaggcagcagcagattcagtgtctgatgagggcccattgatagacttttcactgtgttaccactgagtgaaagggctaaggagtcttctctcaggctttttataagggttccagtctaactcatgaggaccccacccccatggcctaataacctcccaaaggccccacttcctaataccaaaacttccagatcatagcagcaacagattaaatgcagaagaaaatgtaagaatccttcacgatagaaattcaagaggtttgcaaaaatgtaaaacattgctactaaaaaagtttagggaattagaaaacacaattacttttcatttaaaaaaaattacactaatatgtgataggtttattgttactttaaaacactaaataaggcccagtaatcccagcactttaaggagactaaggctggagaatcacttgcgcctgggagcttgagactggcctgggcaacgtaacgagaccttgtatttacaacaaatataaaatattagtcaggcatggtgctgcatgcctgtagtcctagctattcatcaagctgaggtgggaggattgcttgagcctgaaaggtcaaggctgtagtgagtcatgatcatgccactgcactccagcctgggtgacacagcaagaccctgtctcaaaaaaataaaaaattaactaaataattttttctcagttttaattcctaatataaacaccaatagatataacaaactgaaacaaaagttctttagggtgcccaataatttttaagtgtgtaaggggattgtataaccaaaatatctgagaagcattaacttaaaactaataaaggagaaagactttattaataaaaatccacgaggtcataaatagttacattttagctacaaacagaagcacccaggccgggagaggtggcttatgcctataatcaatcccaacactttgggaggccgaagtaggcagatcacttgaagccaggagttcgagaccagcctggccaacatggtgaaaccccatccctattaagattacaaaaattagtcaggtgtggtggcgcacatctgtggacccagctacttgggtggctgaggcgcaataatcccttaactctgaaagcagaggttgcagtgagccaagattgtgccactgccctccagcctgggcgacagagcaagacactgtctcaaaaaacaaaaaacaaaaaaaaaaaaaacagcatctttccaaactacaacttggcaaagaaatactccctgtagttaaatattctcagtttttatttctaatatggtaaataccaataagtatagtccacattaacataagctcattggagtcctcaataactttttataagggtactaatgtttgtgaccaaaagtttgagaaatgctaacttaaatcatcccccaagtgtttatttctcttaggattccaacatactttcctaggctacttctgaagagaaatacaaagcaggctacctaatatttccaataaatgtttgcaaattacttcataggaatactcaaaaagatgacatgttaattacgaaaagttcaatctccagtttcaaattcattaagagctccctatatactaggccctatgcattctagggaaatttctccctgactttcctttcatccaaggtagataatcaaacaatatattttatatttcttctgtctcagaacactgacacatttgctatatatgtaattttaatcatattaaattgaacattcaagaaaattccatcttccttctaaagctccatt

SEQ ID NO: 44992 - DNA, 2062 bp, Homo sapiens
tacaaagtgtccccctccagcctggcctatgcagagcgcattctagacaaggccccagtgcaccaacagcccaattttggctatattctctgagcgatttaaggaagtccgcaaccactcatctcacgtgaccttaaaaaggggcgcagttgagcccagaataaaacacactcctttttcttctacatcaacttcactgcccagcatgaaggaagtgggcggggaagaggcgcagcgccagcgggcaggagaggtcagcaaagaaacgtggggtgtcgcgccatctactctggaggggctggaggtgaggggcacgcccgctcaactgcactgcagccgctgcaaatccaaggctgccacaccccccggcagccagggacacggcttcatcttcctctttctccagcggaaagggggccctctccacggaacgccccacctgctagagtcctccacatcccgaaacgcaacgcccgagagcaggcgcgggtggcaggcggcgctggggggcaacaggaggggaagggccgcggcgacctgcaacccgcgcatgcgcagatccgggtacccgcccgtttacctaccgttggaaccgcgatgccccgttccctggccgcggccgcttctccaggacccgcggcgacggcaagagggcgagaactgaggccccaagtggctccgcggccgagaagcctcttcctggggcggccgctgacgggaggttaaagctacggctgtggcgcggggccagcccggtaagcgaccccccggatacccccggcggtggtggcgacgcagacgcggaacagggggagagagtggcgacagaggcggcggctgaggtgcagagcctccctaacggcgagcgggaggagagcggctggcgggcggaggccgggccggacgtgacgtgcgtgggagggggcggggcaggccgctggtgggggcggggcggcgagggtccccacccccacagcattccgggcagcggccctgtgtcctgcaagcttgaggaccgcggttcctctcccaccaattggggtcctgaattagggtgcgagcagccaggcgccatcccggggcgggttgtggggtcctcggtatggggaggttgggaaacagagaggacactggggagaggaaagataaagggaaaatccggaacacagagatcgcttctggtctctgcggaggaagccaggcccccagggcgcccatatccaggtgaggagcacagagacctgaaccgaaaaccgctgggggagacctaagcggtgacttcggttcccattcccagagatgtgagttagatccgggaccacggggctgcacctgcgtcctgcccgcccccaccctaccccttcacctcaggacctgacctagactccagagagaacagtaaggcttcggtgccttagtctgggactgtggaagtcgataggctgcgggcttacagggagcttcgtatactaaaatcagccagctgcggaggcagagctgaaaggaggcagaaagaatgagctctctgaacttgcatggctacccagaccatccctacaactcccttgaactcacaagggtatgaatattcagccaatctcttctttgttatagtctgttaagggctttgagatcttccatttggactccttgacagccggtagatcaacacctgcacaaaaaatagcagccaccacaattcagttgtcccttacctacctgagctggaagttagtaacttggaaaatgtaaaacaagaaccctcatagaacttgggacaagatttgaaaaaaataaagttaccctatgaaatgatctgtaaatgggctacagaggccacagtgtctcccacatttcatcagagagagtaaaccatgtgtaacctaagtgtcacatacccagttaatgctgtcataaccgaagggtggggtccacaaagagtctaaaaccagaagaatctgaataagaatgttctatgaggctcccaggaactctgtccaggaacgaggcaactgattctaatgaccagaaccaacacttactctcagggcagttaaatctt

SEQ ID NO: 44993 - DNA, 1384 bp, Homo sapiens
gctccgctttattaagaaacagggaatgtcagattaggcagttctccctaaaagcccagttttaagaatactggactttattccagtttgaacttattcagggcttatttcccaggaacccgagcggccagcccctcctactaccccgcctccctcttagcataaacttgtttacttctctcagatcctctactccaaatgtcgggggtaaaagagcttttcagtccaaaaaaagaaaaatggctgaaatccccgagatgcaatttcctgagtggcaagaaaagctcatggttaaaagaccccacttccactgcctcacaaacgtcagacaaaaaaatgaatggctctttgaggtgccggttactccgtctggctcataacatcttttcgtctgcacgcccaagtttctagagtgcttttacggttaacccgcagagttcctaacacactaggattcactaagctgcttctctcacacctccgctctctccctgagaaacaagaccccagatttctgggcccccaaacgttggtcttcacgatgctgtagagcgcaggtctctgaaaaccctgggctctcaagcaacccacttctcccactccctaagcgtgtaacaaaaatatggtgcctagcctcggatctacaaaggcctttcacgcaaaacctgctcagatactcactgcccgttcccgtcgccatcttggccccgaagtctccaaccctgaggagagacggtctggaagggccgaaaccctggaattctgggaaatagtgtaccggcgttggttcgcggtgcctcctgggaaatgtcgtttttccccttaagacaaagcaagcaccctaaaccagttaccctgtgcactcctgttaagattgttgctaaggaaggacaggagttggctgctgaagcctcaagatttcctttaggctcttaggtaagaaatgtctaaggttcaaggaaaaaggttaagttggaagaatcccaggcaaaataagtgcgaatccacgacagttggtaacccggacccacattagaactcagaggtcaagcagaagcgaacgactggaattccagtcaggcccgccccctttccttacgcggattggtagctgcaggcttccctatctgattggccgaacgaacgcagcgcgtaatttaaaatattgtatctgtaacaaagctgcacctcgtgggcggagttgtgctctgcggctgcgaaagtccagcttcggcgactaggtgtgagtaagccagtatcccaggaggagcaagtggcacgtcttcgggtgagtgtgcggctgtgctggagcccgggttaccagctcttgcccgcgcggaataggctttaagaaatcggagctgcagccatctgtttttctctt

SEQ ID NO: 44994 - DNA, 1219 bp, Homo sapiens
atccgcccacctcggcctcctaaagtgttgggattacaggcgtgagccaccgcgccagaccaaaacttttgattcttctcatccttttgggtatttattatgagatatccttataataattccttataataatatttactattatgaggcactcttatgtctaggtttggctataagccctaaaaggctgaaatcataagcagtaattgtttactaattctccccagctttaaataagagcaccaccaagtctttcaaagctcaagaaaactaaatggataaaatcatttaaaacactcagctctttgaatgcctgaattccctctacaaacatttctgctaagcagtttgctctcctccagtgacagggcactcagtggctcttgaggcacacccctgggttgatggggagcgctcactgtaaacatgtccttacctctgtaataggcggaggcggttgcagctcggccagaggcaatgcagggagagagaaagccaactccgccgacctggaacacccacacaaactagatcagctcgacaagccccccaaggccaaggatccaagccccgtcccttcccactccaacatctcaccatttgctactgtgtagtaggccccgctcccgggtaaggcccgcaataagcagcagttgctttttaatttcccgcaaatctgagaaatcgctgtttatggacaggacaggcgccactgccgccgtcacagccaccgggaccatggaggtactcgcagccattttcccgactcgggccactccagccaatcatcggcgataatactggctgcccatctgcaccaaaaatatctgcctgtcattggccggctcttgctccggaaaaaccaatcataggtcttatttctgaaacgtcacgaagaggcgggggaaaagaaacaactacatccccaaatggccaagagctactgaggcgggaaaattagaaaataggcggggcgagggagaagccacgacctctgggcggggcggggaagaggggaatgagtgactgggaaaagtaaactgggaagctaggggtgggagtaggggcaagaaagggtggagaagggagagtgcctttcacgggtgatgtgattggatgaaaaatagaaagggtgtagtttcagggccgactctgtaccagataatgacaaagtgatgtatatgctaggaaagatgcatggtagcctctggattcttcc

SEQ ID NO: 44995 - DNA, 591 bp, Homo sapiens
aaaaaaaaaaaaagaataagaaagaaagcacttcaagcttctaaataccactcccaagtttgtcacacatgacaacgtcgcgaacaactttatccagtcgcgtgctgccccactgaatgttctccagcgttccttgggggctgtagtctggtcaaggctgatcctcacctaaagtccttcctggaaaaaactcaattgcctttttcttctgtgatcccggctttgtccgacagatggaaccattccctccctccccgctcttcaaagggcttgaccggaaaaggtgtttgctcaagagcgatgtgggaccagacaccagagaccaaagtagagagaggctaaagaacttactaaatctaagcccgatgagaactgaaagaacagtcagttcccagcaaggtttcttgacttaggcattattgatattttgagctggttaattatttgttggaggtggcagtgggtaggaaggaggtgggtgctgtccatgtattcatttaactacaatttatctagttgttactatgtgccaagctctgggaatagactgttgaatgaaacagtcaattcctgcactcagacatttttttc

SEQ ID NO: 44996 - DNA, 803 bp, Homo sapiens
tgataaatgccatgaagtgctgtgagggtgggtgacacggtggtctggcctggtctagggaggtcagggcggcttccctgtgacttcggctggacctgcagcatgagctggctgagcgtgttgtacagcctgggccgagagcgctgggaacagcaccagggactctttggaatgtttaaacgttaacccagccgtcggcatcgcgcccctggcctaccctaagccaggccgcgatgctcgcgcctccgagggcctcccgcagtcaagccgggacctcgcccagcaaggactccagggctgcccaggcaggggcgcccgtccggcaccggactcccgccctgggcccagctccggcgctcggccagccccgtgccccgggcggccgctgatagtcggctaatgcgtatcgaatttttgtggagttcggcccgcgcagagtgcgcgcggaggcgctgcccgagcctcttaattccctttgcatcgatcctgccgttaatgacataaccttctcccctaattaactgacaactgcattaggcggcgcgcctccgccgcacgccgcccacagcttcccccacgcagttccgcccgcgccggtgcggggctggggcgcagcggctccgcctggactcaactcagggtccggctgccgtggtggaggggagaggatagtgtttcaggatcgggatgcccctgccatccatatcagctcaataaacatttgccgttatttatattgttgttgtttacctctttgccacttaacatactgtagcttactgtttcattacaacgacccaaga

SEQ ID NO: 44997 - DNA, 732 bp, Homo sapiens
gcctcagcctcccaactagctgggattacaggtatgccccaccatgcctggctaattttgtatttttagtagagatgcgatttctcgatgttggtcaggctgatcttgaactcccgacctcaggtgatctgcccgcctcggcctcaacaaagtgctgggattacaggcatgagccactgtgcccggccataaatatttaactgtactaactattgagttgtaaacattttcaaaagaaaacaatttcttagttgacactttaccaagtttgagcagtgatggatttaggggcattcatctcaacaaagaacttgggggccacgttaaatttcatctcaacaaggtggaacctgtgtttcctggattgtgaaacacaggacttgatccagggcaaaggtcataatttgatccagtgtgcaaatgtgtcttttttagtcagcatagttccgttcctttctttttctttctcctttctccttttcttttctttcttttaatctctgtcacccagactggagtgcagtggtacaatcgccactcactgcagcctacagtctcgacctcccaggctcaggtgaattctcccacctcagcctcccaagtagctgggactgcatgcatgcactaccacgcccagctaattttgtattttttgtagagatgggttttcaccatgttgcccgggctggtctcgaactcttgagctcaagcaatccacccaccttggcctcc

SEQ ID NO: 44998 - DNA, 548 bp, Homo sapiens
atgcatacatacaaactgtgaaatggtagaattattttaaagggaagtcaaatattgtcttttatatcttgatttatgagggtgttggaatatatctaagttatccttcccagaagaaagaatattagggaggtgggaagtttggtgtttaatctgatttgaagatttactttttctgttggattgagggcattgatcctatgtcatccttggggaatccctatctaggctcctgattcactgtgataagcagtgagctgtgttccttcaccttgacctcagtctgactcatacatgttgttgccagggcacagtgacagcccgggcttcaccctgaaacaccaaacaagaacaggaggtacagccatcactcctgggatgcccagatcaggcagtggagaagagccctgcattcctgggatcctcccagccagcctctgcagggcagaggggctgaggggtgtgttttctattcctggttctttttatgactggtaggcttagccctacttctccccactttgcagaggtttagctttcactgggtg

SEQ ID NO: 44999 - DNA, 2459 bp, Homo sapiens
aatctttccacccctattttctcagttagtactgtacctcatttttcctctactctttttcagtttgtagacttggtggctcctgcctcctcccctccctggctcagtgaggacgacccccgccactggctctactttccagctgatcacagctatttacctgtcccagtcttgagtaaggcacaaaatatttacagaaaacagatgtctttcagaggacttgctgctaagtgtaatagtgaagattacttgcattactgctactttccaatcaattaaaaaaaagaaatagaaaactttgtattacaaagagatcacaacacgaacgcattgtttaaagcctctcctttatccacttttttgcttgtctccctaaaccatctgtgatgctagctgagactcgaatttacataagagccagaaaccatcaacccaacctcttcacacactaacgtctacattcaatctctttaaaaaagacttaaattttggctcatgtgggaggtggtggtagtggtggagacttaataaaaggtggttttgtcttcctgaagtggaaatatagcgccgtcaacatcttttccccatctgcctgtttcctccttccctttctgtttaaggaaagtctaaccaccgcacttctccccacctccccgcacctccccccaggcaaacgcaagcaactgaaccgcctatgatgtcataatcacaatcccattacctcatcctgctgggggggagggggcggagagagaagagagggagtgaacagccctgggctatcctgagctttacaaagtgttctgggtgagggcaaattacagaaccaagtggaaacgtccccgcaaccattataagtcctgggtttttaaggttcaggccgatccggcagctgcaagaggggctcctgggactccgagcaggccctaatccgcgcttggaccacacttcccagcagccttcacgccgcggacgggtcctttgctgggggaagggggattccttcgaagaggtggtcgtggagggcggggcagcagagcaggtgaggggcactgtggctaattgcgtgacgcggcccgaaccgagtgggaggctgcagttgggccgttggagggagggagggcaggggcgatgcctttgtttaccttcttccgacatggcctcccccgcgggtttcaagatgtgcctccaactggggccgtccactttctgcgatattttggagggggtgactcgttagtgaggaaaccacccccatccctaaatcaaagcgccaggctcgttcccaacagcgctgtccgagagacactttgagagagacacgacacggagctgcgccctccatgggtggcttggggggattctgcgagccggagctgtccccctactctcctcagggactcgttggttcgcgccagcgccttttaagggcaccgtggggcgaaccgagcgctcagagctgctccggccgcggccctgggagctggaggaaccgcggtaggtggtggagggcaggtggcgctggggcctcggggcgggcacctcaaccgtccctccctccttccctctttcccctcccccagcccgaccgcccgcgcggccgggcctcgctggccgcctctgcggggagagcacgggacccggtgggggagggggtggcggagtgctaagtcccagaccctccccatcccctgcgtcctgagttcgcttcccgcggccagatgatggaacctagtgggaagaggcgaacgacagcccccctgagcgagccctggcgcacccccccccccgccccggggaccagcggacgccccatgccccaccccgcggggacaggcagggcaacagagggagaggttgaagattggaggggcctagccttttgcttcttcatgggggtggggggaggggtgttccccacttgtcacccctttccccaccagaaccatatggaagaagagcaggcagatctccacctacctgttcatgcagctccctgccttcctcatgtttttcttcagtctccccaggaggtgtggggctgggacctgaggggaaggtccccaaagggtttgtgactctcctccctgttggcctgacctgatcctaccttgtcttggtacagcacaacctcagcatccctgaaacaggagtgtcaggggttactgccatccaataggagatggggtgggggtctgatctttatttttgggggctgctggtggagggaaagcctggactgagagttaggtctggtggggttgctgagagggcctagcggcctgctgctctgtgaagggctgagccccgtgccagttgttaaactgagaagttttaacttgtttagtgaatattcagggctgtctctacccttcagatacacaaaatggaaggggaaggaaggcggcaagagagggcttcttacacttttttcaatgcctgcttgagaaagaggaggc

SEQ ID NO: 45000 - DNA, 1634 bp, Homo sapiens
gaggagagcaagctaaagccctctcatatatacgactccctgaaggaagattgagaccagggatgatgccatggggaagctgaaggacccgcccacttccctaccccggccggacctgcaattcccctccagaccgcagggggcactgcaggccccggggagattggggcggagcgctgcgaggggccaggagctgtcgccccgctccagagcgcggggggcgctgtgcggggcccaggctgcggctccgctcccggccacggggggcgctgcgctgcgccggtggttggtggtggctgttggggggggtgggggggaacggcggccgcgggtggtgcggagggaggccttgcgggcggatcgggcgcttggcggcggaggtggtgggaggcggcgggcgggagcgcgggtcaggccggccccggcgatggcggacgcggcggcctccccggtgggcaagcggctgctgctgctgttcgcggacactgcggcctcagcctcggcctcggctcccgcggcggcagcggcgagcggagatccggggcctgcgctgcgcactcgagcctggcgggccggcacggtgcgggccatgagcggggcggtgccccaggacctagcggtgagtggcggccgagtcgggcactcgaggccggggctgcggggcctgcgggcggcctccccgggggcctttgtgagggggcggtgggatgggggtgacccatttccgtgcccccgggtctccttagcgccccccgccggcacctccgcaccccgagcgcttgccggcatggcttccgcgtcggggtgtgcgccccggtttcccccggggggcggccagggcgtccggagctgctgcttgcagccagcaggccccgcctcctgggcgacccttttctcggcgttccccccaacacgccttcggagcaggctctcgaatcttgagctcccgggagcctcagagttcggccagtgttgccgctgccctctcgaagacgcggacctgtggtccccagcctctcccaggagacctgcgccctgttccttttctcccagagccccaagtggggcgggaatgtgggcagttatgggaggcacggaggctgcagttggagctggtcggggcttttttatctggcagttacttcctcatctgagctgggctcggcctggcggtctccagaaaggccagctctcggcactgtctcgagctctcctctcctttccttaacgcttctgggtgacaggagctgcagttgtggctgtttttgttaagtttgagatctttcttagtggccgaacggggctgctgggtagtgctttttgctcccagctcagctactcccccaaccttgggagaggttttgttttgaaactttgtgtttgggcttggccctttttgaatgccttggtgtgttttgtgattaaagttgttcagtcatacaacttaactagcattcgggatcatgatgtgttattctcgttaatgtggcggtaaaatatagtgtttgagttttggcaagccactttatttcctcattttgataggggccctagcttctctggtgagataaggctatgaaaaatggtgtgtgtgcgtgttggggcagggggtggtcttttggaatgtaatagat

SEQ ID NO: 45001 - DNA, 3582 bp, Homo sapiens
tgggaggcggaggttgcagtgagctcgcgccactgcactccaacctgggtgccagcgtgagaccccgtctcagaaagaataaaaacattaaaaaaaaaatttggctaaggtaccctaccagggagtggcaaaatggacattcagacacaaggccatctgcgctgcaacagcctggccttcctgcccttgcggcaggagtcctctgagaggcgcatcactcctgccccaatggacaactcggtagacagtgggagtgagccccccacctccccagcggacttgagacggcaggctccgagacgagggagtcctggttcattaagttggtttttataagaaaacatgtttggaggggggacagccacagagggattaagtccaagaaagttacaccctcccccacctaatccccctgaccccgacctccagaggctgttggggttcacagaggccctcacctcctcccttccctctcggtgtcgtcaagcaccctccttccccacattctctttctgctttctttttaaatccagaaaaaacagcacctcctctggattcagagctagagcaggaggagccttcccttcccggaatccctgttccctttggggtgagcaactgactgcgtcgtgggggcggggagggcttccctgttcgcgttcggccccagggagacctgcgggaatcgttctccctcgccaccacccaccccctgcttccttctccccctcgccttggccaggctcggggtgaggagtgttatcccggagtctgggcgcctcggcagtgacggctccccagggactgcagggggagcccgggctgcagcgcctgctcagttcgtgctcactgcgtcgaaggctcccccggcctggctccgcgcccagcgccgcatccgggaggaggagcgaggaggcggcggaagagcccgcgcggccggagtccggggctgggagtggagagggaacctccagggggcagcaccgagccgccaagccggtcctctcttcgcgcccagcccggggtccccagacagcccatagggaagcccctctttcggattcccgcagtgtgggccggccctccacctggactggataaaggggggaaagtgacccctcaccacaaggaccattatctcctggtgagaacaagaatcaggcctctcttggggcaatcagcttccccacttcggtcccccaaaggtgggctctttgccggcggggactagggaacagcctttcggttccgggggagcacaggggaccccaggcaccagcagccccatcccaccgacaggtggcagaggcaaggcagctcactgctatacagtgtcccaagaaccaagtggccgtgacttcctatcctcaatttcccagcgacacccggaaagacaccgtgccatagatcgaggcccggggtcaaggccccgcctctcctgggcggcccctgcccaggcgggcccagccgctcctcccccgcactcccggttcgctctcacggtccctgaggtgggcgggcgggccctggatgacagcgatagaaccccggcccgactcgccctcgcccccgctctgggtctgggcttccccagcctagttcacgcctaggagccgcctgagcagccgcgcgcccagcgccacacgccacgagccctccccgcctgggcgtccccggatcccgcgagcgctcgggctcccggcttggaaccagggaggagggagggagcgagggagcaaccagctgcgacccggaaatgccatataaggagcaggaaggatcccccgccggaacaacccttatttgggcagcaccttatttggagtggcccgatatggcccggccgcttccggctctgggaggagggaagaaggcggagggaggggcaacgcgggaactccggagctgcgcgggtcccggaggccccggcggcggctagagctctaggcttccccgaagcctgggcgcctgggatgcgggcgcgggcgcgggccctagggtgcaggatggaggtgccgggcgctgtcggatggggggcttcacgtcactccgggtcctcccggccggtcctgccatattagggcttcctgcttcccatatatggccatgtacgtcacgacggaggcggacccgtgccgttccagacccttcaaatagaggcggatccggggagtcgcgagagatcccagcgcgcagaacttggggagccgccgccgccatccgccgccgcagccagcttccgccgccgcaggaccggcccctgccccagcctccgcagccgcggcgcgtccacgcccgcccgcgcccagggcgagtcggggtcgccgcctgcacgcttctcagtgttccccgcgccccgcatgtaacccggccaggcccccgcaactgtgtcccctgcagctccagccccgggctgcacccccccgccccgacaccagctctccagcctgctcgtccaggatggccgcggccaaggccgagatgcagctgatgtccccgctgcagatctctgacccgttcggatcctttcctcactcgcccaccatggacaactaccctaagctggaggagatgatgctgctgagcaacggggctccccagttcctcggcgccgccggggccccagagggcagcggcagcaacagcagcagcagcagcagcgggggcggtggaggcggcgggggcggcagcaacagcagcagcagcagcagcaccttcaaccctcaggcggacacgggcgagcagccctacgagcacctgaccgcaggtaagcagtggcctacgccgagggggaaccctttcgccaccatcctggcgtcctgtccttcaccgcaggagtgctcctggatcttagaatgagagccgggtttccctttcattcctcgcatccccagagtcatgtgttagagggatgccaaggaaccccacacagcccaccccctgccctcatccctagcggagcgcagaggaccgagcttttgttttggatggagagctctggagctgcgtgggtgggtggagggggagggcttgttttgatgagcggggctgcgccccccacctccagtaagacttgccttgccttgcttgccgcctgtccccaaggaaggaccgtgatccttggccgtggatgtcccggcagcccgggtttgggggcgcgcactagccgcggccatgggggtgctggcgggaatccctcgcccgcacagccgccgctgcggagcgctgcgagctgcagtggagggggattctccgtatttgcgtcagctgttgttgaaatgggctctgccactggtgcgggtccaggaacattgcaatgtgctgctatcaattattaactacctcgggagtcaatggtagccggcccggtctcttgcctggcagctcgggtcgtcctcgtcctccagtgattgctttccagtaaccaggcctcccgcttctctctctcctgccagagtcttttcctgacatctctctgaacaacgagaaggtgctggtggagaccagttaccccagccaaaccactcgactgccccccatcacctatactggccgcttttccctggagcctgcacccaacag

SEQ ID NO: 45002 - DNA, 1251 bp, Homo sapiens
cttcgtgggacaaaggatagagtgggcagaagcctggcctggtgtctaaagttcccatccgggccaaatctgttcccattgtgtaggaggcctgaggttctaggttcttttgggcccagtcccctgagggaccactcccactgctggggcaatccctgtgggcacgtgagcatctgcctactctgtgagaggccttgacctggccacagcagacaccatgggaggaatgtggattgttggttggggagacggacataagacacaaatcacaacatggtattgtgttatgcaatatgggcaagaatggagctctttgggagcacagtgaagggcacccaacccacctgggggtttaggaaaggtggaaaaattgagttaggaagcataagcaggagtcaacctgattgacttggtttgtgggtgaggcagggaggacactggccaagtctactcagcagtgtggatgagacggattactgagtggaagcactacctccaaccccaatatctaagtcttttgtgaattggtcagactccacgattcactgggtggatgggtacaatagatttgatgtactggaattcccaacccttggctcctctcccaacttctgacccctaaaatcagaggaacaatgaggtatccccttgacctggtatggttatcaggccctgagtgaagtgaaagtctaatctgcttctacctcttctccttcctctaagggtctcccaggtggttctcaacccacactttctggagccagagggattccaataaacccctgacattggcccaattctttcttgtgcagtctagccttccctgaccaacactgttgacctctgccctttcccatggcaccagactcctcagccttgaggagggggaacaggacaccttctctagtaaggggcacatccctgtgagcctcctggcaaaattgccaggtcctgatgggacaatatttgtattggcgcacctcttcccagccccacctacccctccccatctcactctaggcccaggaacacaagtccatacctgttacacattcttaagagtttctcactccagactcccaagaaataaaacatggcaagaataaaatatgaaagaaggagcattgagactctatttctttaaagcagagggtcttgtaagttacaagtgcatcagaatgagattcccaggccccatgaacggagcaggtgactgataccttacatttgggatagggtcctggaactggc

SEQ ID NO: 45003 - DNA, 2269 bp, Homo sapiens
ccctattttcttctggaaagatctctcccgaagccgtccgctcctcattctgcccttcgtacaggcttcccgggcctgagacggctgggaagaggctaaaggggcacgaccagccggcgtctgggaaaccgctcctgcagcctgcaactgcgagggcccggggccgccacgcgggccccccggcagcctctcgtttcaccccagcctccggagagggcccgaggctcagagacgaaggcactgcacccaaggccacagatcgtgcatggctttgctggaattcccaccgggcccgcaggcgtcgaggccgcgtagaaccccggagcccctgcgcccctgcgccccgcccgcggctgcgaggctcggtgcccgcagaggctccggcggaaacggctccatcccgggcgggctcccgcccccggcccgcccccgtccgccccgcgccatgtatggcgcttcctccccgagccctacaaggcgcttcctcccggccccaggcccatacaaggcgcttccttcccggcgcggctggctggcggcccgcgggctgggagcccggtccgctgggcccgcccaacctcggagcccgcggccagcggacctgctgccaaggagggggcggcagcggcgggagggacgggaacgcggggcctggcccggcgcgggaggcgcgggacgggccgacttgggggtcccgctggtccccgctggtttcgtattttgcctcgcttttctcccctagcccggagcacagcacgccctgccggaggtctttcagcggccccagcccgggacctccagccacacgggcctccgagcctcgccggccgctctcccctgagagttgacaagtgggtcttccctgacatctctcttcctccccgcttgcgcttctcgtacctccctggcttcagccgagctgccccctccgcctggaatacccttcccacactattctggcagaaagaactgctacgcatcctttacttggttcagacttctggcctcctggaaatccttcccacccccacccataggtcaccagcctctgctgagctgatttaggatcataggatcttaacaaagtgtcgttatctgagtgatcctgtttcaggcctgccgcagtcccttttcaccttggacagtcatttttgactttaggtctggtccccaacgtctccacctgctatggctccccgtggtctgaggctcatgaccccacaaccctacttgagtagtttgactctgcaggagaaagctggaggggtagggtgaggggagccacagctggggcaagtgtacacctggagtgagttggggctgagcactgcccctgggtgcccccatcacccagaagggcctctcctgctcagcctgacagctctggtttatccaccactgaaagaaccagcaagcccctacaggccctcccgacagcgcctccagaaacaaacctggcccagccatgtggttaccctgatctgatctgccatgagaaaggtcacaaacagggactggatctcagcacagagggctgccagcaacagttcccgagccccctccccccatgttccagcaggacagctgtcacaaagtccagctttctgctggggaggagacaagcaagtccccatgtggccagctagacccgcctgtgagcctgtgattgttctgccacaggtaaggcagggaaagaaaagctcagagcttggggctgagtgggtgaatatgtcagagaagggccttttagggccaagcagcctctgggcttgatccagaataaaatcactcacaggcttccaggcgcaacacacacacacacacacacacacacacacacacacacacacagtggcttccaggcgcaacacacacacacacacacacacacacacacacacacacacacacacacagtggctgcaaatccaaaatttaaggagccttgtgggtctccacagccccaggttggctgaatgcctgtgaatagggtgcatggagagaatctcaaaggtccaggaggtaggtttgggaaaaaactgggtctcagaatctgggctgcacacttagagcctaggatacctcttggcttgttttcccacttagggctgcaggcccccagcagccttctctgtagatctatgctctaggattgtgggtaatgcagtccacagaggccaggctcctagtgatgctgcttcctgccctctcctcccctcctctcaggcccctgacagccacccgccttcctgctccaggaggagggcaa

SEQ ID NO: 45004 - DNA, 578 bp, Homo sapiens
gacagggttttagacttgatttacagagaaccctttaggtggtgaattgttttcacctgttatttctagtgcctgctattcagccacatcctcagcaacttgcagcacccaaactgccacaaaacaagcaagtaactgtgccctgcttccctagctctaatcggatgctcccacaccacttggctgttcagttcctaggtcccctgagacccagtcccatcagggctggacttggcaggcaggaatcccctggcattcactcaagctggcaacaaaggagaagctggcatgaaacttaaattccaccttggctctcagccctaaatccaccgtgcctgtctgggagtgtcatggcatgcgtcttggagccagagaacaaaagatggcaagtgctgcaggcccagacaggcaaggaccacagcccatatatcctgcaccactgtgctgccttccaacaattttgtcttcaagaacagcacctagacacgcattaggagggaaaattacacttccaccagcacaggcatgttcgccccttcccagctggtaattgagtttcgtcgtcagagctatcacct

SEQ ID NO: 45005 - DNA, 3180 bp, Homo sapiens
atgttccaaacacttttttttgggggggggggcacttcctgtaagtaaaaagtttctatgactgggaaaggaacaaaataaagtaataaaagaaacaggaatacccctggcacaccttcctcaaacgaacaacgttaaaaaaaaaagaaaacacacacacacagctaattttaatctagcctactctccccccaatggacacacctacagtttcttatcaaaatgtacaagactcaaagcccatttaattcaattatgaatctcactcaacaagcatcaagcacatcaggcgcctctctacagcgatatccccacaagtttcagagaaatgccagcagggactctgtagttatgattcctatcaaacggccccctaacccgtatttctcctggacatacacatgcagattcattaaccaaaacctacccagcacccctcacatcgcgcgtacgttggcattttcagtttataggtgggtcctggaacagctaaaaccaggaagctccggggtaattagaggacttgggagaagtcatcttgggacaggtggaagacccagagaaatcaggaatcagaaagaagctgtccctggccacctctgcttcccgtcccatccaaacttcacccacccgggtctcagaagcccagaagggagaggccattttaatgaggcctggctgagaaatgaagggagaagaggaaatcagggaagggccctgggaaaggaaggccgaacactttgccacaatagcacccgagtcgggtggcagcacctggagcccgaagagggaggacctggacttaagggcccgggagaggtgcaaaagtagcggtggcctaccacgaggggggccgagtgatctaaaccggggagcgcgggccccttacccccatgcggggaaaggaccccttctcgggccaaccgcgccgaccctcgcccctgggtcaggggctactacccagagatccagaaggcgggagttggctagtgcctggttctcctcatccggccatgcggcgcgggggcgtccatcctgaggggtccgggaaccaagagggcacggagggtgccggacgcggcgctcacccgcgggccgcctccaagctcttaatgagcttcttgatcttccagatctccacgttcctgtcggcagcactggggtcgtccgccatcttctcgcctcctcctccctagagcggcccggcggggcccggagacaccaagaccacagagttagcgccgccgctggggcagagcggcccccttcctcgccatcccccagaggccctctcctcccgtccggtgcagctcgccacaaaggtcaccggcctttccctccctgtgccttacctaagggcccagtcctgggcggcagcggctgctcctccccggcggcggctccgcggcggcggcggctctgacgtaggacaccggctccctctctccaggcagctgcatgtgttgcaatccgctcacatggggcctgtgacatcacttcctccgccaggggcggagtggaaggcggcaggcggaagggagggggccggtgcgagtgaggagaagctgggcgtccgccgcgacttctcattggctctctgccccgcagcctacaatgagcccgccgattggctgcagctgggtccgcgccgccttgtgaggtaaggctggggggtgggaggtgccacctttcttccggcccggcaaggcgagaggaggaagcgggcggaagccggtggctctcgcgagtttactgagagcccccgtcaggctcgaatgggggtggttcttaaagagagaggaccggggtcgtcgtcttttcagtccattctccttgaatagggtggacatctgaggctttgcgactcgaagctaggcacttgggcccgacgcgcggtttgaacggtgcttgagaagccgcgaagaagcgcctcgcgctcagcggcttcttcgctgacgaagtgctgcggtctgcgtgcgtcatggctgcacggaatagtgtggaggagtcctggccagtaggtctggatgaggaacctgcctccgggcggtccgggaccctcacctgcaggggcgaaagaggcctgttttctctcgccccagagctaggacgggctcactttggacttagaactttatggggtggaagacagcgggggctgcctgagcttggagacctgaggtatctggtcccatgtatgatttggcctgagccgttgagaatgggggtggagagagttgaaacaaaatgggcatccacatacggttagaactttatctttttgagttaggatttttaggtggctactttgtcccccctcacctcgtctgggttcaaatattgagcccagaccgtgtgctggaccctgttttcctggggatacagaggtgaaccaaacagatgacagtacttacccttatggagcttatagtcgattgggtttttaagtttgtgattttatactttttgtaataaaataattacacaaatgcttaagtacttcagggtgctctgagagtgtatggcggggacccagctctgaaatgagacccaaaggatgattaagagtttgtcaggaggaaacagaatacagttgagaactacagaaacgccagtgtgctggcacaaggtcagggacggggagagtggtttgagggagcagcaggggaagaggtcatgtagggtcttttaagccagattcagaagtttggtttctttcaagaacagtgggtagtttaaagggtttagagccctggtgtggactggagagagtacaggagaagcccagagaccattttggctgcttcattatcatgtgagagatgattttcgcttacattagggtggtgacagtgcagatagaagtgaatgaagggcctggtgcagtggcccacggctgtaatcccagcactttgggaggccaaaggggaggatcgcttgagcccaggagtttgcgagcagcctgggcaacatggcaagattccgtctctacaaaattacaaaatattagcctggtgtggtggcccgcgcctgtagtcccagctgcttgggaggctgaggtgggagaaacccttgagccgaggaattcgaggctgcagtgagctgagatcacaccactacactccagcctgggtgacagagcgagaccttgtctcgaggaaaaaaaaaaagtgaatagga

SEQ ID NO: 45006 - DNA, 2690 bp, Homo sapiens
tggtatactacataatctctaaataaatacagataaataattacagagaagaataatcacaaatgtagaaaacactgctttgaagtttaatatgtattccctctcaaaggaaatgatattatacttacgcataatcccgccttgaaacaagtctaaaagcctcatgactaaggccattccagctatcctaaaaaagaaaaaactgactcagtcaccaaccagtgtgtatcctgggaggaaaaagagaaaacttgggctcacttagtatataaaatacattaagctactaaaacagtaaatattaaagtttcccaaataagtaagacgaaaaaaggtaaataaaagatggccttagaatcacattacagtaggatttctcaaccgtggcgctattaattttgggcgaaatttttgtggtgggggctgttctgtgcattgtaggatatacagcagcatccctggcctcgacaccctagaaaccaataagcaccccagtaagtaagtgacaacctaaaatatccacagacattgccagatgtcccctgggggaaaacacttccccttaccttgccgtgcaattagtttaaaagaactagagttactaagggtctttgaaagaaaaaagaaaagtagtggcgtttcactaggataaaagacctttattacaacttaacctcaggctccttccaagccttccttaatgcccacatacaattcctgttctctaaagcatttgtcttttattttagaaaacaagtaaccactccatagccttttctccgccccacgatctgcttttttttctgaagtaacaaacgagtacaatcttacaccacagattttgagaaaatgttgctaagcacgaaaactggagttccgactcagagctttcttattttatttcaccgtatcaacgggatccttacacactctgtattctgtagaggagccaaaaataaaactgaaaatagtggctttcccaatagactgcatccctcacccccaaggccaaacctttccattcagccacagaacaggccatgaggaccactacctggtaattttgaaatgacactctagatcgcgaggggtgtgactcagcagggcccaagccggaggcaaaaccttgggcaaaatcttgacccggcagcgctaactatggaaggcccgttaccttccttcccgcctgacctatactggagaattcaaaccctaaagggcgcgcggcctgccgcagcgaagcccgaggcccaaggcccgaggccgtgaccccattcgggaaggtcccagttcctcacctggtggcgggcggccgtagggccccgggaggctgcggcgcccacgagacgggctgctgcagctcggctggcacttatcatggcggataaatggaggagtacgaggcagcaaacaagcgctccgacggcaaagagctgcgcgatgcggtggcggcagcgcttctggaaacctccaaccacgtggggtgaggggcgggggttggtcactgcggcccagaggcccgctcttccgctgaggcgccgcccgcgccgcctgaccagaggatactcgactgccgctcccggagccagggcgtacaggtaatatgctccgcagcatgatggttggagaaagcctgccctcctgtcccggctgcggcggctctgagctcagaaagagtccaggggaggaagagggatatgaaggccgtatctcggacagccccggtcctcggcgacaggaaagactcaaggtcacacgggataaattgcgaaccgattacagtcttcttgcgtcagttgcgcgggaggaggagcctgttggcgcaacagacatccagctaagaacctagagcgcatgtgcgcaaggagtggcggaaaacatgggtggagactaactgcggcgctcactgggtgcccgagtgcacgccagcgttccctggggcgagcccgggcgcgtgcacaccccccgggcgtggacgtgttcccagctcccgctcctggaggacggcgccatcttgtcttgtggctttgtgaagtgaggacgtcagtacttttgttgtttggtcccgcccgttgttcacaacttgaaagacacttggatatgcagacagacgttaaacaatttcgtgttgcgttttatcacaggggtcttgggtttccaactacgaagcgtttgattcacacagaacattaggccaattagcctgcacaaagggaaaaaaaaatagctgagcttggccgggcgctcacgcctgtaatcccagcacttttgggaggccgaagcgagcggatcgcgaggttaggagatcgagaccatcctggctaacacggtgaaaccccgtctctactgaaaatacgaaaaagtagccgggcgtggtggcaggcgcttgtagtcccagctactcgggaggctgaggcaggagaacggcgtgaacccgggaggcggagcttgcagtgggccgagatcgcgccactgcactccagcctgggcgacagagcgagactccgtctcaagaaaaaaaagaaaaatagctgagcttcaggctcttcctctccccactgtgctgggcctgacttgagactcctctggccctttttaaaccttgtgctggtggcaggatgtcaactacttcactaccctgtgaccagtttttaggtttttgtttttttttttgaggcagtctttgtcgc

SEQ ID NO: 45007 - DNA, 1248 bp, Homo sapiens
cctgccagaataaactgtttctaagcgtgccaatgggtagaagccgtgaatgaggccatcctgcctgtgctctgcaactttgcatggcttcccaaaggaagtctgctctgtcctaggttgtgttgggtgtgtgcattggtgtacatgtgtatggtactggcccacttctctctcattccattacagcatgaatccctggcctgaactggggaagtcactttcaggattaaaggcagccaacagaacatcagcacccagagccctggagaacagcatctgtgtttgagtggtaaagtgtcaacaggccgcttaaggaggagtggtaactgagtccctgaacccaaatacaattcttccctggggtctgtctgtgcatctatctgctctcgagtatagtcccagttgccaaagacgtttcactttttctggtgtgtaatctgtggttcattgatattgtcctcttgttctaggacaccattttgtgagtggagtatcattttcacgagttagagtgaccacactggcactagagctcaaagtcagaactgggagaatcccagacacatttcagaaatcaagttactaagtaaatagcaaagagcaatctccctaaaaggtttatttagttatcaaatacggaagggggtttcctaccttctttttttcgagtacttttcctcctgctacgtaaagacatttacattttcagctttcttcggtggacctaggtatctgagtgctggtgttctttgagagtactcaaaggccagagagagtagaatgttctttggagagctctgcagaggagggaggcgtggggtgcttctcagattcagggcagtcagcagccatgtgtatatatctatttccttattggtagggaaatttgaaaatagattatttagggttttattgtttttcatttagctttataccattgaaaatctctaggactgaaacatcatttttttctatcattttgtgttctgcttattttgtttactattgtctaaagatttctgcatgtcaacctggtcccatatacttgtcatttttaatggctagctatataatcttattccataagctacataagtttattccactgaatgctctgttcttccaagtttttatttattttttattttttcagggtatagggagagagaggctgcatttctaaaatatctctgagaacaagctgcttttcagaattcaaatcaacatgtgatcttcttcactttaggg

SEQ ID NO: 45008 - DNA, 809 bp, Homo sapiens
cctgccttgaagccatttaggagaaatggcgttctccaaacaaaagtattccgttgccattcacgtttctctctctccccctctctggccacatggagctgggcagaggtgtttttttttccttttctctttttctctgtctctgcttgtttctctgagaagataaaagctggcctttggctccccgctaggggacaggcccattacagccctctgttcctttccctgctttctctgacactgtgaggctgagacacagtgagtcctgctcagctgggcctgtgttcatcccattagcattgtggccacttcagggcctctgggattgagttctctggagccagaacagtttcataacccctagaggaggccaaagtcgtcccagccttctgggtccaaaggttctctcccatgtggctcctgcctcaataacctacctccattttttttttttagtttgtttctgcctcaggcacattttctctgtaatttttggaacccaaatataagggaaatctcatttgctccgttctgactcatttacaattaaatacacttgttcccatctgtgtctgtatacatctgcatatatttgctaaagcatcgcccttaattttggaaaatgaggcggctggtgttatttttatcctgactgccaagttggctgagaagaccagtgggtgttcacccacccagtgacgacccctggccaggcctgtgcctgagggaggtggtgacatttctcccatgcatagaacatgcagacccctggacagttgtggccttcgtgattgctgtctttaggggtc

SEQ ID NO: 45009 - DNA, 662 bp, Homo sapiens
atgttatatatattttagcacatacacaaaaagtgctgcttattggaagatctcatgttaggcaggagtggtctaactctggtactccaccgtgctcagttattggctgacagcggctcaggggaagagtgtagcctttatgtgaatgctgtgataaattccaaggtcagtcaactctgcacagcggttctctcaaagggaaatgtgagcagtgcacttctatagttgccatggttgtgtagtataatggttaaaaggttggcctctggactcaggttgcctgggttcaacaccctgcgctggcactttctgtctgtgactatggtgaaattatgcaacttccctgtgccttacttactttatctataaaacaggggtgatgatgctagtatctaccttgtagaattattacatacatgaacgaatttgtgaatgttcctagcatgttgcctgtcaggccaggtgcaatggctcacgccttgtagtcccagcactttgggaggccgaggcaggccgattacctgaggccaggagttcgagaccagcctggccaacatggtgaaactctgtctctaccaaaaataaaaaagtagctgtgtgtggtggtgcacacctgtaatcctaactactcaggaggctgaggcttaggcaagaaaactgct

SEQ ID NO: 45010 - DNA, 2459 bp, Homo sapiens
tgtttttggagtattcactatgaagataagaaagggtaagaataaaatgccccaaatgaccagaggaatagagatagaagtcaggtccctcaaatttgttggaggagggggacaagctgggaggggggacgtgctgggggcggggcgggaacaagcccaaaaagggacagctgctgcggtgcctcttttgtgtttgtaaatgtcctccccgcaaggtggctctagcctgtaatcccagcactttgggaggctgaggaggatttcttgagcccatgagtttgagaccagcctggcaacatagtgagactctgtgtctgtagttccagctactccggaggctgaggtgggagggtcggttgtccagggatttgaggctgcagtgggccgtgatcgcgacactccaccccagcctgggcgacagagggagaccccgtcttaaaaaaaaaaaaaagtccttgatcaagagggcttcgggtgtttccatctgtggagtgaggggacgggttaggtgaattctaggggcgcttccacctcacattatgaaaggtcctgagagtcagattctagttccactgtgtcccgaagctgtggggcctttccttagcctccgcttctccttctgtaaagccaggtagttggcctagatcacttttccagaagactgtgactccgggacacctgtgacactcttgaggggagcgtgcccagtacccctggtcgcgtctctgggattccgccggggtgggggcccgcgcgaggccgcccctgagcctcacctgtgcgcggagcggtgactcacctgccctcgcgcagccctctccgcccgcgggctgttccaggagtcaccgctcctcctccctctcaggggtcactcccggcctaagctcccactaggggccggggaggaaggaattctgaggtgggcggcggggaggaagaggtccctcgggggtcccggtccggcgttgccagactctcttcgcggtgggggccttccctttccccaaaagcggaggccggaacggccgggaggagcgggcggggcggcggcgggaggcgccgggaagagcgagtcggagggaggtgccaggaagggcgggcggggccgggacaggggcgggggccgcgggcggggggcgggccgggggcgggggcgtggggcggcccatttcctcctcctagccggactggagggagacaaagcagcgcccgtctgcttcgggcctctggaatttagcgctcgcccagctagccgcaggtaacttcgtacctccctcctcgcgggcgcggtctctcgggccaggccgagagggtccttgggccgggccgtcccaagctgggccccgcgagccgcgggcgggcgagcgggcggggcgcggtttctttggcgacgtcgccgggaattgggccccgggcgggcgtgggacccgcgtcgggccggcggtcccttcccccgcagggcccgagtatggggcccgggcgggcacggccggcgcttcccagcgctcgggaagtcggggggccgcctgggctggggaggagaaactataggcccagcgccgccgccgcgtttcctcttggaaaagttttctcgcggtttccaaactttgttaccgcggcctcggcgcgcgcggcagccccgcgccgggcccctcggccgccttccttccctggggcggcttgtctgggagccgctttcccgggaagtgattgtcgtccggctccgaggcgttcctgccccctcccccttcccggccgctgagacttcccgatggggcggcggggacgcgggctcggcgaaccgggaggctggagcccgggcttctcccatacagcttcgccgtaggtgggccacacccgtgtggacttttggcgtgaccgtccacttggactcggggattactcagctttcctgggtttcttgtcggttggacgcacttagctttcagccctagttttcaggagtggcattagagaggtttttttttttttttaattgttgttgacttttaaaggagcgtgtgtgtgcgtgcgagtgtgaagcacttgttggaaaaaatgttgcctgaatgaatgcctgacctttgcttggcagcagtggcttcccagtaatgcaggcggcggttggcccagttccaaggttgactccctcttacgtcctcttgcatcttggtgacatttttttggtgcgtgtgttttgtacagaatttacaattatttggaaaagagcgagatatgtcaagtctacgactaaattcggggcattttatatttatgatgaaggaaatgcttacatcattgttgggacaggataggcattttgtggagcgaatatttgtgtttagtcagcagtgatttttaaatactggacaggtgggtgttactttaaggaacggaatttataaatcgaattaattaggatgtgttattttgttttacaggaagaatgaagaatgagt

SEQ ID NO: 45011 - DNA, 760 bp, Homo sapiens
ataatgaatgaatgaatgaatgaatgaatgaatgaatgagagtactcggttttcttggcaagaacggttcttgggtctgcgatggggtgctggggaggtagagatgatgttaggaggtggtcctttgaaaagccccttaactgattgattgcatgccagtcccgaaggcatgtgtgactgcagcgttaaaactgtcagtgctggcattgtgttttgtgccaccgagtccatcggcctccaggacctcacaccgacatgctgtctggtcccctgcgtgagcgtccactgttctcacctcatcaagggacaggcccagcctttgcacagcacgttcttggtggttccagaatgtttcttgcatatcttcttgtttgaacctcactgcaagtccttgggctgggcttggactatgtcctggtacacagacgagagactcgcctcactgccctcctgtcacaggccagccggctgggctgagcgccaaccccagctgttctgcctgctgcccccttactgataactgccagaggacaacattatgtttcaagtcagtagctaatcatgagaggctggtagttggtacaaaataagaattttatttcataattaaagcaaagagctaggaccagtaatcagtcccttgggtatttactcagccctcacctgccatattctcccctcttttcttttgatgaaagtcaaaagaatactttaaaatacattgcctatttttactcctccaagcagccttggtacccta

SEQ ID NO: 45012 - DNA, 1079 bp, Homo sapiens
tgagagttatgtaaggaagaaattaagaaggggatagtagtgaaaaaatctgaagacagccacatagaggatgtggagaaggcagaggtacatcacaaagacaaattcaagcgaaatgctgaagggacaagtttattaagcaaagtggtgcctccctccccagaatgaaggcttagtttctgcagtactcaggatagctggtcagagtcagaggtcattttccattcgtcattatttgccatttgaaaaaagtaatcagactttgaatgtagcttaagagagctatgactatccaatttcctaggccaatctcggttaatatgctaatcagtttatcagatgcaaaaggcttgagcacctctcctgtcactataagagtgtggaaaaatgagctactagagacaagaggtcagacaagtcctaggggtcacatttgaacttttattcaaacactggcatctccagtgtgtgacctcatcccaatctccaaccttctattttctgggccttcagccagtggggctatacactcatttccatggccttagattttaaagggtcaaggtgcggtatctgaatcatccatgattacatcattaataataaaaacagcaccgtccactcagcctccaacgttctctgaaaaacaattcatgtccaaggtatcaatttattcctttgtttttcatgtattcattcaataattatttcctgagcacccacccaatactaggtcctatgctatatattagagagacagcagaataaagatagaaaagagatcttatcccctaagtactatctaataagggagattaacagtaaacaggtaaccaaccaaatatataactgcaaattgagatgaatgctatgaagatcaacaggatttttttttcatttaaaagatctgagagggattttggaaatatccagatgaattcatatcaatatgaatatatgctcagttgcaagtaatggaatcatgattaacattgatcttaaaaaacaaagacatttcattacctctcataagaaaaatctggaagtagatggttccaaaatcacgaaagtggctaaac

SEQ ID NO: 45013 - DNA, 2442 bp, Homo sapiens
aaatatattcctccaccatctctttttaaatccttgaacagcaattagtctatcagacacagttcaatgtgacagtaaatatttctaggggccaggaaagagaactaaggctcagggcctagacacagacccaggaatgaagttcttggaacgttaggaaggggaaaattagcctaggaagcctgaggccatgaagcaccaggacaagaggaaccctggcagaaggacaggtaagaaatagtgatcaggaggtaggagccatgtcaaatgcccacaggaggcaggaggcaagagagtgaggaggttcatctgtaagaaaacatgaatggtgagggctgtgaaaaatgccccttctaaaagtattccaccttaaatacagaaaaggcaaacaaaacatatggccagtttgtaactgctgaaatgatagttttacctattaacaaattatacctggctctgtctttgccccaactcatcccagtgtccagtgcttagaaacttgtccctcctggactcccagtgacagggcctgctcaggtggtgcccacagtgaggttgctgtggagcctggctgccctgcttcaacgaagacaggccaactggaatgaatgcatggtgctcttgggtctgccttggcattaagagctttggtagttatgggacttcaggaggggtgaaaaggacaggatgtcctccataggctcctgcctggaaacttcctgctccagggacttccagtcatacgtggacacaatggcagaaagccagaggctgccccggctggccatgccgcaagccctgggactctgctcctcacttggctatctttgttggctgggtgactctagccaaattcctttatgtttctgaatcttcatgcccttatgtgtcaactgaaaagaatttatcgtgtctgttttccctaatgtgctacattgttgtgaagaacaaatgaaaaaagaactgtgtcagtgctcagaagaaataaaaagtacaccagaaaaagcagtcccaaaaacaacccaaaaaggtaaatgtcaacccggatgaagcaaagacagcttatttgtcaagtcctacaggtaggtgttaagagtaaaaactcccggttatgctgagtttctgaagggcaggaaccaattattggtgcccacagctcaagctcagctcaaggcacacagtaggcctccataaaggtcagcttgaatgccagctccctcttccccagaccaaaaggaatacaaaaatatagaacaggaagcaatgccactcacctcgctggggcctccaagctcctaatagggctggtcagagctgaggctttacaggcccagttgccatgactactaaagccctctcctcctgcttctttattcaaaacccccgaacaagtcttggcaagatccctgccttacacaaatgagcatctatcctgtctccaggacttgaacggaaccagtaacaaataacgtgcacaaacctctctagggtgctgaaccctgaaacaacacttaatgttattgtgtttttaagggaaccaaaaatggagaccttttttttaaacagcaaaatacataatgagccattctggatcatagtcatatttatgtattttttagaaggactaaacaatgacaaactgagaaaaataggaatattctccaaatgtatttttactctgaatcacagagaatctagaatctgggccgggtcttagaagagttacccagcatggcttccaggcaagggtagaaatccccaagctgcatgaaagccgctcagaaaaaaagacgccagtttcccccagggaacagctaccctgacagctcccaccatacccttgcaccactaccccactaccctccaaaatctcatccacagcaccctaacccatgtctcctttccagtcctcaaggaggacaaactacagctggtgaccaaccattctacacagaattcacaagagtaacgctttccacagacaaggactatcaatgctacttagatttcctgtgttctagtgagagaggtaccttgaaccatcatcagcacaaggctcaaagtaaccacatttaggacatggtgagcctctttccataagtggctagtccacaagcatctcctgaggactgggcaagagtctgctcttttccaggcattccttctgccacagcttaccatgtgcccacaaagggccactgctgtgttgggcactgggaagtatactgggaagtgaacaagaccaatgcctgccattgagaagtatgacataaatggggagagaagtagcaacacttagatttccaagtccagagaacagctttcaagcaagcaatgaggaactccatatgaagcacctggagctcagcatataaaacaggcagacaagaagcagggaggccacttggcaggctgttatcattgtcctaatcagacataata

SEQ ID NO: 45014 - DNA, 671 bp, Homo sapiens
agagtgggagaagaggcagatggagcaacaggtacagtgcagagacggcagtcatataaacaactggtcctaagtccttgtccacctcccattgggggagcccaccctccttaaatataggcaactttaacaaaacgaggttattcacctgagcctcctttcacctgtcaaagtgtaatgacaatccaaattttctgccttttagtttaaagttttggatcgttggtattgagagacctactaagtagtgttgtgctttgctttcttcacttgtattgctggtttcactagaaggaattgcagcctttagcactcggatgacctaggcaattgttcagctggtggcagagggcacagactcaggaagatctggttccaggtccagttccaccacttaatagctctgagaccttgagcaaataacacctatgactcatctgcagaatgggcatcagagtacccacttcacagggctcacagggttcactgccaggaataagagatcatgcataggagatgctcagagctgacaccagagagttctcaataatgttctctgcctggctcttgcctctctgtgacttgttcagttttcccagctatgagaaaaagaccagggccatgccatgatagatgctcaaactgagtgttaatcggctctcaatacatac

SEQ ID NO: 45015 - DNA, 678 bp, Homo sapiens
agtatgtagcaaccactgagatgcatgaaaatgatacgtgtgcctagtttttatgtctactcctactaactatgcaaaactgaaactagttccttaaaaacaaactgctcctggacaccctacacagtcgctgccgcctccctgactctgcagacatcagtaacagagcatgtcatagggaataaaacacaatcataaggtaatgctacataaacgctagtgtgtttatggggaataaatgtcaaggtaaagcaggaatatctattttctatgtgggagatggtgattctgtgtgtcaatgccccattatactgaattgattttagttttgccaaatcactaaaatatttcacaatctccttttggaggctgtggctgtcataatgacagaatctgcaatgacctttcacaaggtctactttccaggcatctggacttcacaatctcctccattctaaggttccattttcccaggaaagaggcacagtagggcatggaaagctggccagttgtgattcattcccaatacgatctgccaagcaggcccatccatgctcttggtatcttgaaattccagagaagctagacttcaagtccttcccaagaccctaatgtcctgtcatttagtcccttctgaaagttgcttaaagtgacataagggaagcagctaatttacag

SEQ ID NO: 45016 - DNA, 1039 bp, Homo sapiens
gtctctacaaaaaaaaaaaaaaaatttttttttcattagcagggcatggtgatgcaactatggtctcaactactcaggaggctgaggtgggaggatggcttgagcccaggagttcagggctgcagtgagctatgatcacaccactgcactccaggttgggcaatagcgagacccctatctttaaaagcagatgcataaaaaattgttgagtggaagtgaaagcagcagaacctaatggcatacatatgtaaattactactttggaaagaagtgtgtgtggccacctctatgatcacatgtgaacttagaattatggaaaactgtgctcaatggaatctttcaccctgaaatgttaaatatctgagaaaacactttaaaatacattattttcagcacagaacctactcccttatcagctgacttgttctgatctcctgaatggctcagaggccttgttcttgttcagcaaacccaagatcagaccatacactcatcagccaaaggaaacagagaacacatggaaaaagccgcagtcttaaagtccaacttagcaacttgaccctgtaagggcagtttccaggctgcataatcagaatggctggctgcccagacaggcggccaagatggaagtgtcaaaacaaaaaagtatggaaaagttcacctggcccaacttcaaagccaaagctccaaaaaggtaggagtttaacaggcacttactggccagcaaggtgcctgttaagaagggtagcagtacactaatccttctcaaactcttcacaaaaaccaaagagaagggaaacacttcctaattcattctatgaagtcagcattaccctgaaaccaaagcaagacaaagacactataagaagactccagaccaatatctcttataatatacatgcaaaaaatcctgaacaaaatactagcaagccaaaattcagcagcatattaagagaattatacaacatgatcaagtggtgttttatcccaggaatacaagagtggctcaacatatgaaatgcaatcaatgtaatacacc

SEQ ID NO: 45017 - DNA, 1071 bp, Homo sapiens
ttctcacaggatctggccatttaaaaatgtgcagcatgtcccccttgctctctttctcctgctccagacatgtaagacgtgccagcttccccttcgccttccgccatgatggtaagtttcctgaggccttcccagaagcagaagtctgtacagcctgcagaaccatgagctaattaaacctcttttctttataaattacccattctcaggtatttgtttataactgtatgagaacagactaatacagcttccaagcataagtattctctgataagcacaatatataggaagacccaaagtggcagtggtatatagtgtcctggaggaagcaaaagcaagaaataagagggcgcttctgtaataattctggagcacagtcacaggaaacaggggaagcaacaaaactaggtaaaaaagatactgcagaggctcgctaaaaagaaaaagacaatggcattttcttgaatgtactaattcctattgtttaccaattcagattggccttccctccaaatagtgagttttttttaccttatttgtttcatacagagaagtgaggcatggtctatagtcatagtgcttggatttttttaaaaactcaacttgagatcaaaataatgggattggctccaggggctttttcctcactcccttgctacatggaaccagttgtacatctcaaagagagagacagtcaacttgagcacaaaatctgggtcagtgtatgtgactgtgcctccgtgactttgcacaaggaccagaaatgagcatacaaatcagaggaaagcagtgacaaaagtcaacattcccttgatgagctaattgcttcatgtctggctgaagagcagaaagcaagagataaggagaacatactatctgagggaccaggcaggctctggactagccagccctaccccaataaaatcccctcatcagacactgcccccgaaacaaggcctgctggcttgagcacctgacaagagagaacctgagaaagataagcactaagctgagtaaggaaggagatggcagagaagcagcaaagttccttgctactcacaacttttagtt

SEQ ID NO: 45018 - DNA, 1565 bp, Homo sapiens
tccgcctcaaaaaaaaaaaaaaaaaaaaaaaactgtttataaacacatcactttcttctcttagcaaatatgtaagtttcattctcctcctgtctacttagtttgggttaacttaacccccgccccatctctcagatcatgtttttatttaggtttattgaggtgggaaagccaactgaactttaaacgaagccaggcatttaagaatattagaaaactgatcttacatatataggtagtcaaatatttttaaaagacatcaaatggcattctaattcctccggtgcaaagaaagccccagcctcacacgtgttagcatttcctgattcctggcttttcccactcagagccccattccaggggctcatatgtcaagtcattctctcctgacttctgaagcagggattttcaaagccaggattccgggaccacctgaatgagaaccccctggggtacagctgcccacgcaccatcttatcggaaatcccagggaatggagcccaaggcttatgcacaaagcccctagacgatccgagagataacactaaccagtctgtaacctctaaaggcaaattttccaggacaaagaaaaacaagcaataagagagtgacaataattccacatgggaagagacacacgggtctcggagatcaacaccaaaccaccccttcttcggacagatacggaaacttaggctgggagaatgaaacaggcaagggcactaaaaacaggtgcggagccaaagccaatctcaaatttccacggccccatctcctgccaataaagaggtgaatggagacattctgagtgggaaagataagaaaggtaggccttcggcagggagccccgggcccacttggacgtcccgctttggagacactagtgaggatgtgtgggtccccagaacactgctgggaaggcgccgaggccgccggcaggaggaggcccaggaagcgccctgagccccccgcccagctccagggccgggcggccctcaccgcccctaccttcggcctccggcagccgagtggcagacacaactcccacaattccaggcggccgcggcggcgaccagctccccctgcgcaaacgcggcggcgaccgtctgagccggtgagctggcagctgtcacgccgctcgcggcctcgcccaatcgcgggccgccagaccagcgcgcggcgccccccgccccgcaccgaggtgggagccccgcccctagccccgccctctgcagactcttgcacgagctgcccccgtgcccctccccttggggggagggagggctgaagagatagcttcacgcctgcttttgcttccaggctggaactgcgaagtttcctgtctgattttccaacaatgtaatttctttctagcggaaggaccctcagaaagcaatcagaggggtgcggagtaaaaataaatcaagttcttgtgactcagtttgggacagaagccgagagtctccagcaataaaatttctcgcaaattcatgcaaaataggacacctttaagccactcactttatatacttgtgtagattttttacaaggaccagttattttaa

SEQ ID NO: 45019 - DNA, 1697 bp, Homo sapiens
aggaatttgggggaattagagaatggagttgggaatcactgcttgtaggccttccactctggaccccagcagaatcatatggactctagccactgggagagggaagttttagtgttccaaagaaatcctggtagccttgcaggcagtctgtcctgaccaaggactctgcctgactgtgccatggtgcagggcaagtctagcagagaaagccagtgttcttcagttactgcagctcggcgaagaatcccactgcagggcactagggaggccggtcctgcagaggtcagcagtaggagtgactggcttaatctattcgaaaacctcctggaaagatcccgaagaccgtggaccaaggtgacctgcgtgggtgagcgatccattagccgaatgacagcgctgccgcagaaagccagaaaaaggatatgcgtgggaagcgcaaaagcgtgggctgggcctgcagcaacggaaaggcgccacgctcgtgagcggaaccagcgttccgggggcgctcagtgtgggcaggcaggaagcctggctccactaggacacacagattctctcctgagcagctgcgaactatgcgccccttctacccttaagagatgggatgggagtccaacaaacccagccattgctcagaccccagcccttctctcctctaagaagcaggttcacctctgccaccgcactcgcatttttttttttttttaaagcccggcctttcctaggcggggtcaagggccccgcccaccgaagccacgcccagtagccgccccggggcggggttcccctcggctcccggctgccctttcccctccggcctctgccggtgctgctgcgccctgcggagctccgaacacgtgcgcgtgagtaaggacccagaggggagagtccttggaggtttcccagcctggggaaagaagcagtgcagggtggcttctgccggggcacgggacgaaattggggttcgtcccctcgtgatcccgagcttggagggcatctgaaagagacttgggcctcggagtcgtcccctgtttttctaccatccctcttccctcttctccctagggagtcccatagagcctgactccgagagcctcgatctcccagggccagaggcagggactttggaaggtttgtgaggaacaaatgtccggtggaactgagtcagcccctttaacccgagccttgaaaggggcaggctatttttagatctgtttttagacccagcgaacaatgaaccctctctactcattttcctgttcctctaaattatttggaggaagtcaggagtgaaatttggggatggctggaaaaaggtatgatcttagccttacataaattataatggtgactgtgaggccgggcgcgtggctcacgcctgtaatctcagcactttgggaggccgaggcgggcggatgacgaggtcaagagaagaagaccatcctggccaacatggtgaaaccccgtctctactaaaaatacaaaacttagctgggcgtggtgtcgcacgcctgaagtcgggaggctgaggcaggagaatcgcttgaacccgggaggcagagattgcagtgagccgagatagcaccactgcattccaacctggtaacagagcaagactccgtctaaaaaaaaatggtgactgtgtaggaatatttattatcatttgtgcaaacattttggttatttttattttt

SEQ ID NO: 45020 - DNA, 2204 bp, Homo sapiens
taaataaataaacatacctaaataaaaaccagccaaaatggtatcgttttccctttgtggccccaatatctggcgctttccaccattccttggcaaacagaacaaccagagagcataaaagtcgagtctaagccagggactctcgcgaatcccttctaaggcataccctatttaaactttgtattatgctattcaggaggttgacaaacagccttttcgggaatgggactcgaactcgtaagccacgtctgttcctccatttcccgcctcagctggatgacggagagggatctccgggattaaagaacaacgaccgcaggcgagtgcacgagcgaggtgcgcgcgctgagtagggggaggggcctggcgcgcgccgaaccagatcgagggggtgggggcgagctctctcgcgagagtgggtttgttcttgggctgcagccgctgccgccgcttctcgccagcgccgttgctgcgggggattgtgggagtctccgcgtcccgctcgctgggagagaggtacctctccttttccctctccctttccctaaggtaggcgtgaagcgggtaagagtcggggtcgggtggctgggggttctccgtgtccgccgggaggggacaacgacggcgacaggggctgcggggagccggcggcgcgcctttcttgctcgctcccgctctgcctccctccgcgttgcgtatgtgagccgcctgatcggcggccgccatgttaggagcgcagtggcggcgcaaccagccttctagggcggcggaggtgagcggtccgggagggaaacacgcggccggccaagggcccagggtgcggcgggagattttgggtgaagaggtgcgctgaccggccgagcttcctgcgcgtcctgggctcgttgtgggcgggggcgggacgactagcccgttacacgcgggccgcggcgctgagggggagggaggagctcgctcgaggcctgagggacagactgtacactgggggcttgccgtttgaggaggatggttaagatatctaagtccttgggtagcgccagtgccaaataacccgttcgcctttttttctctgaaaatgttcccccaaaatggaggatttcgcagactctgaagagcctgcttgtttgagcagcgtttctttcttttcccggtgtctcggccttcacgccgctccttgcccatcgcctcagagcgccccctaagactcccggcccacacgcgcgcgcgcgcgcggcgttagctggacatcagaaacaattcctccccgccccccatcgcgtaaaaatggccgaaaaatgaaacgttaacgcttgtttttcgtactgcgtcgtggaacaagccgcctgcagtacagtgcgaggcgggtgatttgcacttgtttagtcaagtcacctcacatcctttttctctttatcaaaatagtattagtccaggttcctccagagaggatcgtgtggtgtgggaccttccggtttccagacaaagggttttggagtaccgtggtgtagtcgccgcatcgttctttgcatttcgagctctgtgccatgttctgtgttcggcatttaccgtggatgaatatcccctaggtgtttatcctgctctgtggccctgttctgtggaatattcctattggatcagttacagttttttagccagatatttctagaacggttatggtggttctgaaatggctagtctttcgggcgcgctggaataatgtgaagaatcgttgatttcgtaggtaggggtcacgagattttgtattggtactgcgttctgtgttttaaaccttggcttaagatttctgaatagtcggtaaaatacatttttctcccagggaaatctaaacagttgactatgcggacaaaaatgatgtttcaggctattttaataaatgtttaaaatttccctttaaaaacatttctttactaatggctcagtcatctacgcagtctatcgacgtttttcacagtattgttttaaaaatcaagaaaggcttgacattttcgttgcaaaaacgctctggatgatgccttttccacttaaatagaatgtttttgcaaactcgaaattaaacaacattaaaatactgcatgaagtttcttggttatgtaagatttggaaaagatcatttagccagatgtgtgttgaagtgctttaaatttgtatttcttcctttgcacttaacagtatatacttagaac

SEQ ID NO: 45021 - DNA, 859 bp, Homo sapiens
cgaactcctgacctcaagtgatcagcccgccttggccttgcaaagttctgggattataggtgtgagccactgagccgggctagtaatttttacaactaggaattctccctcaggtggggcagggtcacatgagatctcaggttttcacaagagggctgggatcgacaaagactgaaatactataaatctagcaggagtgggaatttccacttgctggcagcccaggctgagaacaaacccatgagtagcacaaaccaagttatgttccaaaatctcacaggagagggcactgagggaaggtggagtccctagggaagactacctggaagagacactgtttgggcttggctctacaaagggcacacacagtctggaagagaaaccttgattgggcttggctgtacaaagggcacacacagtgggcacagtagagtgggatgagccataggtgtggcgtaggactatgtttctggtgtccgattacctcgcaccactgccaagacacacatggcagccagcccagagctccctctagcagaccagtcagcctgcccactacatcccaaccttcagtgccttctgtacttctccaagccccctcctttttcctaggcctcacctactctccctcatcagtaaaccctcccaataactccagcccggcttccttgacttcattgcttgcttaaatctagttttaccacctatcttgtgccaggagctcctctaaacaaattgttactgacttacactttttggcatatcctcctcagtgtctgattcagggccaagctggtaagctctagcagcatgtgctgaactaaacggactgccctctaaggttgggctctggataggt

SEQ ID NO: 45022 - DNA, 1276 bp, Homo sapiens
ctgctggccagggaggggctggagtccccggggagtgtgcagagtgagggcggggaggccctgggggacccacctggaagcccagcaggatgcacaggtaccaaggtggcacgtcctcgatcttgtacaacatgtcaaacttaggctctgtgggtagcggggtcgaggggtccctggtggtttcatgctggaggcagcagagataagtagcttagggtgaagtgatggggacaggcaaaatccattctgccccagaatcaatcaggcagcccaagtggcttgtcagcaactgagagcggggttcccgccctccccaacagtccatccacccgggtgccacttggcctggccacagttttctcccactttgcattgcttcccgcagggatgagtctactgtgccagcttctagagccctcaggacctgccattttagccagggaagtggacccttaagtcagaagtcttggagaccacaggagagggggccaagagggctcaagactgtggacaagtccaatccggtcccacctctgccccctggagatccttggggtgtcactggccgggagattaggcctctcctgaaccccaacctggagtcagccagtcccaaagctgcaggctccttcacccccacctccacccatcccccagttgccacattcaatttgggacagtcactcttatcaagttcatcagaacgtttatctctggcctccaggaagaaggcctgcacaggccctccagccccccaccccccctgccccccctagcccccacccccagcccccagcacctgtgtccggccctcgaggtcctcctgggccctcatctttggggcacaggtttgagcagttcctgaggagaagaggggatgacttgacaaaggccaaggaggaggactttactccacatatcaggcattgtttgaagtaaatctgtaaccagatgcccagctctggattgcgaaaggggggcccgggcagaggtaatgtattaactctcactaggacagtaaaagccacccaagcctctgccacatgtgcccttccctgcccacatctgcgcctgggcgctggacctgttcttgtttcccaagagagggccagagtcgagggggtgaggaccagaagtttaccaagccccaggtgagcggagaaagagggagtggaaacaggcacttattatgtaaccccctgtatgaggcccttccccactgattaataactagttcatcattatcatcatcatcatagtcattctcgttattgag

SEQ ID NO: 45023 - DNA, 1203 bp, Homo sapiens
aatggtgtccataatagaagggatgacagtttctctgcctgcacaggagggccatgggaactcagtgacgtcatctccactgaaaatggggaaactgaggctcagggactctctaccagctcttgcagcaaccaggcaaacggaagggagaatatggcttgattttagttaaaattccctggttcaggaaggtccgcccctttttggctccacccctaccgactgagcccggcctcctcctgatgacgccatgggccatgcgttctagccacggcccccgcatcggaacaggttctggccccgcccccaccagtgaggcatccggccccgcctctccccaaactcctctggctgcataccacgttcctcagctggtggattagttcctcctgagactcaatcacgtcccgcagttgatctaaagcgagacacacagatcctgaccccgccttcgaccacccgaggggcgtcgccatcttccgcccccgccagctagttggaaatggctgcctcgggggtgatcctcgccgtcgcccaccaatgagaatgcgacgccacagagcaccctggcaacggggggcggggacttcctatgttagcggggcgaggggccgcctcttaaaggagccgcctggagcggggaaactgctgacaacccttaaggcatttaagtttacaggaaattgcgcttttattgcgtcttctgtttctcacgcagtcctgagaagccggcagggcccggcttgtactttccttgcctgcgagcaggcaacactcaaaacagcagccctcagccttcacccagggcctgttaaactgcatgaccacgaagcaagagccagcataggcaactcctgcatctttagcttctcatgcctctttctccaaatctttatcctaatctccaaatttcctccattgtatgagattccagcctcctggaacacacttagtacttaggggtcctaagcctaagcacggaagatagacgaagataaaaaatgagaatggctacacctgagatcaaagtcttcatactctgataccaggctctgggcactagagtctgcactagagtcatgtgccaccacccgaggaggaggaccctgaagagattaggaggactgaagagggcttgaaggaggagagtttagtaaaatgaagtcagggaaggatacggtgattacgcacactcaccaagtc

SEQ ID NO: 45024 - DNA, 1142 bp, Homo sapiens
tctaagtcggcctggctaactccgacgcatccttcttgtcaccatttgtaacactttctgcaagaaacctcccttgacagccagtctgcgttaggtaccttgtaagtgtgctctccaaatccctgaccttgctgtgtagcccaggcgttttgtattattcgcccgttttgtaattggctgttcagtcgtcaaactctctcagtgggctgcgagttttgtgagctaagggacccatgtcagtcaaatccccactgcagaatcagcattaggcggggcacacaataggtattggatcaatattttttgcctgactgtagggtggaaaaggctggtcctgatgccggctggagcgacatgatcaaacagggactgaaggtcaggtggcccagttaggcgaaagataagggccaggttagcaagctgcggagagaccgcagcaccccacgggccctccagtcaccttggcatgggcggggcctgacagctgcgggccctgggcggggcacgggcgggggcggggctgggggccggaggcaacaagtcgtcaccggtgactctgggctcgcggtcggtccccagcttccctaccccatccgcaaccctactcaggctcagcatcttttcacaggcctctatccatcacctcagacccaggatctcagcccttgtgcgtcttcaggatcctcatccctgatctctcccgaaggccgccctatccctccttcaggcggggacctagtaccttccgtccagcgctccccgctgcccagagtcgccgccatatcggttcccaatcagcaggtccgccgagcctcccccgtgcccgaggctgaaagagaagggggcgcggagcgcggggcacgctggtcattgtagtccagtccatatgagctcccggggcactggactacaactcccggcaggctctgcgccagaggccgtgggagacgcagagaagtgctcgaccttcgtcaggagatctgtggaagagtgctgctgccagctgccagctgcctgcagcacggctcttggcttttcctcatttgtagagttgggatagtggcttcggccctgcctaaccctagggacatccaaggaggggcgactgaagtcctgcctggaaagggcttcgcaaactatag

SEQ ID NO: 45025 - DNA, 1388 bp, Homo sapiens
gtccaggcctcaaaggctggtgggtcagaccgagaagtttgatctttatatgaaaggaaggctgctgaagatcatcaatcctaggaacaacattatctttacaaatacccttcctcagaatcgcttgaacccgggaggcagatgttgcagtgagccgagacagtgctactgcactccagcctgggcgacagagcgagactccgtctcaaaaaaataaataaataaataaataaaataaataaataaatttccttcctccagctgcagggcaaaaaatgggttgaagagccggactggtggtaactggtgtggccatccagcctggagtcgatgttggcatgaatgaagacacaggcagttgggacagagagaagcgagtgggatgtggaggtgacccgatgaaatactggcccggagatatgaggcatgaggcggggagcacgagggtgtcgaagggccaaaatgtggtaagagaagccggaggagtgtgaggacaggtggaagggatccaatgtgggatctaaggggtctgagaccaccgtggccgcgggaggcaggagaaggtaccgcagagctcccggtgatgtgtcaggaggccctacactcgcgcgtgcactggctcgcagtttggacagagaccctacaggccaggccgcagctgcgcccagaccacccccagcgggtgaagactgccgcggcggcgcagttcccggcatgcctccggccggtgacttcatccggcccggggccaaggcccggcctccgctagagggcgctgctctcagcagccgcgccgcccggatggactcgcgccagagtaggacaagagaggcaggcggcggctgctccgtgcggctcccacgcctctcgggcggcaggtcctgcctcggacctgggaccactggctggcgcctgtggctcacatctccacgcctttgcccgctcctcccaggagcccgagtcagaaacctgtgcttcaccctcgagagcgctgccatcctccccctcaaccagacgggcatggcgtctggttgtccgtcctgtcttctcatcgtctcagagcccttccctgacccctaccctctctcagaccaacaggatgatgacaggaagaggatccaggaccaactcctagcggtgaccttgagaaaacaatctcataccccagtttcccttacaatgcaatggaaataatactaacaaccctggaagagtgttggaaggactaaacgaaatcatctttttcagtactaagcagaggctcagtgagcatcagcgtttttttgtttgtttgtttgttttcttgaaactggttggagcccaggctggagtgcagtggcatgatcttggcccacttgagcctcaattgcctgggctcaagccattct

SEQ ID NO: 45026 - DNA, 2512 bp, Homo sapiens
cgtgagtgaccgtgcccggcctaatttttgtatttttagtagagatggggtttcaccatgttggccaggctggtctcgaactcttgacctcaggtgatgcgccagcctcagcctcccaaagtgctgagattacaggggtgagtcaccgcgcccagccgttggttttaactatttggggcacacactgtgattttttttctgacgcagctggtacagtgcttgcttgtaacaatttgcaattcactaagctgagcagagtctggacacctcgaaggcacacatacatgccagtggctgagaacacaacattcaaatcctctccatctggggccttggtccggaaggccaatctcactgcaacccgagcggctatgagacatctccctcgtggcaggtgcccgagctgtagccacgcggcctctggaaagagatgtgctaagtcccaggacttcagaagagctctgtgaccttggccaagtcccttcctccttcaggagcgctgcagtgggcctaagtgcctcctcccgggactagtacggggacggtcgtgagatctggacaacattcgccttttaatatttattgatcttttgtgacacgcgcgtgggtttccatcagcaatgaagtcaacggtcgcggcgctggagcctgcagaactcgcgctctagatctcgcgagatctccgcccagggcttcgcagcgtcacgccctccggggccgtggcggcgacggcggtgcgtagcttactcacaggggcggcccgtatccctccgccgccggcgcggctcggccctccctcccctggcccgccaatccccgcgcctcccgacctgcccctcggtcgggcccaccccgtgctccgacggccccaccccggcggcgcagcccgcccgcccgcgcgtccctcggtccacctgcagcagggaggaagacaggcaatccctccggctgtccgaccaagagaggccggccgagcccgaggcttgggcttttgctttctggcggagggatctgcggcggtttaggaggcggcgctgatcctgggaggaagaggcagctacggcggcggcggcggtggcggctagggcggcggcgaataaaggggccgccgccgggtgatgcggtgaccgctgcggcaggcccaggagctgagtgggccccggccctcagcccgtcccgccggacccgctttcctcaactctccatcttctcctgccgaccgagatcgccgaggcggcctcaggctccctagccccttccccgtcccttccccgcccccgtccccgccccgggggccgccgccacccgcctcccaccatggctctgaagagaatccacaaggtaagcggccggaggtcggctgcgctgctggccagctgagcaggctgcggcctgcacttcccgccgtagtctccgtcgggctcgcggcctccttggatcttgctgccggtgctggcccctcggggcggcctccataccccactcccagtgatggcgcccgtggaggccccggcgcgcagcccgcgcttaggccggaggtgctctcgcggcctcagcgttcctccccggctgcccttccaggcccgcatggtgtggactcttagggcttctctccagtctgggactgccgctgcacttgagggccattgtcgggccaggatggcggggttggggccgaggggggcgctggggcgttgggcggccccttcgacagaggtcgaaagggcttctcgccccatttctgttccctcctcccacacctgccctagctccctccacaaaaccgcctgagctcgggctgacagaggaagccgttttgcccgatccacaagtatatcctgagttcacttacctcttgggtggcagcacacatcggtccaccctgcttgtccagaaactgttaagagttggaagttcagaagaaaaaaaaaaggtgacttaatgagggaggagggaagtagagggagaatcattttattccttgaggttgctgtatgtagttagaaactaacacttccgttttgcaggattggatctaatagaaaagctgtacattggcaaaggtagaggtagaaacctgaacattgaaaaccaccagagaaattatacaaaagttcctttcacagcctcttcgcaaaatggacttgacgctattaggtgatatgtttaccgagactcttaactgggaaggggttttactagattttgtattaaaaaggatttctttgctctttaaagtgaagggttatttagttatcaataaggaggttttcctaataatacatctagactataagattggcttaaaatttattttttttccctttctgatgttgtaacctcttagtgccactttcatgttttttttcttagaagtagggaggcaccactattaatttctgtttggtgtttcacttggctactcagattggctatattaaaccggtagctacttttttcttcaatacatctttttccttttagtggagaacggggtcttgccgtgttgtcc

SEQ ID NO: 45027 - DNA, 2483 bp, Homo sapiens
tttgacaatgttctttgaggtagtggtgatggatgatatgactatatgacttttttgctttgttgtgtgactgttgtgcacccaaagtatgtaactccctactgctgtgtggttgagaccagctactatatgactcattttgtgtcccggtgatattgtaggtgtctagtgtagggacatctgttgtggtatggtgaactggttgtgaatagtgtgactgtatgttgtatcattaggtgtgtctgaccctgttgtgtcctgttctgacttgtgtcagagactgttgtggtgtcactccgtgtggtgagcgtgcctcctttgtggtgtgggtggcctatggtggtgcttcctttcacaaattgtgtgtccgtgtgacacccccccccccctcagccgctgtgcccctttgcgggtcagtgtgttgtttgacctcggccgcgggtgcccccacccctgccggccccgccgcccctcccccgcaccgtccgcccgcgccgcgcggcgatcgatcgccattgattgtccctgacgagctgctccactttccagccaatgtcaggaggggggatctccgccgccctggcggtgtcatttccacacactccctgggctgccgccagcgcgggcgcctcgaagagccggcctggatcgcccggagctcgggctggaccgcccacaccgcgcgaggaagcccccgatggcgtggcccgaccccagtctgccggcctgcccgccctaggcctctgcacccaagcccccttcccagcgctggtggatgttgtcaccacaggagtttaagctgggccgggtatggggagggacgctgtgtcgggtgcgccctgcgcttgccctggtgggggcgcggggctgtttccggcgggcggaggcgccagcaggccaactttgccgcggcccaaacagatgctaatgattttccgggaggcgccggttatctctggccccagccggccggtgtgctgggactgggctcccggcacagacaccacctcgccccccaccctcaccctcctgagccccacctaataaccacttgtccccgagtggacgggttgggggggcgtcggggggagtccgcaggctgccccgggtgtcctggaactgttgctgtgtgggattatttgcgcctcctccacccaggatgctaccgtctttctgagcacttcgcaaagccaaacacacacccgagcacgggaaactgaggttcatagaagctcggcccaaggtcatgccgacccattccctgctcagctgagtgggtcaccctctgaaaaccatcccgtcggaggacccgcagccccctgtccccttctcgctcaggggcctgagccagtttccagactccccggttggaagtgctgacgtggctctgggcagctgtctggggccgggaagcggggcagatgtcacgcagcccaggggaggaggcggctccgcggggaggacaggctgggcctcaggcctggcaagactgcctcctccccctagggcctggctctgcccgcctggggctggggcacagccatgggccaggctgacctgcttccaagtctagctccagctcttcggtgtggctacccgcaagtgctagagcctctctcagcccctttctctcctgctagagaataacagcacctgctttgagtgggtgtggtcctctagtgaaagaggtgtgcaaagcccagcccagtgccgggcacactgttcctgctcaataaatatcagctgctaatattactgttgttgtctctgcaagtaggaacttggtgtgtctaaatgcaaaactgaatcctgagggtgcaaaccagcttcagaggtcgttccagccagcctcctgcctcactgcccctggccctctgcatttctcatgcctgtctagctttgtgccttcctgctgcactgtcagcccctcttggctttgcctactgccaagctgacccctcctccgtctctaatccatgtggttccctcctatctggcggccacattgggtccctcgagcagcacagccccctgggaacagcaatcgatggggcggaacagcctccctgacagatggacccacggaggctgggctgcttcagcagagctccctaggaaaccggagacaggagccgagccaccatggctgcctcctaaatagaaatgaaaggcagtgggcagatgaggaggaggaggaggccagagcttccaaccagccccctggaggggctggagagcccctacccttttccatagtcctaaaatccccgtgtggggagggctttgtagagtatgcctggaggtgggacttgtgagcccctctccacacgcaggtgaagagctttgccaggccctccatcgtggacaccttttctaataagcccagaggctggtgtgtgggtagggggtgcaggcaggcagcttaccacattcctagggccacaaagggccttggaagtcagaatggcagaagggccttctct

SEQ ID NO: 45028 - DNA, 2077 bp, Homo sapiens
gacctagcatgctggtgaagggatcacttaacacagtgcctctacaaagggtcctgtcccaattctgaacagtatctagttcttttcctcatctcattcaccttctagtcctggtgacgcctttgaggtggagtgagtgggtctggcataattatctccaggaggagaaaggactggtgggattgggacttgcccaggggttgccccaggaagcccacccagaggcctgcctctcctgagaggcaaagggcagggatgcaagacggctggatggcagacgaggatgaaaagcttccggattcgaaggaagcagcgtccccacagaaagccctcctgctcccctccctgttgctagctgggggaaggacttgcccaggtgctgggacgtctggctctgacctctaacctttgacttctgggctgggatgggcattctcaggaccagagtcatgactgggggtggggcccagggcacccagcggcggctgggctctgggagttaacgatttacgaggggccctttcttgaggcctccctcctcccaggcctggcaggcaacccgtgactgcccaggcggctagacacagaaccagtctcaccagttcaaagagcagttcatcccgggcccacccccaagcactgtctgagcaccccattccttggagtctgaagggaagggcagagtagggggtggtagctggggtcttggggccccaggtctgaagagaaagaggctgggccattttcggaagtctcagtgcgggccatttctgaccctgcactgccctccaggaccagatttgtagagaggaggctgagccccaccctgcctcctccagcaggcctcccccacaccaccacaccctagccttcaggctttgggtcgggcagggcactttcagggcaggctggcttctcctgcccagggcacccctcctccaggtgcagggctccagattgggacactgtgcctctgcctcccctaaggccccattcagttacctccccacctctcagcaatgctctccctccctcttcctgaagtgtggcagggaggctggagccacagctttggcctctgggagcactcagtcccactcccataggacagagttgaaccatgattgtgtctagagaagccaagggttattgtcaggggcacaacagcccccaaactgtccctctccccatcaatatcccatatacaggctgagttccctgtgcctcactgagaacagggctgtatctggttgtctatggcgtgtatgtagctgtgcctgggcaatgggaaatatagcttgcttcctgctttctctcagcctctgtccccagagtcattttgttctgggactggagtcttccttctgtcctcatcccttcccctctgtttacacaggtcaaggccaggcattggccaccaaactgacttctcaggaatgggcaagcctgggttacttgagagacttggctttttgaattttcatttcacagctctctgctccttcagacgtcatgggggtggggtggggaggacctaaagtccagtggtcagtgcgtgagggcccagacccaaaggcccggggccacagtctggtgcggttaggctcctccctgcctctgcccgtgtttgcacccccaggcctgccctgggattttggctgaggtcacagtccagcatgaccccactgaacactatcctgtgccctgccccagcaggcagggtttcaaatgcctttgctcccatcctttgtgatacaggtgacagaactggggcccaaagaagggtaaaccttagactgagttccaaattggccatctttattggagatcctaactcccacactcctctccatgtggccatttccagtcactggatgtttaatcaatgacagatattagcagataaatggcagtcatggaaaatgcctcagacaaggcatggattgaaatcctggttttgctactttgtaacctcacacaggtgtccaagcctgtggatttaataagcctatgttcaaaaagcaattagcatggtccctgacaagcaagagctcagaaagattctggctacaattgt

SEQ ID NO: 45029 - DNA, 3394 bp, Homo sapiens
ctgggcgcctactctggcaaggctgagttttccttctgtctttcaatcagtacctattgagcgctgctgttccaagcattgtttcgggttttgagtgcgtaggccatggtctcagggcaccaaatgtacgtagtcgttttagccccgggactcaagagttgaggctgatgcctgcctgagagataaaatatcctttctcggatcagtttcctcacctgagaaatgggaacgggaatctccgccccttttctcccggggccctagtgcccactgaatccattaaggagctcttggaagggtggggtcttggaacacgcgtctacctcccaggaccctcgactaggaatctctggcccgccgcgcacctgagctggggggcgcggccaaattctccctcccggtcctcgaagcttctggccccgctctagagggggcagaaagatagcagatttccccggaggtgcgtctctaaacccagaccgcctcaccaaagcggggaggtcgtccttttttttttttttttgtaaagttgcgggaaataggcgaagacggggcgcgcaagggagctgagcctgggtggaccgcgtcagggcgcggggagctcgaggcgcagcggctgcagctccggcctcagagcccgcggcgtccaagtggcccgagctgcgctgggagggaggcggcgggaggagggaggggagccgaggtggagggggttggggggaggagggagcggcgagtccggtccgggttttgccggcagcccccgggcagcgttcatagctcctgcccgggcgggcgcgcggcggcggcggcagaggcggctgagcctgagcggggatgtagaggcggcggcagcagaggcggcactggcggcaagagcagacgcccgagccgagcgagaagagcggcagagccttatcccctgaagccgggccccgcgtcccagccctgcccagcccgcgcccagccatgcgcgccgcctgctgagtccgggcgccgcacgctgagccctccgcccgcgagccgcgctcagctcgggggtgattagttgctttttgttgttttttaatttgggccgcggggagggggaggaggggcaggtgctgcaggctcccccccctccccgcctcgggccagccgcggcggcgcgactcgggctccggacccgggcactgctggcggctggagcggagcgcaccgcggcggtggtgcccagagcggagcgcagctccctgccccgcccctccccctcggcctcgcggcgacggcggcggtggcggcttggacgactcggagagccggtaggtgtcgggccacggccctccctcgaccccccccggaggccggccccctccccttccccgcctacctccctctcctcccccggggttcggtgcgcggccggggccggagttcgctgcaagtcggcggaaagtttggctgcgcgggttcccccgaagttcaggtgcggagagccggggacggggaaggaggggtccgtatttgggaggggcggggggcgcccgcaccgtaagccgcggagccccggagcctgggagacctagcgccggtgatcgcttggtggccgctgctatacccaagcctccctaagccgcagtatgctcggtcgcagatcactgagttcagacaaaaagaggggttttagggtctgggacggcggcttgggcgccgtggagtggggctgggacgctccttgcggggtgccgcccccctcccccccactactccagttcgcgggcgctggggcagcgggcgcccggggtcctcacctcttggcgttgggcgggcgctcagcctgcgggggcggctgcttgtagatctctggcgcgcactccccccatcagaccccgctcgcagccctgtgttgaggggcgacgttaactgctctgggcgccctcgaccacgcgtggctgagcctcccccaccacttggaagaagcggcggctacttctgcatttttcctccggctcctcgcccccgctgcccgcggggtgcccggcgggctgatgaagtttgaccttttttttccatcaaagtatctcccccaccaccacggtgccccgcggcccctccctccctcctttcccagccttggggagtcttttgagctgtctcccgagccccgcgtgggccacgcagcgtgcagagcctgggagggagaatgggggtgttcctctagctgcggaactgtggggggcgtacgtccccggcgcctgccacgctgcactggccccaaatttacccatgaagttcggcccgacccccctccccttcgcttccccggagcggagtgaggggctgaaccgccgcgagaggaatgtgttaattttctggctgggggaagttgtcctcgcccggaatgggctgctttccggcggggagcgcggggtgcgcctggctttgtttatttgtaggatcgacggaaagcgagtgaccccggtttttaaatggggggccaccttcgggacctgtcagaagagctgaaacgcccaaagtgggagcaagatctctttttgttcttttttcccccccgggaatctgaaggggtgcgcggagttgggctggtgcctcgggctgcaaggaagcaccagtaaatttggggggttctgtagtgactcattcggaaagacccgctccctgaagtctcccgcgacgggggtctgaaggtttggcaaccgcgccctcctttgccccctggactttgggtggtctgagagtcgcgccttcggatggggggggagctaagggggtgaccagcggaccagactcctgacccccacctttcctcgcgcggcgggcgctgtttggagcccttggatttgtggtgggccctgtcccccccacccccgcattttctttggaagcgttggggagggggcgtgtgtgagatcgctcggccctcgcccccgccggagccgccccagggccgccggcaaacagagtccctttcaagttttccgctggggccgcctggcgggggctgcgagcgcggtcgctgcggacttgtttggagcgcgatttgaacgcccggctccacctcagctgccccaggccgcggggtggggggcgtctgtcctttgcagttgggagtatttaaattagacgtcttgggggacctactggcctaagcttcacctgatccccctcctgaaagatgcccgtgccttggtttccaaccgccactagaaaaccgggaactgagaccgaagccccctctaaacccctttctgagagccgtgcggggaaactcaggccggcgggctacctacccgtaactgcgtattgttgatttagcagtttccctagatgagagtcaggctggagcttgggggggtggggagtggcccgctctgcagctgtcacccccctccca

SEQ ID NO: 45030 - DNA, 3314 bp, Homo sapiens
ggaagagatgggaacagctgaaggagattggcctccgagttcccagccagcccccggaacttgggtagaacccccctacccctcatcctcgcagtagctgggtctctcccagggacgcccctagtcagccttggcctccctctccatgccacctccctttccaaggtgagcctctgcagaagacagacccttggctggctggctgtcgggttggtgccttatttatgtgtgtatctggtcctggccgttttccccgctcagcaggtgaccctggccagggcctcctatctctcccgcgacagagcctgttgacttacccgagggccagtggcctcgtctttatcacgtgaggcctggaatgtccacccagctgggctaggctgggctgggctgggctggggtgggtgggggaaggggaggggaggattctgcatccagggcaccggccagcacaggcccatgttccatgggttcccactgtgaccctcaactcttgctgcccctttcctgctctgcctgcctcctactcatttggcacatgtgaaactgagacccataggagtgtgggggcaggcttgtatctgggtgaagaaacaagtccaggggaatgaaataccctgccttcttcaggactgactgcaccttgttgtttatgggaggatggagtggagggagtcttgctaggagggagagagggatgtgggctgggctgactttccaggttgcaggatagggtggaggaatgagggaatacgggtgagccagacccaagcctgggttcctagagcccctgtctggtggcttgatcatttagtccgaattaacaagcatgatgctctggggcatgccctaattgaacaagaatgggggggttcacacattgttattacgttactattgcccactctttatatgttattcatttgttggcccaatatgtttgtattgagcacctactgtgtatcaaaccccacccttctggtggtacacaaatgaatcactgctccagctctggaggcaggcccaggatagaagctccgccccgtttccccgccccctggggccctgattggggctttccctcttttcttttttctggggctctccctctcttacccccaccacctggtcccatcctagccgccggcgcgcgcgcgcgcgcgcgcgcgcgtgtgtgtgtgtgtgtgtgtgtgtggctgtgtatgtgtgtgtgaagtgtccttgattaagtgtattaatagttaaactctcactcatagctggaactcaccagaccacaaaaagcctcccccgttactcacgcgctactgcccaacaagaatatcccactaaagtttttttctgctttctcttacttccccctcacctccccccaacgctgagcccacccttcctggattcgagcaatgagaaaggactgccccctaaagacccaggaatctccaaccctccacctgccccctaaagccagaggcagtgtcagctgacagagatgaggctgtgtgggcactagtctgttgttctgggatgtgggaatctgggtgatgtgtgcttatgactcaggacatgtgtgtctctaagtagtgtatctatatctgtgaatctctgtgttgaatgtctgtctcagggtgtgggagtctgaacatacatggatttatgaatcagggcatgtatatttgtcctgatctagaagtgtgtggatctgtagtgtatgtgtacatgtgtgtttgtgaatctgagattgtatttctgaagattggctatgtccctgtgaatctgggaatgaatatattctgtgagctgtgtgtgcttggaattttggagagtttggatttgtgatttgtgtgtatctgtgtgctttgtatatgcttataaatctgggggatctgactctgagtagagtgtgtctgaattgtgaatgtgggagtgggcctgtctgtgctgtatggacagtggtttctctctgtctgtggtggcggctggctatgttttcctttctctttctgtatctccgtcttactgaatctccccctctggttgtttgaggccctgaatgtgtgtgtagcatggagtgtgtgtgtgtagaactgaacctctcacacccagtccttccccctgcaacccctacaccccttccctccccagcagtaactgggcagcctccccgtctgcctgcctgctgggagttttggaagccgcagagggagacaggctggggctggggtgacagcgtgtatccacggcaatggtagcatgtgattacgggaataaaaggattttaaggtcatgggtgggttttctggagggagggggttgtgcccccacaacccaccatttggtggagccagtggcagcaaagggccagcctgtgtgtctccatgctgggaagcctgcccctatgcaggtgaatgtggatatgtggggcttacctgggagtgtgagcacatgcttgcacatgtatgaacggagcctgtgagagcatgtgtgtctggctgccagatccccagatgagagtccataggcttgttccctgggggaggattcccaggaaaacttcttgcttctgggtattacatggagctggaaccccacagtcctctgtatgttgagaagcagtctggtcccaacctttccctgtacccatactcccaaccccaagtctagtgtctctggccagagactgactgggccaagtcacctgggccaggccacatcttggggtgtcagtgccctggccccgctccagcccctgtaattgcattctgccgcctaatcccccgccagctcaattagatcgcaaattcttcttcatttcctgcctctgatgctggcctccctctgggctcacagggcctaggagggagggaggggatcctgccccgccttccacagcactaggggctctagagaggtgattagttccaggcacactggccccagagcacaggttagaaccctggggaccaacaagacagggctccactggccctttttgggtcagcctcagtatcctcacactagggcagggctggtgttacctggtatgggggctctgggtagaccaagcagatcactctagccaggaccctagcttgtaccctcacctggggctcctacaggctctgcccctctcccatcctcaaagcagttgccatctccccaaccccccacggcagttgtgaccttgtttttgaccttttctgggtgtcccttgtcagagccaattgaaccactgagctccactgctaccggctcctcctaacctccacccagacaagtgtgtatgagcagtggctctagagtccatcagatct

SEQ ID NO: 45031 - DNA, 1782 bp, Homo sapiens
gcccagccgtccctccccacaggtctctgtggaaagtggtggcttggctgatttttcctgggaaggagaagctggatgtctcccgctccttccccaggaggtgccgtggcagcggctgtgttgacaggcctcctggctttcttgatagggtggctggcagctctggaaggccggctgtacccagatcagccctagggaagagggaactgcagaggtctccctgccatcactaatccccgaggcccatcccaccctcagcctgtccctccatcgcaggaggagagctggggagactggctgtgatggaggtggtggagagacaggccagaggtggggcagccctccgcctcagggttccccattgctccctggctagtctcctgcttcctatgacctttgtcactcactggcctagctcttcaatatttcatggcccttcaagccggccccctaccccagcccacacagccccctttgtctctgcctgccaccccccgccgcccccctgggcatccctgccgctgaattactgacccagaggctgcctctgccttctcctaactgtcccccactgtgcctgcccctgacactttccctatccctcctgacctacctccccacacctctccttgtgacacccttcatctcttcgggattctctccccttcgctgacatctctgaccatctccctgcccttttcctccatttccctcttttgttggcctcctccttcccagtggaacagaaaccgcggcaactggtccgcctgcctgtccaccccccaaccactgtccaccccttcctgccccctcccccaccagctgtgccggccggccgtgagagctggttttatttatttttctgtttgtttgggaagagggcagtggcggctctgggccctggctgctgcgctctgcttagagcagcgggcaggcgggcctcactggcctcccaggaatgtggctgggacgccccagctatatttactcccctccagctgccggccccagcagggcagagccaggcctgcctggtggcccccggggagccctgtacccgccctcctctgtctggcagaccctacatcgcccttgggcccagcactccctcccttgcctgtgaccttttctgacctcctcagacgtgcccagcctgccagcaggaacacttgtgtgccatgccagtacgggcgtaatgttcgggcactgggggcctgggttcctgtggggcaacccctagcggcccctacacacccaagtaggggcctaggctgggcctgtaatccgatggccagaactatgcaaagcatctttccaggcctttctctgtgggcctggcccctgctcttgccacagtccccttggctctgctgtgatcactggcaggggtggtgtcaggtgggggcctcagtgggcttgagtggctgtgctcctggcatcactggatccccaggtctctcacacaggcacacatatgtacgtgtaacacacctaagtgcttacatacacacacatgtgtgcagaaagacaccctcacccatgaaaacatgctggcttataccttccttgcaggcagggccgtgcctcctgtcattgatcccctcattcatcagatgcttattggggctgcttattgggcctgctccttgccagccttgcaatgggatatggcagtgattacttcttgtacccccagtgcctggcaccaaataagtgtttgaagaactttagctgctgctgtaatcagttgcggcccccgttaactgctattttgtttttgtt

SEQ ID NO: 45032 - DNA, 2224 bp, Homo sapiens
atctagagcagcctagctgggcgtttgaacccagaacactgagagattctgtttggagtcatcctaatgcctccagaagcctgggagggctcaattgactcctgaggcagaaagtgtggtgggaggcaaaggaatagtgaagggacctgcagtcaacccctttcaggaagagcacagtgggggatgcgtggctctctgggctctccctgaccttggtttgcccatctgcagaatggaggtggttacccatgaggtcattcattcagtgtctgtgctgtgcctggatgctggggctagtggcagatcggctgggaggggaggattcctctgctgcagacgggtaggggtgtgacttggtgactcccggggaaggactgaggtggggggaggtaaggagccggccagtgaggcgcggtgtccagcggaaaatcccagctgttgtcaggaagtgtttcctccactggtctcctgggagggagacaggctagcaggaaggagggcaatgggggcaaataaggcccccagccagtccaagtggagacatcccaagcctggcagctgggcgggtgtgccccgcacactgcaggagggctggaatgcaccccccatgctctgaggctgggcctatgctggggggctgggactgccaagaggggctgggccctcatccagatttcaaagccttccccaggggccttgtggtgccctccaccctgtcctgagctgccgctgcgggggtggcagatgctgtttcatcggtcgaggcaagtgggagccctccggaaggtcctcctgggaggttccggggggcagcaggggtgtccgggggcagtgggggtgtcggcagctgctgccccgcctgggctggctctcagtggcctcccaggtcctttaggccccggggcctggaggtggtgcttctgcattgaggctggtccctcctgcccttgctttctcccactgcccaccgagcttcttggttggctctggccccctccatccctggctgtgtctgcaaagccccccgggaaggcagggaggaggcgcagcaggctcagaacagcgggtgcccgcgcagccaagtatttgctcgagctgtcagagacagacaggcatgtggggaatttggtgcgtgtggggctgggggaagcagccgggtgggcaggcaggcaggaggagggaagctggggctgcctcccagcctgtggaaccctgcagagaccacctctccccagtcctagaggcaagctgcatccaggcaccttcctcctgcctgtgccagtgcagtgaggggagcgggatgatcctgtggggtctgataatagctctgacacggggaagggggtgccttgtcgagggcctgcaggctcaaagaggctctggtggagtgtggagccaggcaggaatccgggttgtgcccgactgtggcctccaggaaatagcagctgtcatgctcccgcccctccaccccaagcctggcacaacttgtttcctggccaggatccggccagggcagattggaggagcctggtattgcccggcctgggcaaggaacaggcaggatgcaggggccatgtttataagcctaaaggcgtttggggtgctctggggaggggacctcagcccttatctcctatgcgaagaccccaacccagtcacctttgtggtctacactccaaaagcacccattaggtagggtagggcccagagctgagtaatgcttggtttttcgtagcttgagagcccagagagggggatacgctgccccaaggtcacacagtgggctcctcagccttcccctctaccctcatgtgggtggggccactgggaattggtgaacatgggggggtttgctggggtggggggcctatatttagtcagtcctgcagagccagggcgcctctgggagcagctgctggggttggggggagtacacagacagaggcctagagctgcatttagtctggacagaaatatcctccccccacccacccacccactggctgggaggccaggctgcgggcctgtcccctgaggggcagcttgcctgggcctggtggccggcgggacaggcaagatgacccgataggcttttcccagctcaggtttcgatgaaacaggaaccccggagctgcagcctgggccgagggggccagggcagccggagtctgggggaccaggacagcctcccccacctccgccctcatgctcttccccatgctgc

SEQ ID NO: 45033 - DNA, 1881 bp, Homo sapiens
cctaaccccttaactccagggaggagggtggatgggtgggtgggggatcccctgaggagcagatggatgccccttggggtttctgggttcttcctgcagacaggttctgggaaactccatggttaggcctgtggaagctgcctcggggcctggtcagggttgcgcacctcctccaccccctccccaggggctccatttccctctcctgggcaccctgcagggaggagttgagcaagtgcccttgagctggcacttcctctttggtatacagggacatagccacaatgaccccccatcccgtggtccgtgtgtcacttagcaccaggcgctgcatggccctgggtcagggctcactaaaggtcacttcatcgggttgactttactagaggctagtcccagcctcagatcatttcccctttctggtctcagtttcttcatctgtgaaatgactgtgcgagtctgccctgcgtgctctctgaggcaggggtaagttcattccccgcagacagacacacttaggagctttgtgactggtgttccagtcccccaggcccagagctcctgtagccctgacacctgcacaggggtccaggggaagaagtgtgggctctagagttgggccagccttcttttcagcctcacctccactgtccacacttgcttgaccttgacccacaccagtgccccactcagctctgagcctcagtgtcctcatctgcaaaatgggagaatcatgatgcctacctctgtgggttgctgtgaccatcaaacaagatgatgtggacagagcacatggcacagaactgatagagtgtggtgacagcggagcccttccccccagactatcctcctggtcactgtaccccagccttggtcttgaggattctgggaaggagatggtgccaatctgctggctcagccagcttggccactgaccttcagagcacccaggctgtcaaggccgccaactgcctgctgggcgggcaggggggagtgccagccagctcctcgcctgacgctgcccgctcctgctcccactctcctctccctctctgcgcctgtgtgtgagctaattaatctcagcccctttgggaaattagaacgccgcagccgcggcctcctcagcctcgcggtgcttgtgctgctactgggccatgccaagacccgctgtggtttaggggcaccggggtgggggatgggggcaccgggatgagctgggccggccatgggtctcccagagcccccacctccttgctggaatgctctggtctctcagccccctcctttcccagatagcatccataaggatgccaggccagtgcccaactgtggtaaaacctaacccccagtggcctctctgacctggtcccagggctgttatggccacccccttacaccacattccatctcattgcagggtcctcttgcctgcccagcttgggctgatggagacagatgtaattatggaattttgcttgggaaattaatttgaaaaagttaattaattggtggttccggaggtggcgggctccacgcccggccagtcttgctgacgtcagtgctgacccactggagacgtgcagcttccgggcaagctgggcagagggaccccggtgacctggctgggcagccctggaacaggtagatggacagcgaggagcaaagggcagaccagtgtcctggcccagagtgggcacctgggaagggtttgttgaccagacctgctgaggataagaacccggccacttgtttgtgtgttcaacaagccgttgtcaagctgctatggtacactgaccccagtgtctcaagtgcccccaaccaaaaatagaccagttcttccaaaccccttttctcaaggaaaacctctaaacctattctcaa

SEQ ID NO: 45034 - DNA, 1544 bp, Homo sapiens
ctatgagcttcagtttcttcatctgtaaaacagatcttagtgtttgggggagcaggggtggctgaaagagatcacgcatatgttgttctcgccatccttattattactactgacactgttattttgttatcattacattattattcatgctcccagggccccagcagctgcggtggctccaggcctggatgcagagctctggtgtgctgaaaagaagttgcagttcctaattagtcagcgctccaaggagagggcctgggttttaatttttgctgcagggtcccacctgcccgaggcctcccagcccctctcatcccttcctgggctgggcctgcggcaccctccccaacctcaggtagggggcctggcccgaggcaaaaacctccccaaatttcccctgccactccctccgcctcccagacctctggggccatgaatcatttatgaggcaaaaatgaaaccaattaaggacaaactttgaaagcctctaattgctgcgcctggtggcaccgtggaatgaggggaggccagccttctcggtgcggaatctccttggcccaggccttcccaggctgcccgtcccgccgcggctcagggcgcctcccggctccctgccgcctcccagccggacgcggacgtgcctgcgcggctctggcggccgcgtctgccgccccggcgcccgcccgggtcccaggccgactaattaggcccggctacctcccgcgccgcccactgcccgctccaggcccgctgcccgctccaggcccgaggtgatggcggctgttcctgccgttctggggcctgtgccccagagctggccgcgtttctcggggcgggagccagctctgctcgcctggcttaacccagacgagcccaggacgccctatccctgaaccccatcgtggcgtgcaggtctgagtaggctctgggccatgccggggtacctggcttggaggctctcttcagtctcgggagagatatgcttatcccaggcggagcggagaaggctgggggatgactgatagggggagtcgggaggggatgttgagccctgaggtgttgcactgagcacggatccagttcctcttggctttgccacaaacacagtgaccttatgtagagtccttagcctcggtttccccgtttgtaaaccatcagcaccagcccattttctcctgaatttgggatttagggagctgggctttgtatacccctcccagtctcctctcttggggggttgctgagggggtggaggtaatgtctggacctagcagggcctgccttactgccatgagccctggatgccagtggccagcctgctcgctgtgctgagggccaggcaggccctgggcactgaggcacgttgtttgctgaaaccaaatttctgtgcttgtgtttttccataattatattagcaggtgggatttttcctcggggaagcagtgggagggggagcgccatggcagtgtccccgcccgctctaagcgtgagctcacactcagctctgcccgcctgccgtaatgattttttaattatgcagccag

SEQ ID NO: 45035 - DNA, 1207 bp, Homo sapiens
cctcatccctactaaaaattaaaataataataataataaaaattctgcccttggcctcaaggccctgcacaactgggaccctgacagcctcatagacacacctcacatcttcttccccacctgcttaggctctctttcatgcctttgtcccctctcattgcttctccttatccttaactctcaaactagcagtcccttcctccaggaaggcctcagatagctcattgtgtccccttccggctcttgtttcacgctggttcatgtgactgtgggcccagctcctgtgcactcctggaaggcagtgctggggtctgggtctgtgtgctctgctgtctctccggtatcataaggtacagggctgctgtcgaggtaggtgcagggaagatgtgtgcaaaggaatatctagaacatccagctgtgggccacctgtgtacatgtctgtgtgcagatggcactatgtcatcccaggatgtcccctccttcccagtgctttctggcccgagagttcaagattgaaccctgcggggggtgaagtgaggctcttctagggctgagggttgaataagggcactgccaccacctccagtgacctcactgccagctggcattatgatgtcactggcttagcattccaggccctgggcatctccaagtgccccaggtgggggcactctcctggggtctgtgacagcttgcccccaaccacggagaggtgacaggcacggtaacaatcctggggagtgagagcagccttaggggtacctaggtcacctgccttgggccactctgtcaattgcaaaagtggccacagaacagggtgactaacacttgggctctgggttcaagctctacccctgctaggcaccagctgtttgacctgaggctgacagcttgaacctctctgagcctaaatttcctcatgtctgaaattggcaaatagtttctgtctcccggggttctggggaggcattcagaagctaagacatgtaaagcataaaagcacagggcctgggacacagtagatactcagtaaatgctggttgataggatccgttggttaaggaaaccagagtggcaacacaggtggtgggggctggctagaagggggcaggctccgtgccttctggggctggccagagccttagggtagaggcacggggtggcctccactgccaggaaggtggccccaggtatgagtctccctcct

SEQ ID NO: 45036 - DNA, 1409 bp, Homo sapiens
ctctttaggcctgagggctgctaggctgagttacgggggtgtccttggctttgactgtccccactctcagagggtttgttggtacaaggctgctggggacctcagaggtcaaatgtctggggaagtcaccacacagccacatggtctgggccagggcagcctgaacaggaaggggtggcagtggcatgcccctccctgtacatcacagaggccaacctgaaggaggaggcttagccatccactgggggagcgttcttctcacccagctgctttgagcctggctgagatggaggctagacttcaggaaggacttcctgacagtgttgggcactggcttcaggtgggtgagagctggagcgatttctgaggctgagtgggcagtgaggtgggggagatgggctatctctgccattgtcctgagaggagaaagcagccatgttgggtgggggtggcgctgacccccaaccccttcccaggtgtcacaagctcccttcgagcgccagggcctcagcagcctggcctggcacagcgggggcaggcaggggcggtgggaggcagctttcaacttcagctctgcctgggaaaaattccctttcatgtggctgcctgtgatctctccaggcggctctgccgaaggggggtgtccagcagggagtagggggaggtgttgcagctggggggcaccctcacccccagcacaaggcaaacagcggcacctccagaacctcgaggagggtggggagggtcctcctgtggggagtggggggagcctggccagcagggggcaccgggcaggaggccccttcctgcctccgcccgctgctggcagcacacaggctgcagatggcctcagccggccctcgttggcacacctacaggtgtggggtggacggctctgttgccagcccagagggggtgctgtgactcagccggcctgtacctttcagtgtgccaacccacagcccagcgtgtctcctgagcccactccccagcacacggccgaaactcagagctcctcacctgttccagcttcacactgctttgtggaaatggtaagccagcccctctgtttggaggccaggggtggggacagctgtgaggctggctgaaaacatgctgaggactcagttacctcatctgggaaacgggacaataattgtttcccccataaagttgcctgaggatgaaatgcgatcacacttgggaagggcctgacttgcaagctctgtcaatggcagctggtgttgctatttttaaactattattcacctaaatctcaccaagatgtccctcaccttctgcctggctgtgtgtcctccctgaagccctggccacccccacctcccacctcccacttcccacctccgtagagtgacccagcctctggcccttcccctacctggatgcag

SEQ ID NO: 45037 - DNA, 1591 bp, Homo sapiens
tctatgtgagtgtgtcactttgggtttacaacacacgtggcattgcgtgaccctgtggcaaaactgggtggttcaataagtgtgtgactttgtgtctgtgtggccatcatggatgtgggctgggactgaccagggattgtgtgtgtgtgatgtctccgtgtgactatagtgtgaccctgtgatgctgcctgcataaccctgggtgtgtggtcatggctttgtgtcagtgtgcacctgtgatcctctcagtgttgctgacactattgccttgtgtgtctgcctccagcacttcctgggtctccgccctgaaagcctctctagggagagagtgggggatctgacagcccctctcacctgcagcctgtgccctcgcatggccctgaggcccagtctggatgggggagctggcgtgggggcagcaggcgcagttcccacggccgctgcggcccctctcccagccccatcaccaccggcttcaactccacagaatatcctggcaaccccggcctctttgttctctgaggccgccaaaggcctcccccaaccccagcctgcccagcgcctgccaggcgccccctcccccgacagcagccagtcttggcctgacctagtctctagctgcctttatcccccacccagactgaggcgcctgtcccatgccctggacctgactcaggactccagacgaggcctttgaccctctgctctgagcttgctgtggttgcgctgtgcaggaagaaggaagaaggataggtcctgtggctgtactgggtgattgtgggccaggagctgggctgtctatacgagtacttccccttggcccaaggctggttggaggcccagggttggtttcagtttgtccagtaagtttacttctttggcccccaaaagtcatcaggacagaaattattacccattttattggtaagaaactgaagcctagagagggtatgtgacttcccctatagcaagagcaagatggtagcagggacctgattagaacccaggctcctggctaccttgagagaaaaatcaggtacctccaaaagaatggaaagggggcctgggagtctggacacatgggtccctgcttatttcttggtcaccatgtgtcaaagccgtgtgtgtgtgtatgtgtgtgtccttgctagatgaccttggccaggtgcccttacctctctgtgttccaagaaagaaggacaacatagccaggggttgtggggtggtgagcttgacagggtgctttgcagagccaaaggtcacctcacagttagtagtgccaagacccacgccatctccaacaggcacagattctggctcggggccccagccaccattcccaggctcagcccagctttgtactgccacaaaaaaggaggcagcgatggctacatggctcggctgtagtcaaggccacttgggtctgacttgattgcagcacaggctcccaccgcctcccaggtgccagagatggatggatggaggtcactgcacagcctggccccaagccccccccccgcccacccgcagccctgggctgaccagccactgctgaagacagtcagccagggttaggggagggacaggcagc

SEQ ID NO: 45038 - DNA, 843 bp, Homo sapiens
gcccatttcaccttcaagcctttgtccatgcacttctcctctgcctggaatcggagagccttcctcttgccctctcctgaccagccatgcctgtgttttgaggcccagctactctcctccagggcgctggcttccatgcggtaccctcctcttttggccccaccctcctggagagttacctggaattctgacccccagcttggtgctcagtgtctatgcctacaactgctgtgttaatttccctttctgggggcttgtatcacacagccccaaagtaggttgtaaattcttgagtggcatgagctgagtcccctcctacagagaggggtgataaagtacagtggttagaagcttggctttggcgtcaggtagtctcagctcaaattctagcccatcggtgtgacctttggaccagtctctccttttctgagtttcctgtcggtccaccccccccagtgccgagggcgccactgtgaagcattcacaaacatactctctgccctcagaggagctaaggatggaagttggggcagtggccccaaccgggagcagccaatcaggaggctgaggtggtccttcccagcctgccagcactcggctcttgggggaagaaccccctccaccctcacacacttccttccaaggcgctaggggaccttggtcgggggaggtctggtcgtcccctcccccttccgccccttcctgtcgtcccttcgagctggcgctgctctgagttaatctccttgcccgtcagggggtgacaggaggtgtctgtcattcgaagctgaggccgtcagccttgccggctaattggggcgcgggcaccaggagcacgggaaatgg

SEQ ID NO: 45039 - DNA, 684 bp, Homo sapiens
taaatagtgcctagcacgtagtaggcactcagtaaacatctgaacaatatgtagttggtgtgacctggatcaagaagtcccagcctcagcttcctttttctgttgggctctgccttctctcagcctcccagggaggctctggatgagatcagagatggcaaaacgctccctccgggagagggagggcacggcgcccgcccggggatgaggtcagtgcagcaggcacctctcctcagtgcaggaggcaagcagaaccgcaaagatcatcttggccagacccatgaccctggaatcccagacgggcagggcagggtagggcgcgcgacctcttcccctggtgggaaggtcctcccggcggggcctcctcttcccctccccggggaggcaggtggagctgcgtcctcatctttgttcccatctggagcgcgtttggcgcggcgtggcgggggcggggctgcgcccccgcggtgcccggagagactggcccgcccgcttatctgatctgcggctaattgaaactccctgctcgcgaaggtcagctcggtcccctgacagctgccgagccgagccgggccggatggaaaacccgggctgtgcagggcccggcggggcgctgaggggaggggttgtggggggctgcctctgcggcaaagtagacaaaggcggcccctccctccctgtgcg

SEQ ID NO: 45040 - DNA, 865 bp, Homo sapiens
atcccccatctcacatgttactttcctatctctaagaccctctcacatcagccagattcacccaatacttcttgggagtaggtggagcaggggtcaccgtggtcattttacggatgaagaaactgagtctcagaggttacagtgctggtctgctttgcctggctggtaagaggggcagtgggcctgggttctgagccaaagttctggaccgttcgcaggaccatcagtgtggattctgaaggatggatggtatggagtagggtagggcacagtctggtttggggaacccctaagggtgcagagggagggtgaggatccctgccaaagctccaggctggaggggactgcgtcctcctccctcctgcagtccatctccagtggccggctggggtgagtcagcctggatgaagtcacctacttccatgcagactgtgccccctgacctgggaggcgcctgtcaggggcaccagccgagactgaggacaggctgggcagcactccaggtcgctgtgtggcagctgatttagggggctggaaatgtccagagccatcagaagcagctgggcgtctggggccttgaggcccgtaagtcatgctgctgcctgccgttccctgcattgctgtgaagcctcaccggggactgggctcatcaaaatcagtttatgccaaaggaaattaatttttgcctctctgagatggggtgtggggaagggaggtcagctccagaggcaggcctgtaacagcactgcagggaggggttggatactacagtgtgcccacgatggcactgatcgaagagcctcggggctagagggcctgcccattctacagagcgggtgactgaggtttcaaaggagcctcctag

SEQ ID NO: 45041 - DNA, 1406 bp, Homo sapiens
gccagtatcctgtcccctcgcccggtccttcgccctcctcccactttcattgtgtgtctcctctctggctctgaggttcctcctccctcccttctctctctgggtgtctccgtgtctatctccacatctccatctccatttctttctctgcctgtctctgtctctagctgtctctgtccctcagtctctgctcaggtctccgctcgcctcttgctcattttcgttcctctctttgtctgtctgactctctcttgtctcccccccttcagttacccccaaccccccgcacacacacacacctcacagccctgtttacgacatcccctgggctggcaggtgggcggggctgcagcagagcgggggtgagagagggagacgcagcctcccccccagctgttaaccttcacgcttcaggcctctgcggatggcagaggagggggaaagcccagctgccagcttggcggaggtgaccgggcgggggctgggggctgtccctccctctgggctcgtctctggggagatctggggccggaaggaatgtggtggagggcgccttcggctgaggaaggctgttgccggatgggtggcctcctgaaggcttgtgctggcgaggcgggtgcccaaagggggctctgagcggtgtcggccctgcccgcagcccggccggacgtgggggccggcgtgagaatcccgcccatctgtgagccggcctcacgccgtcagacccaatttatctcgccgccaaagtttcacagccatctgctcgagtggaacggcttccagcgctggccccaccgggccccccagccagcgcggggatgttttccaatacgacagcatcgccccgccaaagcaaggagggggtgtagggggaggcggcagagcgcggtgcgcggggctggcaggcagccctctcccgcgagcgagccgaccctgaattttaagcgattgatcaggaagctcaggccgttcccatcactttgagcagccaaatgcgacggcgcagggatttcaaggggcctttgcggaggcggtaatgaggtcaccgtcactgcgccagcccgcgggcgggagggggcgaaggtctgcggacacgtgtgaacacagcctgtgaaccgagccacatctgtattcacgtgacccccggggccccagcactgacccaggaaaactcggcatttggatctgagctgattcacactcccccgcccccaccccacctacccagccagacacggttcgagaggctgagctagaacccagccctgccacatccatgattccatgatcacctcagacagcttcagcacaagagccccaactctcttctcctccccgctatgtgcctaaaatacacatatttgggcacctgcccattgcacttctgaacaagcctgtggagacag

SEQ ID NO: 45042 - DNA, 1387 bp, Homo sapiens
ggggcctgggctctgccacttactaggggtgctctggggtaagtcactgaactttctgagctcgtgtcctcataggtaaaatggcaatcatgtccacttcataggagtgctgtaagggtgaaatgaggtcatgcgtggcaagaactcagcatgagcctggctcacagaacactctcagcagcagtcagctgccacaaccagcgtttgttggtgttctctcccagctaaggagtccgcctggtgccgcgggtgcagtttccaaaaacaccagcaggtggcgccccgaccccaaaagagcccccgtcgctggccttcccagggccgggaggggctgggctgggcggcctgttgaatctcggccagttagacccgcgatctttcccgctgcacggggacccgtgcgtgaactcctctcaattctctgtggtctctggcacaaggaagagggggtctgggtcaccatgggatagttggggagcctgttttccatccgtgttgtgtaacggcacggccttcggagacagcctgggcaaagttgaggaaatacccgggttggagcggataggagactttgagaacgggcgggatcccgacgcgcaggctgatttttgagtgcctgcggctgaactcggggcgccgctgggcctggtgctgcggtaggaggatgacccatatgacctgtattcgcttcctttcagagtgcgggcgagcggggctgcgcttcgcggaagactccgcgcagtgctgggcactgggacgcggggagtctggaaattctgcgtctggccagcagagggaggcggagagcccgccccccccgcgcccccccccgaacccgtgcccaggcctggcccggctcccccagcccgagctccccctgcgggaaccttcccggcttggccgctcctccctgggcaggactcgacatgtcccgtgtcccttcattttggaaaaagtcttgccctcctctccccgcccagcttcttggaggagcgcgtgggttaaggggagggtcagtttcaacccgaactcaaccctaaccgcgccgcgcgccccgctccctgggcctcagtgcgggtgatggcacggactggccactctaattctagcagctgcgaattcctgggacagggtggggtgacctccactagggtagagactggggggggcacaaggggcttctccccctaacccccatcaacccaggcctggacggccagctggacctccggaagcgcgggctgcccaccccataccaccccggccagttcccgggactctcctggacaggctcccggaggcccacaaaggcccttagatgccgttctgggccaggctctgccggggccctgggccggcggccggctgccggctggctctcggcact

SEQ ID NO: 45043 - DNA, 1088 bp, Homo sapiens
atcaccaccatcaaatcagccatgtaataggcatctatcacgtgccagcatcagcactgggtactttataatctccacagcaaccttttggaataggtatttacatcacccatttcccagcaaggaaactgtggcctagagacgtcacacagctaggcggcacagagctggaatttgaacttacgccctgttgatgccaaagccctctcaacccgcagcctctctgtccctcccacctataggtctctgactacacacatcctagtgggattcacacacacacacacacacacacacacacgtgtagccgagtgtgcatgccaaccacctcagctgtttgggtggaagacgtccgtgtgtctggctggaaccgaatagttccgggtgctgggcactggtttactaaattagttgatgaggggaaaggcttttgaacctgggcctccatctgccttctccatactgaaatcatgtactctctctcaggtctgcgggtttagacaggtcctggctctgagggggtataaagttggggaaagagcaacaccctgtgggcttatgaactgcagcagctgtggtcctggcagctgagggtaccactgttatgccactttgcatgttcagactttgcctgtgacgtgcctcagggtccaagggtcatcctgccttggctgtgctattaccaaccccacaacccatccctcctcaaccacctaggccggcaactgttgcctcagtccggcccatagatccagggcaggaactgggccagagttccaacgctgagtttgaagcagagcaatttgtgtcagtcccttggccaggttccccagcagccagtggggacaccttgtaaatattcttggaagcgggaggagggctggagtctgtcctgtgagctggggccggagagaccggagacagggtcacttccttccagggactgccctggccccctccaacctccaggccagcatcatccacatccaccatgggacttcgtgctctgagttccctcctcatctgaggctaggcacacacagtcaaacaggagttatttctgattttatttataatataaaaatgtt

SEQ ID NO: 45044 - DNA, 778 bp, Homo sapiens
aaagctccagcgtgcagctgtaaccattctgctatgaacagatgaaatcttcaaatcagatttcataaattgagaggagaaccaaggacaacccctaagggactgtaccctctacaaagtggtcaaaagaagacatggtgattgaatgacctgagaaagaagggagaggggaaagaggtgtgtcagaaaaccaaacactatgacagcattcctggaggaacccatggcaggatccacaaaccagcttcaaattttaaggctgactgggtcaactgcaagccaaccataaggctcccctcccaaagccacattgctagtagcaaactcctccacagaaagtaatctttgaaccctagaatggagagttatgtcattggattactccctgagtcatgtggacagagcagcactattgatcgcccttttctccctcttacaatgacaacactcactcctactctggaaggattaggctgttatttaacttcagacatgagaaaagtaaactcttatacttataaaaatatatatggttcatgaccttgacccaaggaagcccatcaaacccactgggactctttaccaactcaatgttttcttttagacagagctccctaggatgcactagttttaggtgatccctttacagaactaatcaaaaccaatgcctttaacttttttacctctgtacgacaagctctggatgtaaggcagaccattcaccagaggccctgaggctgtaacaccacacaggagaagcgcaaagcccacattgtct

SEQ ID NO: 45045 - DNA, 1643 bp, Homo sapiens
ggcaatgattaagttttcctaaatcacagtttgacttctcggaggtctatttaaataatgataaagatgataaatgcagtttttattttgctgcagttattagctgatccacgttccatctacgtattcagtgttgcaggatggagacgtgacagcgtagaaagcgagcaaaagcgttaccgtgcaccaaaaatcttgtcaaacttgatacgatttcaagaagactgtcttaaaggacattttataatttcacatttagcccttgcatagcattttatgaaaattaacttttaccctttccccctcggcccaaggaagtcgcattccctcaaaggggcccggcttcaacatattacactgcgtgggaggctgggcagcaaccccacgcttcctgtcaaggattcctggggccagagcctgaaaagtgctctagccactcttctctatgctaattctgtccttccgacccctcttggcgggtgtctgagggccaaggtgagactttccccggagatgaaaggcctattgcctcttcagagacccgggcggagttggggcgggggtgccgcgtgatagggtggtagcagaagtcgcaacgacgcacagggccctaagttggagctggcgcaggcccttcagggttctatccccgccagagcctggcttcggccttcagaagccaaacgagtaataggtccttctggggcgctgtgggcggtgggtggaggaagtgtgggcggagaggccacagacatccccctcctcagacgcgccccaaggcctggcccgcggaatgttgacgcgccaggagccgatagggcgcgctcacgcgcgagaagggggcggaaagagcgcgctcggcggccgccgcggcggcagctaaaacggagggacgcgagagcgaagggcgcgagccacggagttgggaggaggggtggggaacgcggagcgcgcgctgacgtcgcctggagtcacgcacggagcgccgggttacgcgccgacgtctggctgccacgacttgccgtctgcggcggcggcggcggcggcgagcggatcccgcaggggaaggaggaggaggagggagagccaagggggctgtgagtgagcgggagaagcagggtgtgagccggacttgcccatgggagggagagcgagcgagagccgagccagccatccgagccgcctcctcctcctcccctcggcgtcccgcccccgcccgccagcccgccctccttcctcctcagcccgcagagcctaagtgaggcgcagctcggctagcgccgctgtccaggacaggtgtgcgcgcgcgcgccctcctcccctccccccttcctcgcgcctgtctcgcgcgcgccctccctcccgccagcctgcgccctccctcacctgcggcaggacagcgcccgcccgcccgggtaagcccctcgcgaccttccctgctgccactgccacagctccaggtgacgctcgccccgtcccctttacttgctctctcagcccaggaataattatagtaccattgcagacatccccgcaccctccctcttggagacccaggcggtgcagcaacgttctctcccaccccccgcagcgagaaacgaatgaaccccctcctactttcaaaagagaacaaaataacacgc

SEQ ID NO: 45046 - DNA, 2086 bp, Homo sapiens
gcgggcaggcagtcagtcgtggtcccaagggggactggctgcaggtttttgggtgagtgtggagtttctttttgattgttgcatgtggggaagggcagagtcgacgggaacagtcactgcgggcaccctagccctggtgcgtctactgtcctctgctcggctccccccatcggtgagtgcgcccgcccgcccgactgtgcggggctgcggttggggggaggggggagcgggatcatctgaggccagagccactgccgtgtgtgcggggagggggagcggcgggagagagaggggagggacaggctaggtgtctgctgctccacgccactgctgccggcgccccgacctcatccccagcagccccctctgcagctaagggttaccaccgcaccacctctcttctttgcctgcctcagcggccaaggctctgcggtaggagacaacccagccgggtggcgggtgggcctgtctaggtttgggtttgggtcttgctgaggcccgcatgagagggggtggccgtgactcggtgtcccctctttgcagggggctctgctgcgccgcgcaggcccctcctcctacatcctctttggggggtcactggaaagcagagcttaggcccactctctgtgcttagtatggcagactccttctcacccctagtcccctaactccccaggccgaggccgcctagggtctgcccaacagcgacagccacggtggtggtggtggtggtggtggtggtagcagtggtggcggcagcagcggcagcagcagctgcgacgctgcgcgtcctgctccctctcccccacccagccagggttgtagggtgagggccggtgggtgggcgccgcctggcgggcgggcggacggggggctggcagcggggagggggcgcaggtcacgtgccggcgggcgggtgggcgcgtacagtagggcgccctgctactgtactggggagtcagtgccctgttaccgggtctcgtctgtctcgtctctcccgcagatctcgcgagagtggctgactggctgtgggggttgcggcggcagcaggcggagccggggagggaaagcagcggcggctgaggcgactgaggcggcgggcggagcggcaggcggcggcggcgcggcagcggagcgcagcatcatggcggaccgagacagcggcagcgagcagggtggtgcggcgctgggttcgggcggctccctggggcaccccggctcgggctcaggctccggcgggggcggtggtggcggcgggggcggcggcggcagtggcggcggcggcggcggggccccaggggggctgcagcacgagacgcaggagctggcctccaagcgggtggacatccagaacaagcgcttctacctggacgtgaagcagaacgccaagggccgcttcctgaagatcgccgaggtgggcgcgggcggcaacaagagccgccttactctctccatgtcagtggccgtggagttccgcgactacctgggcgacttcatcgagcactacgcgcagctgggccccagccagccgccggacctggcccaggcgcaggacgagccgcgccgggcgctcaaaagcgagttcctggtgcgcgagaaccgcaagtactacatggatctcaaggagaaccagcgcggccgcttcctgcgcatccgccagacggtcaaccgggggcctggcctgggctccacgcagggccagaccattgcgctgcccgcgcaggggctcatcgagttccgtgacgctctggccaagctcatcgacgactacggagtggaggaggagccggccgagctgcccgagggcacctccttgactgtggacaacaagcgcttcttcttcgatgtgggctccaacaagtacggcgtgtttatgcgagtgagcgaggtgaagcccacctatcgcaactccatcaccgtgccctacaaggtgtgggccaagttcggacacaccttctgcaagtactcggaggagatgaagaagattcaagagaagcagagggagaagcgggctgcctgtgagcagcttcaccagcagcaacagcagcagcaggaggagaccgccgctgccaccctgctactgcag

SEQ ID NO: 45047 - DNA, 556 bp, Homo sapiens
tctagaaagggtgagaacaagagggagattgggtgagggagggaagaccactcagggatgagatccctgggtgttagtcaccacactagtggggaagcccatgcgggacttggaggatgtggatccaggggaagcccccaaatctcatagttgctttgttctatcgtctctccccatgccttcaaaggcggcctgccttcccagttcccagcctcccgccagattcttgcgtgacctcgggcggcacccagtgctgctgtggacagctcattccgccgcggcggcggctgcggctgcggcggctacaacggctcccggcgtgtccccggcgccgccagggggcgaatggggtgcccgccggctcctcggactccgggcgcgccggcactgcgctccggagaggcccggccagggaagaagcaacttccctccgccgccgcagaccagccgggcagagacttccagccccaccctcaagccctctcggtggctctgtgcgcccaggcctaggggtggggggccgtaggtgctgcgcgcccgcacaggtggtcaggcc

SEQ ID NO: 45048 - DNA, 1049 bp, Homo sapiens
tcagtattaggtattactgaatacctactatgtgccagatactctactgtattgtccttagtggacaaattaatgcaacaaaactagacccagtccctgctctcgcagagtatattctagtggaaaataatcaaacaaatgtgtccagttacaaacggatacatgcaaagaaggaaaactaaagctggctctgagggagaacagggaaggcataatttagactgggggaccagggaagtcctttcagacgtgacgtttatacactaacacaacccatcaatcagccaattgattaatgcaggctagagaggcagtcagggttccacttgctgtgacttccggagtaaataggtttccccttggttttccacccccattcaaggaaaaaaaatagggctgcaacccacggccattttgccgtttgctaagggaagagtccctaagattccagattcctgtgacctcagagtaaagggtgagggaaagtataatctgacttggttttttgtttctcttggataaaacaggaagggcagggttcccccacgccctgatcagtgattgagccgccagccccgggcctccctccctgcactcagaaatgtggtgctctgtcgccacctggtggacctaatagacgatgccgcagcagcccagcctccagcgtctggggtaggatccagaaagcggcttccttcaggcagagtctaatacggaggcaataggtttgggtgacttcctgacagggggcggggggtgggggtgggagaaagagtgaagggtggatggggaacggctgcttgaaagtcaactgactggagaacgacaatggccccattgtgaccagggccttgaccttgatttcctgccactctcatctccggagtggcatcacccgggtctgattggacgggagtccgctccgtgacagtgggcgggctccggggctggacacttgcccagctccgggactcccggctggcccaatcccccaggagacccagggaagacggatagggcaaggggccgacgcctctgagaagtcgttt

SEQ ID NO: 45049 - DNA, 2414 bp, Homo sapiens
aaaaaaaaaatgcaaaaaccacaattacttttgcaccaacctaatagcaagcaaggggaggaatatggagagaaaatcaatttctaaaatgaaaaataaaaaattttttgcaagtaggacttgcaagctcattctaggccttgctctgggagcttttcggtaacttctcttcctgttggaacagaagaaggaaaccttcaggacagaagattctgtcccccttccccctcctgatgtgaatgaagtctcattacactctaaagtactggcgggactacttgttgcaaggtttatggggaaaagtagccagagagcaatccagttatcagcctcagccccattccgctcaggtacagctcgggaagtaagcccccaaccctagttgggtctggaccaacaagacacgaggaggcagcagcccacagccgacccctcatgccacgcactgagcagggttccgcatggacgctggtcttgcctcccaggcgcctgaactagcggagttggggtatcgggtggagtctcggagaaccaatccaatctgagggggacgcctgtgggagtcctaagtatccagcgcagctgggaggcccacgttgggaagtcggagaccgaccccgcctcccgactgcgccgactgcaagagagcgcttccggcggcgcttggaggccgagcagttgggggcggggctcgtgctgtgacgcaagcctcgcctcgccccgcgccgcgcgcgttgccagggtgatcaggtgactcccggttcgcggcgctgggagcggccgtgacgtcaggcgcccggctgctcctcacttgctctgagacaggtgcggcaagtctactgcgggctggtccgggctcctcaggttcagacccgaccgttatccagtcggttcgtggagaggagaggtgaggtgcagcggacctggcccgacccagctgggaccagggcggggatcaggcacggacagggcgcgtccccgggctccctggggagcgccctgagaactggggggcacccgggctggcctggctcaggcaggggttcgcgcagcccctggggaggggcagggaggcagggaagctgctgccgccagctggatccctcccggcgccccgcggctactctggggctcctggtcgccgcgccgcgcgtctcggcggtggactcacagggtctccgcgtcgctgcggttctcgtctcacgaggagtcggcgggctcggagcggggctcgccacaccccgtcccgggggacgtccgcgggaggcttctggatttcttcgccttgggctgcgatttctgaggcgctgctctgcctattccgagctgggccagccgggggcagggggcaggtcgcgagtcccgcgggtgggagcggagcggaagtaactagtgactggaagtaactagggaacgcaaagccggcgctcggaggccggggtgttcagagaaggcgttgcgggggaaaggaatcccggctgctgttgagagccgtggattgggatctgagcggacctgttggaggaagtgaaatctgagcggggtcctgacgggtgggaactaatctcccggtagcagtggaggttgcaggggggagagaaggaggggaggacccctggggaaggagaccatgaggaaaaacgatttggggactgactggaccgtctgctgggctgttttgggggaaaaaaagtttggagaattaggttagggaggattaggaaaggacccttgagtgcccacctgagaggcactgtgtgctgtggggagccattgaaacgttggctagattggggtagggggaacactgaggaagttggtgtgaggggaacactgaggaagttggtgtgacattccggcaaaaaggtgacaacactcttctctgatgggattcctcaaaccctgcttatgaaatacttgtaaccgacaagggtaggggctcaggcagccaggtgcctttttcagccattgttggcaaatttttagaaattaaacaaaaaataattgtacatatttatagatttatacaatatgatacatgtaaactttgtggagtaaccatgttagcagatttttaaaaattcctttttatgaaaggacccacccaagggcagctcattttcgagtatctcatttgacgggatttaatgactggttgggagctatgcccccctcagtatgcagggagattatagcgtccacaacactttgcccttcagaggtttcagagtgacttacaaacaccttgtatccctagggtgaaacccaaaccccaaatgactggtaagagatttaatagggggaagttattaaaggagaaccagcatccaaacattcatgtggggcattggattcgctgaaaggagtcccatactatttgttgattgtagatcaaagatctctagacctggcct

SEQ ID NO: 45050 - DNA, 4817 bp, Homo sapiens
gttggaccctagggtgtcccaactgtagcactgcctttctttgcttttgccctatgttccttggtgggctgccaggcccaagggatttggtctgcttgtgctgtgatatggacagatgatgacagcagcattgcaaacatactatccaggagggtggtaccctaagtcaagtgtgctatatacggggcttttggagtttgctgagagtccttctgctctatctcttagttctccaaattggtagtgctgtaaataaaatcaccgctttggcagctgaactctaccggatggggtgaaatcagatgccctctggccctcccagcatatttttggagggtccctacatacctgctccatctacaaggccaaccttacttagttttccaccttacagttttcatggcaagaggctggtcatgattgtggagactttttaaatctggcttcagtgacaagctggccaagcctgatagagttcaccatggaagggagttgtttccctaaactctggccctgtcttccagggccagagtcctagttacagtcgtacaagccaggccaccacttctgtctccttttctctgctggtgaagtctctagcctcacatttgccaaataatcacatctcagtgggtaaagtggggattttcaggaccatttgcccttgattctaggtggatgtcagcttgtgttacaaaacagtgttacgaaacagcaggaattgcggtggataatttggcatagcccaggcaccctgcacagttctttgcaaatctacaaggaatggcctttgtttctctgaaatcgtgggcagtgtgctgcaggtagtagaggggaggggtgggagacagtccttacaagtgagggttgcccccgaatcaccttctcaccacattcattgagaatggtcatcctgtcccatccctgaccttggaactcactgtgtaccagcctctaaactgaggtgcgttcaggagaaaacactactgtttttactgtcataaaattaagcctggcagtagaaaaagaaaacaacctgcggtgctttgcataaatatatctcctggagctgttaatcagtaacacaggaatctggtaccttttgaagccagttatggtctgtatacctaagataaaacacgttttatgttcattaaaaatgatatggcagtgtttaccttcttagaaaatgcagcaagtactatttgaatgagactcctgggccagcactcaatgtgaatcaggctaacattgacgataacagagtagtctgtgcctgcctgtgcctggacactaattggaaaaacccaacagctacctccttggtgatctctgcccatttgggcaagttccaaagagccagctccactcaaagtaacttctctcttttttttttctgtaacccagtgcctgaaaaccaggaggaaatcatttccctgatttctgtttagccttctaaaatcatggcagtagttgtcttatattcaagggccactgacattgggggtttttggtttctaagtcatttcctatctctgtttcactcttaccttttctctccttgctttatttctatgcttccctggtttcaagcatcattcttgctgctcagcagggtatgaaataacagttcatgcattaatcaccctaaccacggttccatcctgagggcaagggactgtcaggccatggtggccctatcagtcagaagccagggctattagggctggctgtggcagccagggcccatctaagatgatgcccatttcttggtgagccactcactagccatcgtttattgaattttcttctagcagtgcaagaagagagaaatgaggagagggcggtaataagattaacattcctctcaccttaactcattgaaaggatctgtcatgattttgttccaattgtgtttataattggtcttgcccagtttggcatgtggctgtgagcttcctgagatgggtctttgtcttcttttcaagtggtctgtgagctgcctgagtcagggatgatgtctcttgtttctggactcctctgcagggttggctgtgtcaggaaaatgcaaagtgagcatgtgaggtgggaaggagactgagctaagtgtcagcaacagcagcttctttctccttcagcacatttgctggatgtgagatatagttggagcagtctagaagagtcttcaagcaggagggcaggtgggcacacaggcaggcagagtggacttactgttttgtgaccatgaggtgtctctggctggctggagtccaggctggctccaggggcctgcaggattgattcatgctaccaaaccaaagagaactgaagctgctgctgggacagaacatcctgagccaccaacgtacagagttttgcctgctgtgaagctcagctctggtgtctttttccccaagtgttgaagtgtcctggaattctcatgtataaacagaggattaaagaatgcaagtttcttagctatttaggaggctgaagcagaaggatcacttcagtctaggagttcgaggttaccgtgagctatgattgcaccactgcactccagactgggtgacacagcaagaccctgtctcttgagaaaagaaaaaaataatgcaggtttttatgtatgtgataaaattctcataaaatttgccattttaaccatttttaatgtacaattcattggcattaagtacattcacattgttgtgaaaccgtcaccaccactcatctccaaaactcttttcatcttcccaaactgaaactgtgtccctgttgaacaacaactcaccattttctcctacctccagcccctagcaaccaccattctactttccatgtctatgaatttgactacactgagtacctcatataagtggaatcatatagtatttgtccttctggactggcttatttcacttagcacaatgtcctcaagattcatccatgctgtagcgtgtgtcaggatttccttccttttttagactgaataatattcattgcatatttataccacatttcgtttatccattgacacttgggttgcttccaccttttgactatgtttctaaatactgctgctgcaaacatgggtgtacaaatatctgttcaagtccctactttcaattcatttgggtaagggtttaaagcacaaggagcaggatgtctttgaagatcagtttctgatgaatcaccgttctctgctgagcaaaagtcagctttactcaccatctaattttagactccagcataactatcactggacactcataatatcagacttcattttgatatttgataggctttcacaacattttataattccagtttgatatatccccgatatatcccctttcattgaccacatttcagctggccacttccttatgattgtggaggcacccttgtcacttattggtgggcactggactaggcagtgcgccttactaccgccagcttgctctagtggcgtgggctcttaatgactttgacccttctctttcctgaccctagttgagctgggcttttggccttgtccccagacctggctcttaggacttgaaaccatgagcctgctgatgactaagactgttgaagccacttgtcttcccctcatggcagctttgtgcaagcatggtattatcccccatgtcttccagtttttgtaatctgcttttgtttcatccaattcttatacaacatttagaattattggaattacatatgtgtaacttcctaggaaagtatatttctgaaatgccttggcacaggaccggtttttccccataccagctaaggacacacttgggtgataattggcttccttgagccagtgtccatctgtatttgccaggccacttaggaagtagagatggctggttgtgaaactcttgtcttaatgggcatgtgattattctctgtgttaatttcttcctagcaattctctagattcacaaatgagccaactcaaactactgcataactaaaaatactgagatcagttccagtgtactggtagactttgaactcatgacgtggtaaggacctagactgtgggccatgtggctcttgtgagtgaggcagggactgcccactgtagccatctgcccctgcctagaaggatgttggtgctgctcatagttcccagccagccttccctccctgtgtctcaggccctgtaggggcagcatgtggagaaagcctgtaccctgcactttaggaacttagagtctagttagggaatatgggaacactgacaataagccagccacttctgagacagtcctattttctttgttctattctaatagcagaagtaaaaaggaaaacatcacgggcatacagaataaaagtctcctattcttacccccaaaactctgttcttctggacactgtacatatcctggcctgtagtctgcctttttcatctagatactcaccttgagcccatctctgcctcagtgctgtattcttaaggactgcttgatatttctaaggctgtttttgaatgattgcaattacagtgtgctggcaggaattcagagtcagaaagacccttaatggggtaggtcaggaagatctcttggaggaaccacctagagatcccaggttctgggtaggatccagtgagatgttgcaaaggagaaggaggaggaggaggacatcctctgctacttttctcttctgctcttctcagggctgatggtgccttctcctgctctggcacatggcccctggggcagggagtgggaaggatcaaacaatattttgttgtcaaggcattttcatctttgggaccttactgtagacaccactgt

SEQ ID NO: 45051 - DNA, 590 bp, Homo sapiens
tggaacgctaggactggcaggtggtgtaggcagatacaggtgaatcccactgtggggattcctgctggggtgaccacagtacctgggttgtttaggccttcaatcagtgggagggagttggggaaggggttgttaccaggcatgggcctgggcctggcagtcaggatacaggaggtgtctgtggcccctggactccagcctctggctgccatcctgattgttcccatgtcccatatgtttctcttctgtcccaggctcagtatacaaactccacatcctctgacttggaagctgcccagccctgagctctgcctgggcttcctagtcatacttcccaaagatgtgaccggtttccctgactttgaaccttggctctgatgtcatgtagttagttgaggccaaaggaaaactgatggggactgttcatgtctgtgtgtgagctggagtgaaggaaggtgtgcctaggcagggccttcggttcctggcagtcccctccccagcattcttgtattttcctgccgtgaatctactggagatagagatctggctctgttctgctcttcctcttctctctgagtggctttgggcat

SEQ ID NO: 45052 - DNA, 1012 bp, Homo sapiens
cctgcgctagtcatccctgctttgggcgactgaagcaaggaaaacgcaggtcactcccacctccagacccacgctactccccattgcccatcctcccaacagcccaggagcagagattctgtcctcagctaaaggtgaaaaggtcctaaggcttttgggaaacttggtgctccaggaaataagtgactcgggtttctaagttatgtgtgggcactcaacgcccctgtcatggctgtcacagccctctggtttgaagtcctccattttgtagctgctgtttctaacctctgtcagcactgcctgggagtaatgagttcaaagtccctagttccccacgtttccaagtatgttatgtgaaagccctggcaagaacgaacctgattaaactggaggaaaaaggtggagcaagcaagactaggacgtttttgtttccccagttaagctgcctgaggttcaggggctctgacaggtgagaaaggcatggccaccgcctcagccctgtctctggaggctggggagaaggggaagcagtgaggagactgactgatgtcctgatgcccatgccccacacggcggtcatgaagactgagtggccccatgtccagaaagccctcagcacagggcctggcacttgtgaatacctcaataaatggtaacttaagagagcctgtgaggcccctcccactgcagccagcctccagctgagtctctggcctgaagcccagggatggcctgcacatgaatcaagcaggctatttccagagctggcaggggaggggctttctgtcccaggggcaggcgagccaatcctgtgacagggagagcacagggaaggggttattcaaggggatctgcatgccattgtattctggtttccctgtccagagctgcccatgcaggatcccggggtgggcaggccatccaggcagatggaagggacactctgcctggggctttcctgctgcagtgaccccagggcctggggtggccaggcttcagtgggtagggtagg

SEQ ID NO: 45053 - DNA, 1632 bp, Homo sapiens
aggatattttaaaaaaagacaggacattaaatctctgtgtctgaaaacaggcatggaaagtaatgattttcaccagcaaatcagtctgtactccacccaaaaatttacacatacaaacgggttggggtaaaataaactgccatattaattgttaaaaattaactttaatgctgtaagcaaaagcactaagcatttaatgagttaataaggtactgtagtagagccaatggacaaacaagagtaaacttctatgtgatcatatcactactttccaatcaagtaacaaatgtacacaactaaaaaaatagagatacggcaaccggaaacccataaaaggaccgggagacagtgaaaacaagcaagagctcaaagccacggcaggcacagctacatgactcataggcacctcctcggctgatttgtatgggtcagcagagggcagaactggaggactacaaatatactacaatatcaaagggctatttataaagctttccaaaaaccttggctgtcttttcactaaggaagagaaaaggaaattcatagtgacacctgtcaatatcacccaagaaaatgctgtcctccaactcaaagttaaacttctaggtaagacaagcaacccaggatctttgctcatagctctcggtgttctgaggggtattgagaggtcaggtccacatcacccagtgacacttctccatccagggtgatgcagggctcagatcatgatgaaatcactctacagaacaaacgtcacagccgcccagctgccacttgtccccaactccacacccactaagttaccatagaactggggtaaacagagagaatttaatatgctaatagctctgatctaatagctgacataacaccaattaaatttttaatgacactggagtaataaaagagcccttggcatacttctctttgcaaacatgactcaaagggtggttttccttttgcccttgcttcaatttccagatgccaggccacttagaagccacttatctctttactcagagctggtattcgggggttatcattttataagaaaaggaccacaaattttagaatgcctacctactcagagtatccaactacagcataaggaatccccatttctttccgagtaaaagtgaatggtaaagggtttggagtctagaatctggaatcccaggttaccactctgatgtccctctctttccctgactgattctggttctggctccatgaagaacacgtgacctccatttctaaatcatgggcagaagccaccaagttcatgagatggcttcacacagaatccatggctattagaaaataagagcagcagatcaaactgacctgctggcactcgactgttgagtccactgaccagccctaccaatggcaatgtttgtgcttcatatggaatgaaaaaaacaagttgttgaaagatataaacaacacggtgttacctattgaatacaggatgtatatcaaacacggaatgaaaagatacggaccaaatccttgatagctgttgcttctggtgaatgggaatgagactggggaaggtgtgggagggaacacagatgacctcaatttcattagcatcatttgtgtaaaaaaaaaaaccaaaaaggtaaatat

SEQ ID NO: 45054 - DNA, 1259 bp, Homo sapiens
ccacatttatcttaagttttacacttctggatctttcaaccgttagagatcaaccattaaattacttcaacaagtagaaatagtaacaccgctcccaaacagcaatttttgcattgctagacacttatctagttggcagatttataccattgttcattcttagttccttaaatgtaaaaaatacccacagaatggtagcatacctctaaattagtttaaatatggtacaaagttatttttagttaggttcaagttttaaaaaggcactaattgttctttttaaaggctaatctactcaagttcctcatattaaaaaaaaagttaatttgtctcttttggaaaaaagaaatgttatttatgtaatgctcaagcaaaaagggtgttcaaataatagatctgacatcaaatcagggttaggatcatacttattgttcataaaagtaagtttgacatttattctaatgatggtcctttcaaacactagtatggttaaatgtcatttatatgcactttcaaatataattcttattttaaaaatactcctatcctctactatgcaaagtagaaaaggaagaaaacccccacaagcaattataaacatttttatccatgaaaaaatatatacaagaaatattcacataacatttaagatttgtctattccctccttgcatgctagaaagatgcaaagacaaacacttccaaatactcagacagatcattccccagttgtaactttcatcatagttctcaaagcagtatggtgaggtcagctcacaaacagcttaagtagcaaaactagaaattggtggtagtagtatcaggctacataacagcctctctaaagaagatgaagtaagagaactaaaatgtgctggcaacacgccaaaagactggatggaatatagctttgagcaacaaatactcagagcttacagtatatagcaattcatcatctcttatcctgtagcttgactttccttgttttaaaccaaaaatagccatgtataagaggtatttaacactacaaaatgtgtccatacttatgaaatgaaagatatctgggtctgcaatgatttgtttaactaaatacataccctaaaaaaaaaaaatctgacttacattctgtgtgaagatgaggaaggtaaaatggataaaaatacattgatattattatgcataaaatagcctttattctctaaggattatactaccctcaagcataatctttaaggtttgggttttctatatttttagttc

SEQ ID NO: 45055 - DNA, 1813 bp, Homo sapiens
aatactcagcaagtcttttcttcctctcagggcactaatacgctagccaaacaacaaacgctattcaccttacatgcccctacaatacagggtcaaactcatactcccggtgagatgcagacagcactaaagtcaaatttaaaacagaagtctgaaatcatgtagaagctcaactttatccaaacatttaaaactccacacttcttttaagaaacgtaatttatatgaaataaaccttctggaaataataccattctactatttattaattcatatcctagcctttaaactccaaaattcttggtatggaaaacaacttatctgtagcactttggaaaatatgtacaaaaaacaactctcctaacacttctgcagaacgtttaataaatgaaactattctaattaaaaattaaaacttcactgtagctcaaaagcccaaagggagtaaaacgttttttctattttgaaaaaggaattctttagctattgcaaacaaaggctagcgcagtgatgtgaaatccaagtacaacatgttaataaagctggcattactgttttaagacctaaggatattcacattaaggataaaattatcctgtagtgaatgccaacaatgcatttcatactacacagacacatattcaagggttctactttgttccaattcttttgtgtcccagtaacaaactctcaaattgggatccttatcctcttaaactaaaatgaaatatatgagcttggacataaaatttacttgtgctacattattcattctgagaaagcaaatcagatgaacaatttaacataatctaattctgaaccataaagatatggattagtcagtgatgagcaggtctacttctcatgatgtcattccaaagtcattattaaattttacacatgttattctttcttcaaatcaatcacaaaacaagtcatcccgagactgaggtcaaattccattctaactaaaagatctccaaatctgaagtaatggtctacttactaagtaatactcaaagaccaaattccagaaaaaccctcctcctgtacctccccccaacttaaaaaaaaaaaaaatcagtcttctccttttagctcactgtaatggaatgtgacctgtacttaagggcttttccattcctttttttctgcttacagaatatgaagcagacctattctctctcacaagggcaatatgcttttaaaagaaaaaaaagtgaaatgtacgaagttaataatgtattaattagaacaaacaaaagtaaaataatttactagatttctcacatgtgagttgtcctcctattagaacaatgcatgacacttagaatgagtgtattttttactttttttttttttgaggcagagtttcactcttgttgcccaggctggagtgtaatggcgcaatctcggctcactgcaacctccacctcctgggttcgagcagttctcctgcctcagtctcgtaactgggattacaggtgtgcgccaccatgcctcgctaatttttgtatttttagtagagatggggtttcaccatgttggccaggctggtctcaaacccctaacctcaggggatccacccaccttggcctcctgcagtgctgagattacaggcatgagccactatgcctggccagaatgagtgtatttaaatgacaattgaatttttatttttattttacaacactgatcagacatctgaaagatttatgatttgtatcactcctaataaattaagcagggaagaggaggttaaaactgcacctacttaaataaatcttcttcacatacaatataatattgctat

SEQ ID NO: 45056 - DNA, 1982 bp, Homo sapiens
catctgaagaactcaaaatagtggtcaaaaaagtgtgagataaggcagagaatactggattctagtcccaacttctgacagacttttctggcactggttccttttccagaaaagtagatttaaaatagataaattctagggtcctttccaatccaccccaccgcacaaagcatactggtttggggtcattagtggtgttagaatgctgatcattcttagatagcaaaaatctgaataacaacacatttataagcaactgaggaaaacaggaaacccaattccttccgataccggttttatttggaaaactttactggttttgttttgtttttgacaattccttcaaaagaaggaggttttgttttgttttgtttgacgagtccttcaaaagaagtggagggggggcaaaatcctgaaatgaacattgctgctacaatgcttggttttccgaactgtagatattgcaactttcaaggtacagaaccgaataaatggcctaaaaacaaaggttggacttggagtttttcaaagcaaatgaggcagaattacggatgccacagctcaggcaaggggtccgaagggacccccatttgaaatgctctctttagttcttactatgaaagtgagtccctgaagcctccaaacgcaacgaaatgtctctggagctcagaaagactggacaagcccgagacaggcccgcagacttacccgacccagaccaaccggctcctacccagcaagagccgctcgccccccaccccgtttatggagacccagtgaggccttaggactctgggaaaccattccctagtccactggaccctccttccttctgcaaggctcgtgcctcacttgatattcttgtctatagtcccctcagcctccaaaaagaagacctccgcctgccaaagaccctcttttaccttcttcagctctagatccacgggggcggccatcttggtgcactgtaagcgcctgcgcagtgggagttggactgaaatagggtggggaagggcgcgtcttactttgtgcgccggtctttcttctgcgcctgcgcatgagttggactaaccgggcttcttatctttctctgagaattgactcctgaaatatttgggtttcggattccgtgtcttcactacctgaccggtcaggtctggcttgctcctccgtatcttccagacatagcccaacgcgcagatttcccatgtggctttaagcagtttgccagctagcttaatatgtgctgctaaattgagatgtatgtagatgaggtcaaaccctcatcagtcgatcagtccttcagctagtcgctgtgctctcaggaatgagtaagagtaagtccagaacctcaggcatgacagtttgggaaagactattggaaagcttgtctggagtgttctttccaaaacgaacttattacttccaaaagcttcccaaagacattctaggcacagtggttctcaagagaggctgaatacgtttgtttaaaaacaaaaaaatgcaggttctctgggtctcatctcaaacgtactcagaatctttgagaatggggtctggaaatttgcacttttgcagactaccccagtgacctaatggtgcaactcctccgcggatcacttttttgagaatctctgccataaaaggacctggcatttgaaccagaatagataataattgacttttggaaatggaaaaaaaagttaacctactctaaaaactgttatgctaagagaaagtgctacataaataattaggaaatttattttattttttaaaaaaagaaagaaagagagaaagaaaacaaactgttagggagatgaaagggcagggaatttggaaccagcctaatctagattcaaggcttggtctgcctttagcctatgtctggttccatttactaattgtgtgactttaagcaagtcacttggatattttgtggggtttttttttttttttgtacgtttgtttgtttcttgaga

SEQ ID NO: 45057 - DNA, 688 bp, Homo sapiens
caggggctgggctgagcacgcgctctgccaaggccagggcggcagacactctctccaatctcaggctgccaagatgaggtggagggggtcagggcctctgtctaagatgggggttcacagaaagagaccccttctttctgctcaggctggcagccagttggccatgagccatgtgtgggagaaggggagcagagggaggcagtgtcagggcctcagtgcaaatccttccaggttggaaggctggtgtgggcatcagacagcccagggggctatctcagctcctcctccaccctggagatgttggagggacaacctctaggcagatgtccccacccggctgctggggccactgctgtcacattccagagggggctgagagccacagagcatggattgagaacgagctcaccatggaaaccaggcttcctaggaaaaggtcacatatttgatgtggctgtcatccaggcaccttaaatgccacactgttcctgttttcttgagcacgctgccagcagagaaggcctgagacaatggggttggcagttgacctgtttgcctggttttagacaggcccctatcacggtttccccttctcagcaaaactcagtgctgtttttacattgcctgaccccaacgtgtacccatgtgggcagccctgcaggccaacccttgagtctggcaaagaccc

SEQ ID NO: 45058 - DNA, 928 bp, Homo sapiens
gcagcccccacagtctttcatttcctctcatccagtcccaggccccctcagagctcagaaggtgatacaggtggtcagaggaacccagtgaccagagcttcggggagagcaaggcaggggggccaagccaatcagaaaggggagggagaaggtgcagggtgacagccaggctcctgccatggacagggagcagtgagtcaggtctgcagaggtaagaggagcagccgtgtgggtggggggtgggggtggggtgagtcacagcccagccctgcccagcctaggaggagagggccaggagaatccaggctgttcaggtcatgggcaaccccagagggccactgggagaggatgaagtatgggagcccaggctcagttttggagtatgtgcttgatttatacaaagtagagagagtatccaaggaaagctcctgggaatgagggagaagggcagctgaggagcaggtggaactagaacaggtgggcatctgtccaaccaaatatagtcattccagggtacagtgctgagtccttgctctactctggataatctcctcaggtttggaggcaggagagctggcaggctctggactctgccctgtacctgtacttggccacagccaaagaggctggttggaggatcctacacagccctccccatttggagtctcctcaggaatgcaaggtgctcagtaagctgcaggtttccggtagcattcacagatatccagcattttaatacagccccctaggggctcagtgctcaccattcacagcctcatctagggcggccaagagctcctcattcccctctgtttccccaatctggagacaggtggatggaggaggccaacactgcacactttctagagatgtgcctgggcatctccgcatgtgttacctctattttatatataatagtcatttgata

SEQ ID NO: 45059 - DNA, 1367 bp, Homo sapiens
tattccaggatcccccagtgcccatcaggccgatcagcttttccccgaggttctccatgaataccctcaacccacagtattgcccaaacagcaagaatcttggatctgcttattcttcaacagcccaccaaggtccaaggatggggggcctccacacccacctctcaaaaggtccagatctgcctcttgcaagtcacggactttccggtcccggccgcctcctaggggtagcagctggtccgtggatacagtgggagggtccgggttgctggttccagcagctagccctctccgaagccgctccaggctctcgccagtcaccagtgccgagagaactgcgggcgagaggccaggccgcatcagacacccgcccagacccctgaccaacacgcaccgatgccgacgcccgtccgccagagcgcaagggccccaccaagtggcccgtgccgggtgcgctgcggcgaccttcccccatgcccccagcacaacgcccccatccccccgatctccgggggcgtcggcagccctcttacctgcagccagaaagagcttcagcaccaccgacggcagcagcttcatggtcccgcaccgagaggaggcggcgaggcaccagtcactttcgaagcggcggccactgggcgctggcaccagagctgggcggcggagctcaggagattccgccgggcaccgtctgccgcccgcctctgcgtgcaagcctggccgggacccaggcgcagctcgctcttcttgagtgtcttgtcttgctcactcagcccgcccgcgcggccgcccgaccccgcgcgcctaggtcaggccagccagcagcgtggcccgcgtagctccttcggccgaatgagcgctgcccggctcgcggccgggaataaggctccaggaggcgcggaagctccgccccgcccggcgccgccccctccctcctcccgtgctgggaagctcgcccggctcgcggcgccggcagcgcagcccccgaccccgcgggcgcggcggaggactgggcgggaggagagggcggcgttcacaatttttgggaccaggccgaggcagccgcggcctgattgtgggtagggctactgaccggcaggtggcggagagcggttcctacctttccccaaacgcctgtcactctgcagccttgtgactgactgctgagctgagttctgttccgggcctggcctcttgcttcatctaagccccataccaggggtctccatccctgtcaccctctaagtttcagaagcccaccttttggcctaccaacacggcaagtatcaaataataattaattcatctatcatttaaaaattagacacgtgaatgccagccgttctcataaacccgagataaccaga

SEQ ID NO: 45060 - DNA, 710 bp, Homo sapiens
ccacctcctcactcagactcagcacccctccccaactggaaatatagtgacatgctcttctaattcctgccctgggacctccttggaccagacgcgaggctgggggtagggccggcctgggtgccctttctcaggggatggattcttggtattcaatatgtggggtgtggctgacctacattcagatgagcctgattggccctcccttccccatcctgttgttcttccccaaccccccatctctccgggccattccgcggtgggccagggcaaggctgagggtttaggatctctccctgccatctgggcatctccatctctgcgccccggcaggtctgcagccactgggcctaagggagcggccctagcaatccggtctgaggggagcagtgccctcgtgtggcctccaggagaagcgcggctcttttctcagcccggtcctttgtatgctctcattgaacaagtatttattgagagccactacgtgccaggcgccgctctaggcgccgcggccaagacagatacctgctccacggactgtgcatttcagcgtgtgcgtgcgtggacagtcaggcaataaatgataaacaaatacataaatgaggcagttactagtagtggtaactgctaggaagaaaataaaacagagaaatgtgatggagagtgacccaagagagaaacttagggtaggatgggccgggcgcggtgct

SEQ ID NO: 45061 - DNA, 622 bp, Homo sapiens
aattccattgttgaggaggggtggtgtcccaggaaagagatagggacctatctttggatttggagtcaggcagacctaactctgagttctgctggactactctctcgctaagagacctgaacaaagaccttccctgcccgagcctggctttcacaggtcgcaatatgacctggaccttctagaggcccaggtgtcgccatggttccctcgccggcagagacaagagcagccgctagggggcagggcgccacgagctctggaccgagtcgcagactggttggagatcctcagccaacctggggttcccctcctcctcaggcttccctcgcaacagcgggagatcagaggtcccgccgtcccgcgcctgacctcggctgaggacaggcaccgccatgggccacacgcacacagcccggagttgcagcggaccggcaggtgaggcgagctgggaggaaacaagggtaggtgacctgggggaggggaggagtcacagggaaactgaggtgtgtgctcactgtgggaggggctcacccggtcacagggaaagtagcggggatgcgggtgtggagtgtgaaaacctggatcactgacgaccctcgggcgggaggctgtttgggggcct

SEQ ID NO: 45062 - DNA, 2619 bp, Homo sapiens
cgcccgctatagaatctgaatatttttaacccccctctttactgacaagataaagacagagatagagagatgcatatagggaggaagagatctccttagaggagggaagaccaccacagctagccttgttttgcaccacacagatctgattagaactagaattagttgggctggcaggacccaggggcgagcagagagttcctgaaggaagaggagacaataactagcaaaaatgagtctttcctgtaagtttgggactttgctaagcgctatattatcatctaatttattcataacaacaacccaatgaggaaggtactaatattactcccatttcacagaggagcgagttgaaagtcacaaaaatgaaacagcaaacgcgccgaagtcaggcagcaagtaagtggcagcaccagaactcgaaactgcctcggagcatgcactcttcaccaccccgttccaccttgaggtcggattccgcacgccgttcgcggcattcccaccttcctacgtgggacagttcccggtactgaggcatggcgctgtccagccctcaggcccgcagccgtccgcaagcaggagaacgcggccccgctgggcgatcctgcccgaaggcgcccgaactgcggcgcgcggccgggtcctggcgggcgggtcgagtctccccaaggcggccatcccaagcagctccccggatgtccctcagacccgcgcgctaggctcaactcagaaaggcgggaggcgcgaagcgagatcggccttgcccctcgactgtcccctcatcgctccccgtcctctattccctcccaaatagcccccggcaaataggttacacatcttcacctgtcccagaggtggtgactgctctagtgactgacgctacgctcctccaaccaggcaatggcaggaaggtggagccttcctaagactgatggcttcctttctccaatcccggtgcagctattctccggccatagtctcggcgcccagcggagagcgacaggtgggagctgcgttacttcggcgcctcttgcatccttgacgtagaagtttcaccaagcgcagggtgaagtctactccaaatttgaccaattcttgcgggtcatcacttcagcagtcattttattcagaagtggaaatttcccggccctttcccgtcacctcagatgagggcgggatcaatggtactcccacaggccaattgtaccacgcgacgtcccgcgacaaagtgaccgacactttatggcgccaatgaattctcccattgttcggggtcactatgactgaccacaaggccaactaatccactttaaggtcgtgacgcgatagtcaggcgggttggccaatagacataggaaaagagcggaagtcagctggtgaagagtgggaggcgggtgttcgcaaccgcctaggcctgcgcgggtcaacgcagcttggcggctgcgagccagcgagcggcgcgtgacgaagagcctgagcgacgggtcactttggccaatgatctgcagccgccagggtattgcagccagtggcgagtcgagggggcgggaggcagcaggttaggcagtgagaagttagtggcgctgctgggacgggggaaaggagacgcttcttcctcttgctgctcttctcgttcccgagatcagcggcggcggtgaccgcgagtgggtcggcaccgtctccggctccgggtgcgaacaatgctgactgatagcggaggcggcggcacctcctttgaggaggacctggactctgtggctccgcgatccgccccagctggggcctcggagccgcctccgccgggaggggtcggtctggggatccgcaccgtgaggctctttggggaggccgggccagcgtcgggagtcggcagcagcggcggcggcggcagcggcagcggtacgggcggaggggacgcggcgctggatttcaagttggcggctgccgtgctgaggaccgggggtggaggtggtgcctctggcagtgacgaggacgaagtgtccgaggtaaggctccgggaccctcgcctcccacacattgtgaggcgtgaattctctttgggtaggctctgggccggggccatcctcccgcttccctggtggagcccttctgtgacagcggtcggctccatggcggcggtggccgcggtgagggcctagtgagccctcggcttactctttagctcgagcgggacaggttcccgtcaccattcgtagacccacaatagggagtcctttggtctctgagcttcgcgcgggaacagggactcctcaggctgcctcccgcccaccctgctttggagttgggggtggggggcggggtcttgccagagtccctgcccttggtactgagagagacaaacagagacagagacagagctggtgcaaagatcgtttctcttctttgcctctcctcagagttgagggatacgtttatttgccttctgccttgtgtgtgtcttacctgtgtgcttaaggacggttcttattctccctcttcagtttgagacaggtttgagtattagggatctctcggcttttaccctgaaaaatcacgtgactcctccttctgggaccttttgtgaagttagacaggaaaaggaagttccagggcatccct

SEQ ID NO: 45063 - DNA, 546 bp, Homo sapiens
ccaagtagtcaggactacaggggactataggtgtgcaccacaatacttggctagtatgatctataatctagagcagtttctcaagagcaacatatagacattttgggacagagaattctttgttgtgaggggctctcctgtgcattagaagcatccctggcctctacccactagatgccagtagaacccgattatgatagccaaaaattgttcagacgttgccaaatgtctcctagggacaaaatcactcctggttgagagctaccggtctagaggccactcttgtcaggaatggtagttttgttatactctgtattcaaacttaaggtaaacaaggtgagtcactgcttttaatagcatttcaggacttatgcttataacctgaacaagggagaaatagaaggtactgaaaggtttaatataaaactagcatgcactgctgtaaattttctatggtaaatgtatcattttggggaactttcacttaaaatatattatttttcaaaaagttcagttgtccatgaaaatgaatttttaaaaaacttt

SEQ ID NO: 45064 - DNA, 572 bp, Homo sapiens
taaggtttaagtgtactaattcttttttttttttttttttttttttttttttttttttttttgatgtggggtctggctctgttacccagggtggaatgcagtggcacgatctcggctcactgcaaccttctcctcctgggttcaaatgattctccttccttagcctcccgagtagctagaattacaggtatgtgctaaaatccagcctgggtgacagggcaagactccgtctcaaaaaaaaaacaaaaaaaaacaaaaaaacaaaaacgtagtttatcactgacttacctctgtaaccataaagtaagccctctgacctttgttgctttctttggactgtattctgctgactgagtgaactatattgggcattttccaaaaatagttgagcaattggaaactaggtaatttagacatgggtacattagtactctgtagttcttcttcctggaacttatttccttttaaatgagatttgatatggacctcccttaatagaaagaaaaatatcttatggatcagtttattatctgtattaaatcttataaatagaaaacatagacccaagtcct

SEQ ID NO: 45065 - DNA, 1029 bp, Homo sapiens
atatgcgtatatatgtgtgtgtgtatataatgggaatcaatgggaatatatgtgtgtaatgtatatatgtatgtatataatgggaaccaataatgggaatatatatgtataatgtatgtatataatgggaatcaatgtactcctatatatatacatacatatatatgtatataatggggattttccatatatacatatatagatatattattatttttttcttttttctgcttcttgcacagcagggctaacccatagggagtgtgcccacagtagcctgattcccattttaaaagaaagatttagtagtcagatattttggggcaaatattgtgtgttgtgggatatacattattcattttaagacacaaaatgttgtaatacagagttgtggcattgttttatcaacttttttcaaatgtgattatgttattcaaaactaagggaatgaatgtatatttatagagaggaaaataaaataggtagcttttcaccccttttatttcaggaattaatatgttgaattttgaaatgacttggtgtgaggatattgggactgtactttctgatttcttgtcttttaacaactatggtaatattttaaatatacagaattaacagttattttttaaagtttattctaaatcagggctgaaagctttgaaatcatttttcatgatttcatttgaaatgtctttgccatgactcacgggacctaattatgttgatatgacctaattatgttgatcactgccaggcttaagaaataagaaagagaaaagggtaaagtaaggataagtgacattaatattgcccaactatgttctaataataacatatcagttgcagataatcaatgtcttactctcgggcttaactactactcttaatttcttgtttagttgactttcctttctcttatttacctagtagaaaataataaaaacttcaaacctcagtgctatgagagggaagatttgcaagttcagttatgcttggtttcctgcatgattaaacaatatttaatca

SEQ ID NO: 45066 - DNA, 681 bp, Homo sapiens
aatgggatgttcagataaaactaagtattccatattataatatttgtggttagaagataaggtgcattaaaatgattgtcacttgatgatttgaagattgggatttttgcattaactttcttaatgaaagcacacaaccacaccacaccacacacacacacacacacacacacacacacacacacacacacagaaaaaaaggcctgataaccttgaagtatatgtttctgtttattgttgtgtggaaaattacaactagatatgaaatgaggtgcacaagtttactttccctttcattgtccttgcagcagtgggaaaacagtgcaattaatcatttaccttcctaaagatggctggtgaatgtatcacctccatgagagcccaattcagaaatgcagccagaatggctgttgacagtggatgaagaccaagaactaagatgtagctggagtgatattcaaaggcaggccagtcctctgtctcttgattgcaacatttttttccttactgttgtctgttgcctcttgtcatattctcctccccttctcccatcccaattatgctatctcagtttcctttcttcttttgtgagcctttagtcttcctgatctttactgaatctttttaaatgtggaataagattactgaaatcaggaattttattgggcatgtgtttgactt

SEQ ID NO: 45067 - DNA, 2558 bp, Homo sapiens
gaagcaatctttttttaaatgagtgaagaaatcagacctaaggagaaatctgatgaagccagagctgagttaatattgataaatggatgcagtcaggtggtctatacttaatttttggtgaggggaagggacagtggaggcagtattgattttgaggaagccaaacaggacagcctgatgaattcaagatttccagcatatatacatcttcaccaatcccaccaccttgctccagcctgtcatatcactgtgtctacataaaaaaaaaaaacaaaaaaaaaactccaaggccaaactctctgacctttctttccttctaaagaccaagccctcctcactagccccctgcccctccttagttaactggcaaagagatcaaagggcaggccttctgactggtgatgcctcagctgtagcccccaaacttgactcatccttttattagtccaggtaccacttcttcagaaagatgaccagccctcactgaccttccccttcctgctgtgctccaggccatcaaggcatgtgtcacccaggctggagtgcagtggtgcaatctccgctcactgcaacctccgcctcctgggttcaacctatccttccacctcagcttcccgagtagctgggtctacaggcgcatgctgccgcacccggctaatttttgtatttttagtagagtctaggtttcaccatgttgcccaggctggtctcagactcctgggctcaagctatccacccgccttagcctcccaaagtgctgggattacaggccgtgagccaccgcacccggccttgtactgttactgtttatgggaggcagtacacagctgggcttaagggcacagtcctggaatcagatgcagtcagatttgaatcccagcttcccttcctgcaagatgtgtgactttggctaatcatagtgctttactatccaaaagttggcaaggaatgggtgaactaatacaggataaaaacgcttgccctacttcacctgcccccagctcccggctataaacagtaaatagctgagctgctgcagcactcaggcaggttggccagcgctgggccagcaggaactggaagctggtgtggggcctgggactttggacgcatttccagctttctctgaaccgggctggcttcctagcagatagggcgggaccgtcgggttgagtgacggccggtggcccgccctgggcgtgacgttgttctagtgttgttgccagcagctgcacgtggtcggctgagtccgcctcagactcagagctgcgctcctcgacctcaacgccaggcggttactttgctgctcctcccgctcgctatgtcaacgtccactagctgcccgattcccgggggccgggaccagctgcccgactgctacagcaccacgccggggggcacgctatacgccactacccccggaggtcagcgggccgggcaggggtccgcaggctgcggacatattagcgcgtgcgtgttgttgcggggcgggggtaggggagggacagacctaagacttgtccgcaggcccctctacaggttgtagctttgggggagaatgtttggagcggaagctcagttcccaaaaacttctaagtgatgcaacaaggccatgagcctagcttccgggtgtttgggctgtaatccttcactgtggcctgggttcttggagccttacacacgctccttacccctcgcgactttgcttcctaggaataggggccagggccccctactgagcgtgacctcagccggaagcaccgggtcttgagaagtggagtagttagaacagttggggcagttgctccgtttttgtgctgctggctggcgtctgtttggttgggcgagcagcctgggatcacgagctgctgggctcccgacccagggattcctgccacgcggaagcggaggggaggaacagggcaggaccctttgaggacattatgcgggccaagttcctctgagctagtgtgaaccttataggacctgggaggggtcaggattagaacagtacgtttctcctccctgcaggagatagcccaggtaacagcactgggtggaacccttcacaactgctatttcacttcttgaaccacctgaggctgttagtctaggtctcaccttcactggtgagaccaaagcagaggtttcagagtggtagaggagcagcatgaagtacctgaactcaaagtttggtgttcctcttagagccaagatctgaagctctcccaaacataaagcccctgcctataccagctgggatgccccccttgctttatacccacatcttggttaggtctggaagattttaagcactatgaaggcttgtctgctgagaacctagctgggcttcagagccgatgtcctttgatacacagggaaatttgacaccaccctcacctccaggccccaaaaggcctgagtctgggaccccagtcacctcggtacccaagctcctgactcttacctcagtcccaaccccttgacaggcaccaggatcatctacgaccgaaagttcctgctggagtgcaagaactcacccattgcccggacacccc

SEQ ID NO: 45068 - DNA, 2124 bp, Homo sapiens
gccaaacttattccttttgcagctgtttcttttgcttggaatgcttttgtacatgatctttgtgtggcttaaatgtcagcccctcagacacctcgttacccagtcatattacatcaccgcttattttctgtagcaccctcaccactatttcatctttcagcccatctccagtgctgcaacgtggacttcctgaaagcagagatcttttttttttttttctcactgctgtctagttcgccctcaaacagtgcctgacttatagaagtgctcagtaaataacagtgattaaatgaatgaaaaactgtgaagtctgacgattatcatatacctaagtgaagacagaatggacaaatgaatatgccactatacggttctggcaagaggtataggttaacaaagaaaaataacttcaggattaaaactatattaaaagccacaggtctggataagatcatctaggatgaaaaaatagtctttttaaatcaatacaccatttattaacctgagcagcagagaaggggctcggaaaagcacctgctctgagacccttactggagccccaaaacttctctccttaaggagccctcggggagagaaaaaagccttccaaacaggcttatgccttacacccccccccccccattctccgtctgtctccgagcacaggggccccacgcacctctgggggatccatcctggggtgcggcgaccctcttggtaagcagcgagcgcctgggtccgccggcctgggtctgcagcccgtatgagaactgcggcgggtcgttccagccgcgttccttgttgcctgcggaggcgagggatgtgtgaagcgagcccggaactccactgttagcttatactggggctgggggagacagagggtccatactaagcgccgcaaccgcccccagcctaggccggggcgacaacctagtgccctagcccgccggctgcgctcacccggcttcacgtacagctccgccatctccacttccgcttggccagcggggcagcgcgtcatttccggggcggcccctcacgcgggccagttgagacacgtccagggccaggcgggttgccggaatccgtggaggatggatgctggttcacaaccgtcgggagccgctgtggggaccctgcggcaactccctaagactcgaaggctccatctaatgaaccatcagggccctggtcacaaggcaccaaaggaggttgctgtccaggagccagtgctctaggaggcctcatcctctcaggagcaaattcaaacaaagaagctcctgccccacatacaccccgctgtgatctagccaggttgacttctacagcctcctcttgcattgccctgcacaatctccacattcacgtccggtagcctcactagtactcatcttccttcagttctcagttcagatgtcagttcttcaggaggccttctggaatgtctcaggccaggttaagtgtctcacttgagctcccacgaccctacaaccctctgagatttcgtaggtgtattacatcacatcttctgccttatttgactcttgttcgtttccctgtcggacagtcttagaaggtgggaccttgactattttattacattcccagtgcccagcttagtgcctggcacagggaactccttagaaaatatgtttgttgaatgaagtcagatctccatcacacccatgctgtcatgtgactacagagagccaccaacatcaagcacagacacaaagacactcatctcacacagggtgttagcccccagccctgtcccaggcccaatatactcacatccagtgaggtcactgagggatttttatttgcactgattttgctataaagtgttactgaggtagagccaactgtccagggttggacaggggcaaggaacacaaggacccaaggaaaggggagccagggtcctacgttgtggtgcagtgcctcccagtcatccgtataaacaataaattgggcaataaatagacggtggacaaggatcggagggacaggcagagaaggcttcaaggagtgacaggctataggccttgaggaataaaacggtacagagttaggcatggacccagagcctacttccccagccttcccagataagtttagggc

SEQ ID NO: 45069 - DNA, 661 bp, Homo sapiens
aatagcgattattatgtgaaatgtcctggcctttaaatattggcaactaattaaaacttactaaaaacaacatgagggccaaaacattaatgaaccagaatcagcccaggtttgtgatctctgaagaggctgccgacccggagcccaagtaaacagtggagagcagctgcagggcaatcccaccaacccattcccacccatgactcaccatacaggcagcctgcacagcttcagagagtccccctgcatggggctggcaccagaaggctgcgcactggaagctctgacggcccaggtcagcgatgaggccaaaggtgtgtgggtcgcggccaacaccaataaatgtcacaaggcgcacagggcactgccacaatggctcctcctctgtactggcctctgcctgcccacaccaggcctagtcactagagggccaagcacgggccagacccacttaacttttccgacagcaagcagtgacccctcagcatccctgctcacccctccaaagcccccaacttcaccctcttctggtacctgaatggggtgtgcagtcatgagagagtcagacacactgagcatggtggggacccaggcattccggtcccccctggcggtgagggtaccaatggcctcgttcagcacatccatgcctgggggaaca

SEQ ID NO: 45070 - DNA, 2695 bp, Homo sapiens
aacctgggctggaaagcagaccatgggtccagctgcatttttgaacaccatggaaccccaagcctttcattttgcctgggccacccgttacctccggtccagtgaactctccaggctggagaaggatctccctttggggggccgcagtccccagatcccctccgttccctgtagagtgggagttagtcagtttaacagcagacctaggtccacacatgggctcagacctcctcctcacactctacctaccgtgcctgggtcctctgcatctcctagttcccaggttgggcgctgccactgggtgctaccgctgggtacatgccagtagtaagtacctgcagcatcgtggatcttcctccagccaggaggcaggccagcctccacctccagactgtggtccccccacaagtcatctacaggaacaccggattagagaggagggagcatatgatttgtgagttcagaataacatgctgtcataatcccctctccatccccaaaatgggtcagttcttaggctgaagatccaggctcctcaatcttgaagacatcacatgtaaagaccgggttcattcgccccctggtccctacacagagaggtatcccccaccgtctttgagccccagagtagcctttcggattccctcgtcctccctcagctcctggtcttcccaccgggcccctccgtgcacaccatcgcagttgaccagaatgatggccagcatgtaatccttgcccagcataaccccggctgctccccgccagcctctgccggcccgcactctcagcccagcgcgacctctggagctactgcgcctgcaagcccagcctctctgcgccgcaggctgcggggccagctggcgccgcacaaatacggggcgggacacggggcgggacacgggccggtcccgggggagggcctgagccgcacagcccgcccaggggtggtgcgtgtaaacgggcgtctggatccccgaatggttgcgtgtttccgtgtgtgggtccgggggaggcccacgaacgccagcgaaaccgctgacaccaccgcccaactatgaactcatcaggcgcctgaagaccgacacgccgaacatgcgccgcgcgcactcgcgcacgagtgagatcatcgcgccccggtcgtgagtgcgctcacacgcagcctgagactcgacgggagggggtcacgtggaagtatctgagagaggcgtacttggccactaggaaagcacctccccctttccaaaaatgctccggaagtgccttcgccctccgtaaagatggccggggcagtcggcacgagggaggcggggatgcgcctgcgcaacaagttcggcggggaagatggcggatgacaaggtgagtggccgtgggggtgatctgcagccgggcgtggtcttcactctccttgacctttttagttccggggagaagcgactctggagcggctcaggagtgaggatgtcccttgtttcttctgcggctcctgtcaactgcctcaacagtgtggagtggtgtggggagagcattcggcgaggcgggaggagccgtggatcccccagatgtcccctcctgggaaccatcacgaacccgttactagcacagactcaaaaacattcacccttaaacactcctcactttaccccattccctagctcccgaaattttcttcccagtgacacgatgtttccaatcacacggacactcacaccaccctcattcaaacactcctttgcatacattctgaatttcatacttatatgcgatcaaaatcactcagtccatttacttacacacttgccgacagtcttttttgtcattctcagtcacatccagtcactcacattcagtttgggatgtccttgggaagaaagaggtaaagcccatccaggaaccaagacaataaaattgtccaggaaactgcctcggtccattactcaccattggtctagaagctcagcattacccacacatttactaaatgtcaggcactagaacatagtagccaagacagactggtcacgactttcaaggagctcataatggagtcagtagtggtttcctgatggacctaattaaaggtccctagctgtccctcctgcctttcctacatactgcttgctatataaaattcttgtcaaggttgatgtaagttactggttcagatcccatctgtcagtcccttcctggccctcatttgaattctgtgcttttcaatgcttgtctttctttgccactgccatctcaggaagcttttataggaaaaggtctttctggctcaccccatcccctcccaattcccagcttctgatggaattgagcaaggggtggggcttagtcagactgctggagccagcctctcgcttgtcctaggattctctgcctaagcttaaggacctggcatttctcaagaaccagctggaaagcctgcagcggcgtgtagaagacgaagtcaacagtggagtgggccaggtaaggactgtcccaccccacccctgccttaggctttattgcccaacatgctcttgagagtgttaaatggatggtagagatttcttcagcaagtgattattgagggcctattctcagtcaccctaaggacaatttttctgaatggcacatgaactaatatcttaagtagtggttaagtaggtgaagaggggaggaaagaacattccaggcagaacagcatatgtaa

SEQ ID NO: 45071 - DNA, 845 bp, Homo sapiens
tactgcatcccacagggtgggcctcacctgtttcacctgcatcctccttcctgaggcccccaacagagcagcctggagcaaactgagggagctacctagtaaagggacactccaagtgaattactccttcctgtggactccaaagcacgctgcttgtgatacttttactttttattagtagtactattcataaaaatatctaactcccactagacttttacatatgcttgatggcacttcactaaggctgttcatggattgcctctttttatccacacaacactccaatcaggcagaagctctaatctatcctgcctcccccgacattttccagatgaggcaatagaagctcaaagaggtcaagcaacttcttggcaagtggcagagcctaaactcaagcccatgcccttcaacatgataccaaactggcctgaagataaacacgtctggccctcactgctttatccttgtgggtgtgaactgctgtaacctatcttcctcattccaagggacctcccacagcggaggtctgggaacttgctagccaaatgaatgtgggtttgttgattttggagatgagggccagacatttttttactcttttattatggaaaatttcaaacatatacaaagtataggaaatcctgtctacctgtcacctagctttgacagttatcaactcatgccatttctgtttgatcaatacccccacctcgacctcccccaaatccctgacatcataacatttcagaggcttgatttttttttctttttttccaccagcatctacattaaggacacagaggctttgtttttttattttttatttttttgagatggagtct

SEQ ID NO: 45072 - DNA, 2397 bp, Homo sapiens
tcttctattttctgcctttacagattagccaattctggacatttcatataaatagaattatacactgtgtggccttttgtgtctgtttttttccatttagcattatattttcagtgttcatctacgttgtagcatgtctgagtacttcttccctttctactgtggataatgtttcataatagagttctgtcaccaacctcctggagtttggccaagtttcaccataaagggcattgtcctccgtgagactgcacttctgagaacagtctcaagttaagaggtccccaggccttcctcactccagatgtctacaggttttggtgttccactactccttcaggcttgacaattcactagaacagctcgcagaactcaagtaaatgctacagttactgtgtctgacactaattctctcacaccagctgagggtcctatgattcaattcaactctgatactgactacctggagttagtgtcaggtcctgtgagttaaaatacaaggtccccaacaagactgaccttaattcaaatgccagctgcaagtgggatcaccaggctactcacacatttgtctgacttggctacagattcaggggtttcccatgaccccaccccagattcagtaattcacttgaatgactcgcagaactcagagaagtgcttactattacctttttattataaaggatacaaatgaatagtcatatgaagaggaataaagggaaaggtttggaaaggtcttcggtgcaggagcttctgtccctgtggagtcagggtccatcaccctcctggtatatcagcgtcttcactaattggaaagctccctgaggttcattgtccagagtttccatgaaggtttcattatgcaggcataattgagtaaatcactggctgcatgattgaactcaattccagccccattcccctccctgaagtcagggggagggactaagaatgccaaccctctagtcacatggatggcccttctccatctcatagtcatctagaggccctgccaagaatcaccttgcagaacagttatgctggtggccttgaactgacccagttctctcttttttgcttgtagttctcaaaaataactagaatattctgtgaatgcaacatccagtgataaggagcgactggctggaacagcctgggctctgttccagtcccccctagaaacaggatgtccttcaacactttagcccagcatgtcatgttacccctggggtataaagcccagggtgggctgctatccagggtccctcagctgcggcgcaagtggagtatgtacaaacaaagcttcatctaccttggtaactttcctgagccttggaagaccagctcaacatgaatcctaggcttctgctgtcctttgctgtctttctgtaagtaataaaactacttcatgtaatttgtgtgagggtgttgtgtctcaccagcctcagataagttggtaaccagtgcagagtaaacctgccttgcacaactcattagcataacaggctcctataattctaaagatttttgaagctctgtgccaggaactggggttgaagaccagacatattctttattatatcacaggccaccccctagccttttcagcaaaaggatcatacctgtctgatcatccacatttggtgtagcatttatataacagatacagcaatagtaccaacatgaatatgcctaatatttggagaagtcagtgtggggtagggataggaggtcttaaatccaattttgcaatacatttggctatcagtttcagtacagtattataatcttgccaataatggctgtattatatcaaattgaggtagatgtaatatgaaatataagagtaatcagttcattatcatatactatgaccaaaatgtctcccacagaaaggccacccaggtgtgcaggcttccattcaatcttgttaaattccaaaagcaggtgtggtctcagcaaaatatggcttcatcctttcagacctctggtataaccatatcatcccttgctctgggtctctttcaaagtgttagcataatattggatttccctaattgggttattcattccataccctcagctattattcttcattctctcatttatacccaaacttttctacctttggaagggacattaggagaggccactgtgctagtccagattgctggcaacaatagtagtttaacaagtgcctccccttcagtccactccaatttatatagattagggctatatagctacaggactaatggactatcttagccactggatgatacagcagcatttactgtcaactcaaattttgccagatgggttgagggcacaacttaacctatagggtccttagaaatgctgaaataaagatttaaaggtatagttacaatgtct

SEQ ID NO: 45073 - DNA, 2217 bp, Homo sapiens
gcgaatacaataaaatatggtcaacatatagaaagtttaatttaggcaacaagatgttgcccatgctgttcccccaagaaataaatcctgcttaattccttgtccaaaggcatcaacatggactgccaaacccctcatcatgtggcttctgccttcctttcctactatttctattctccatatacactaggtctccaacttttctagtactcagtatgagaattgcttactcacacctccaaggctttgcctattctgttccctctgcatggttccttctcttcctttttaaaaaagaacctcttttctctcacttcctacacttgcaatctcccgaattcctacatctccctcaaaacccagctccagtgtcacctctgtgatgacctcactgctgtccagtcagagccaggcatttgctaggcctcaacaccgccctacacatcccacttatagtacttagagcagtttgtaactgtttacagtttcatttcgtctttttgaatttcttaattgaggtgaaattcatgttacatataattagtcattttaaagtgtggctgggagtggtggctcacacctgtaatcccagcacttttcagaggctgaggcacgtggatcacttgaggtcaggagtttgagaccagcctaaccaacatagccaaaccccatctctacaaaaatacaaaaaattagccaggcgtggtggcacacacctataatcccagctacttgggaggctgaggcaggagaatcgcttgaacctgggaggtggaggttacggtgagccaacatcatgccactgcactccagccttggccatagagcaaaactctgtctctctcacacacacacacaaacacacacacacaaaaaaaaaggaaaggaaaaaagaaaagaaaaatggccatgcgtggtggctcacgcctgtaatcccagcactttgggaggccaaggtgggcggatcacctgaggtcaggagtttgagactagcctggccacatggtgaaaccccgtctctactaataatacaaaaattagccagggtgagccgagatagtgccgctgcactccagcctgggaaacaagagtgaaattctgtctcaaaaaaaaaaaagtgtatgattcagtggtatttagtgtattcgcactgttgtgcaaccatcacttctttctagtttcaaaacttttccatcatgcccaaaacacatgccatacccattaagtaatcacttcccattcctctctctcccctccccaggtgaccactaagcagttttctgtctttatgaatttgcctattctggatatattatataaaagaaggcaaacaataacaacatgtgactttcagtgtttggcttattttattttattattttattttattttattttatttttgaagcagagtttcactccattgcccaggctggagtgcagtgacgtgatcttggctcactgcaacctgcacctcccaggttcaagcgcttttcctgcctcagccttccaagtagctgagattacaggtgctcgtcaccacactcagctaatttttgtatttttagtagaaacaggattacaccatgttggccaggttggtctcaaactcctgacctcaggtgatctgcccgcctcggcctccgaaagtgctgggatcacaagtgtgagccactgtgcctggccagtgtctgacttcttttacttagcattagtttaaagttcatccaagttgtggcatgtatcaatatttggggtttttttttgctgtataatattccattaaatgttcatatcacaatttatttatccatcatctgttgatgagcatttgggttattttcaccattcggttattatgaatactgctgctataaacatttgtgtgcaagtttctgtgtagatatatgttttcatttctcttgagtatatactaaggagtagaattgatgggtcatatggtaattatatgtttaactttttgaggaactgctagctgtttccagagtagctgcaccattttactttcccaatagcaaggtatgagagttcctgtttttccacatcctcaccaacacttgttattttatttaaaaaatttatcattatagcagtatggtgagtgtgtagtgatatctcattgtgcctttaatttgcgttccctttatgatcaatgatgttgaacatcttttcatatgcttgttagccatttgtatag

SEQ ID NO: 45074 - DNA, 660 bp, Homo sapiens
ctgaagatgacagctccatgcttattaattgcccctgaagaccttccagtgggacaagatgtgggggtggaatacaacgatgttgatgagcttgactctgtgtaggcccgggctaatgtgtgtggtttgtgtcttagtttttaacaaaatagtttaaaaagtaaaaaaaaaaaataataataataataatggaaaaaaccttatagactactgtttaaaataaaatttgctattttggccatttttaagtgtataataaatacagtggtattaattgcattcacaatattgtgcaaccattgctactatttacaatgcttttcatcatcctaaacagaaactctgtacccattatgcaataactccctgtctcctctccctctagaacccattaacctttaatctacttaccatctgactaagcttacctattatagatactcagcataagtggaatcatacaatatttgcctttttgtgtctggcttatttcacttagcataatgttgtcaaggtttatctatgttgtaacatgtatcagacgtcattactttctgtggctaaataatattccgttgtctgtgtataccacattttatgtattcatttatccactagtggacacttgaatcatttccatgttttagctatagtgtatag

SEQ ID NO: 45075 - DNA, 2220 bp, Homo sapiens
ttgtatcttccaaatatcatgcaaataccttttaatccagatgccaataatctgctcagaaagccctgactgcacactcattgtttctcccatgcagccctagccaggagtcctttcctggctccttctatccccgcagttcttttcttgaggaggacagatagggtttcttagggagttaggatgaagaaagcctaagtatgatgaattccccatccagcactgtgcccagcacatagcagacatccaataaaggtctgttaaatgaatgacacggacccgttgtttaagattttaataaaggtggggcaaagggttgaattggtcgaaaagtcctcaacgtcctgacgggactcccctgaagccaaggcagtttgagtccattcattattctgtcttggatcttaggcaaagccccgggccccttggagcagcaccagggttcccgacacccccaccgacagggtcgaacgtgcacaggctgggaccacgccggagttcattgagccctcgtgggggagggcagttccagggaccaggaagggattcccgtccagtgtcaggttatccacctcgggcagctcgtcaggctgcggcgccctgttcagtctgttgcagctgagatcgagcactctgagcttggctggcagtcctttaggcacctgttccagcccagcgaacgacagattgagggagttcagggcgctggaccacatgcatctcggagcgctagggtttacggtggcgcgcagcgagttgtggctgaggtctaggctgtggggctgcacacctgccgccgccagtgcggcgcacacgcctgtgggcgtctccattcctgtgttgcgcagcgctagattctggatggccgggaacttgtggggacagagagccgccatcagtccgcgttcgcccagtccaggattgtcagacaggtctaggctggtaagggccgggaaggcgcgaacctgttcgcaggaaaaggcaggcgagtgtgcttgggcaatgctcagtaccttgaggcctggcttgagccactgctgcagctcggcgagccaagaacgccctgtcgcccacgacacgttgcgtaggcgcaagctggaaagtgcaagtcctgtggcttccagaggcagcggaggcatggtgccggttatctttaggtcctcgagcgtcagttccttgaggcgggagtacgctagcacacgcagggcgcctaccagtagctgagcaggaacctgtgcggctcccactgtgagccgccgcacgcggagagccttgaccgtgtcagcatactgccgcgggtcggcgtccgcatcgacgcgctttagaaacggctctaggttgagaccgccggcatggatctccacctctactgcagacacacactggaaggcttcggaccagtcgggctgaggttcggagaagttgcagacgcagcggaaatcttcatcgtccagctcacaaggttctggcgtggtcgcagagacgtgcaccagcggcagcagcagcagcaacaagcaggacgcgcgctcctggggagagagcagaggtctaggaggccccatccaacccctgtggctcccgagtggcacgcgttcgaccccaagaccctacactcaccatggtcgataagtcttccgaacctctgagctccggacaggctctggaagtgctttagcttctttcctacacagcggcacccgccggcttccaggcttcacacttgtgaactcttcggctgcctctgacagtttatgtaatcctgggatgtcattcagttccctcctctgtgaaccctgatcacctccccacctctcttcctccgagccagcccccttcctttcctggaaatattgcaatgaaggatgtttcagggagggggaccgtaacaggaaggattctgcagggcatctagggttctgtgtctcctggcagtgtcctgatgactcaggcgccccaggcggtgaatgccctgttgactcgggagcctaagccttctctggtgggtgtgggaaaaggatgatcctcagtgccttaggccagtaccatactctgcactatccaaccccccaatccccctaccttatatcccagagaatctacttgattcatttctttgacttcttccttgtcttggtttatgttgatctcctgccaccaaatccaagtccctgaatatcctcagatatttaactgcatgttttgtggaagagattgtgaacc

SEQ ID NO: 45076 - DNA, 1481 bp, Homo sapiens
accaggcccggcccaaccagtgtatttcttgaatgaactgaagtctcatatctccctaaaatatgtaaaaccaagctgtaccggaccaccttgggcacatgttctcaggacctcctgagggctgtgtcaagggccatggtcactcatatttggctcagaataagtctcttcaaatattttacagagttggactcttttcgttgacaattcaatgacgcttcaagcgtttttggcagctctcatcagtgggatccgcattaatagtgaaacggcatcatggcgcttcccgcagttcgggattgttttgaactttcatctagagcgtattgtgggtggggaagttgtgtttgctgagtagattgtgacactgctggcttgggtcactcgaggtcagggatgagagactttttttcctagaattggtaagacaggaaatcaatcagaggcagagcgacgcctctggctctggtctagtggtgcagcgtctctagccctcgccccgcccaccgtccccgcgaggcgtccactcgccgagccccgccctcacccagcacccaccccgctcctcgcgccctccccgcctgttcccgccctgtgctgaggctgcgcagtcggtgccatcttctacgcccctgggagcgttgtggctgctgtttccttcggctttcctcctcctgctccaccatgtggagccgacggcagggccgcctcaggcccacggtctgcggggtggaggagctacggcgccgccggcgggagcgggaggcaggtgtgggcggccgagggagcgcgggggtatatggcggtcggggataagttgagaccccaggctcggagccgcgggttctgggttgtggtcgtccttcccacgctcagccggctcctctgcccccagcactgcggaaggcgcggagggagcagcagctggtcagcaagaggctgctgagaaacgacgccccagaggaagctggagagggatgtgtggctgcgatcctcggggaaaccgaggtgagggggcaaggtagggtgcgctggagtccacgcccgctggcgccagactcccgggagtactcgaggtctgccccaaacctgaacgcaatccactctacacttccacgcatccagtgggtcaagccagaaacaggggaatcatcctgcacaactctttgacccacaaccccatatcgatccatcatcaagtcctagttgtttacctcctgaagagctttggagtctttacatgcctcaccatcgaagctgccaccaccacctcctctctggatactactgcagtctcctaaaaggtcaccctgcatctatgcttgtcaccgtcactacgtcctttaaaaacacgtggagaccaaaatctttcctgtgccttgcaaagcatagcatggtctagcctcttcctaactcaaattttatcagttttctcatcctacccaccgtcctctttttagttcctgcaacgatatatcgga

SEQ ID NO: 45077 - DNA, 439 bp, Homo sapiens
ttgggtttggacactttcccatctgggcagggctttgggtttggacactctcccacctgctatcagggtttggtaagaaccactggcatcttcgtggttcctacttacagccctgcttctgccagcagctccatcttggcctccactctccctcagcacatgctacaaatgttgcaacctggcccaaagctcaaccctggggtcgctgtggagtttgcctggtgccttcattacatcatctgcaggtaacagggcaattgggaaagtaccacagatcttccctggggctcccttccatgacattcaactctttgaacttgtgtctggaattgctatagtgagttttcctccctccactgtcttctctttttggagcccaggagacccacagaccttagctgtttctctttttttttgagacagtctcactctgtcaccc

SEQ ID NO: 45078 - DNA, 1460 bp, Homo sapiens
cactcagcacagggcccagctctatgtgcaaaattactgagattctcacacactacctggactgacactggctacacgttatttggagaaactatattgactaacttctctcctgtctgaagcccattcttaactacaaaaacgtcagctcctggtccctacgcaggattcggtcagcctgcatacttatgttgcccggaatacaacgcatcatataaccctgcgaatataaatttcttcatggaaacaagatcaacagcaaggctaaagtccgagttctagtttctccacgggtttctgcacgaccttgggcggtcccttctcttctcaaacccttgttcccctaccggagccccagacccctggcgtcccgcactcaccgtagcgggcccagagcttgggctgcacatcggagcattcgcggattaggatgggtaggtcgggattcgccttcttcagctccacgtagcgtttctcaatgaagtccctgcggggccggagagagcgccgcgcgtgctgtgggcgggggcttccctcaacttcagggaggtcgaggtcgtgaccctggcgtcccgaagcccgcccgcctcaccacgccgcgcctcacctgacgccctggctgccgggcgagcgctgacataagtggatgcgaatctcacgcaggcccagctttgccccgactcctcgacttgctgcggccgccgccatccttgttaatatcgaagtcgccaattccaggtcttcaggccaagtgctccggtctgaccaaccgcggaccctaaagcctagcccataggctgcatgaggcaggggcggggtaaagcttggccaatgatataaaagtattgtaggaccgctgcgaggtcaatttctttgcgctcggggttggtcggagggaaaaacaggaagcggaaaggctgcgaacgcaaagcagtgtgggttgattctgaggtgcactgtgggaaagagcttgtcgctgcggtgttgctgttggagactcgattgttggtgacagcgaaagaacgataacaaaatgccggagcgagatagtaaggctcaggccatccgttatttcttccccatggcacttggggcacttggcgcattattgtagcttctgagcttaagccgggtgtgtgtgtgtgtgtgtgtgtgtgtgtgtgtgtgtgtatgtatgtatgtgtgacgcttgagcccggagaagccacagggtcctaagtgaggccgacagctccaaactccgtccccagtcctcactcctactccaagtgatgatgggcggcttttgtgcgtggatcgctttcccccagtcctgtccccatacttaatcctgggttgcgcgtatttatcttttacgtagtattttagacgtgatcttccggaagtcttctctgatcctccagcgcaggattagggtcctctgctttgtgctcccacagcttcttgtagtttcctatttc

SEQ ID NO: 45079 - DNA, 1521 bp, Homo sapiens
gttgcagtgagccgagatcgcaccattgcactccagccagggcgagactccgtctcaataaataaataaaaattagccaggcgtggtgccgcgtgcctgtagttccagctactcggaggatcgcttgagccgagcggtgatcgtgccactgcactccagcctgcgcgacagcgcaagaccctgtctcaaaacaaagcaaaacaaaaaagaaaaaaaaattcttggtaactgagcactgcttgtccagcccattgagtttctgtagacaaattgtaggaactggcacagcaaactggccacaaagacgttaggggcgtggacaccagctgcttgagctgcctgctgtcccagactcccgtatgtcatcgcgcagcgtgggattttgcggcttcctgacagcccaggctgtcgcttgacttgatcttgggtttcaccaagccacgaaggactagcgtccctctctcctatcccaagggcattaagcctgtctggatgaagtaggagaggaaagatttacacgcagttctcaactttacgtgacgtgactagggagggaattgacggtcgcaccgtctacctagcccaaacggggtcacagcaggacaaggaagtagccgatctcccagatgcggtctcttcgctccgctccacccgcaccagcagcggcccacccacctctcctgtaagaggaagaacgtcccggagacacttccggccccgccccccgaggcggaagcggagtgccaggctactcctcccgcagtgtgggtggttccgaggctgactaccctgcggcggcgcggctcgcagtccttctcagcatggaccgcacttgtgaggagaggcccgctgaggatgggagcgacgaggaggacccagactccatggaagccccaacccggatccgggacactccggaagacatcgtgctggaagctccggctagtgggctggcgttccatccggcccgtgacctactggctgcaggggacgtggacggggacgtgttcgtgtgagagcggggcagggccggggcgccgggtctggaagcttcccgggggtggacctgggaacaggagagatgagagaaagttgcagggagacaaattttgcaagattctttgggtccaatttattcagtaacattcggctcttctatcacaccaatctgttgaaagaactggaatgtcgtgacagagcccagataccgtagtaggccaaaaagccctttaaggccttgttatttcccaccgattattatttatttacttacctatttatttttgagacggagtctcgctctgtcgccgaggctggagtgcagtggcgcgatctgggctcactgcaacctcccccttccgggttcaagcagttctcttcctcagcctcccgagtagctgggattataagcgcccgccaccacgcccggctaattttttttgtatttgtagtagagacggggtttcaccatcttggccaggctggtcttgaactcctgacctcgtgatccacctgccttcc

SEQ ID NO: 45080 - DNA, 2131 bp, Homo sapiens
ctccagcctgtgcaacagaggatactctgtttaaaaaaaaaacaaaaaaatctgtgtgggattatttgttctaagtctctctccttcagtagaatgtaagctccatgagggtaggctatattgtccaccatggtatatattcagtgctttgtatagtgctagagacatagcgctaaatacacatttattgaatgaacgaaggagtagcagcagcaggctgactcccctgatcacccagctggcctagtttctgccatcactttgccatcccagaatgactcaggtagagtccagtccagcccagcgcccagagcgactgtcctctcctctgcagcatttcagatcctcctcaatgacctggtttagggaggcagacataagcgccccgtgagtagagttagagactttctcagtggctccctacaggaatgatattaccttgggggttttgagcacaaatttctgtttgctttcatcaggacccagctgtgccttcagtttcaggagtttcgccacctcctcctcgatctgtggagggaaagaaggcgctgagctatccatctgtcactctcctccctcccccgccattcattcaatattcctccctcatcacatctctctgctcaggcctagctttgtttctctcgggacccaccccggatgtctccccacgcagcccactctcctccctacaagactggtcgcttccctcacatctctaccctatgtcccgaacaccctggctttacgtcctcccaggctttgccttggccctctcccctgctgcctaaatctcaccagctcggcgctggccttctgctgcttgaggcctcgcacgcgctctccctgaagtttcaccagctcctccagcgccgcacgctctgccatcccggctgtccacttgagccgcctgctgtctcgacctgcggtggttgccccagcctcagcaaggatgacttccggctatcgagtcgctgggtcgcacgcctagagagcctccgccgagcacaaaaattatttccggctcctcccggaagtgccgaagctggctactaagggaacttgggaggatcccacctcagccttcgtgactagtgaggtgcgcaaacgcccgagttttccctggtgcgcgggttccgcctttgcagtgccctccacccttcctggtgtctgacccgcctccttcccaggccttttgttcctgtcccggaaagccggcgtcctgccgcgcgatgcccctgctcggacttcttcccaggagggcctgggcttcgctgctcagccagctcctgcgaccgccctgcgcttcgtgcaccggggcggtccgttgccaaagccaggtgagcgagacagaattatctctggtctgtcccagcagggtctccagatctgaacgcatagcctcgcggcctgtattccagtagtgttacaatcggtttttatcgagtgcccactatgtactgacactgaactaagcgatttggatgcctggtcatttaatccttggagcaatcttgagaggttggagttttgatttccattctgcagttgaggaaacggaggctgcaagattaaatgaatgacttatacacggatatgtagtaagggagtattttaattcatatccacactttttcctgaaactcttggactcaaacagtaacatttttaagcgaaatatatgaatattcctagtaaatgagatgactaaagatcagaagtagactgagttcatcttagaatttacctcaaaatgaatctcagaaaaacattttcagatgtcagagagttttggattttggaattgcagataagggattgtgtacttgaacttggacttctcttagggcagataatcgccatagtatggaaccaccacatcctctatttttggaagggcatacagcgtgctggtaatgtcactgattaagttttgccttacttcggaaagattctaatgctctcttagcagatgctttgtgctatcgtgaacaatagggcacagatcttttattgatattcaatcacagcatcttatcagtctgagttttttagctcattcaagaaatccatatcttatcattccacaggcttgttctgtgtccttgagctggttcccttgtcttcaagt

SEQ ID NO: 45081 - DNA, 1452 bp, Homo sapiens
gaatgagaggcatctagaccccctaatggcgcttcggccttaaaaaaggtttagaaattcttggcagtggacgcaaagttgctagactagatcagagaccactgttttgcgaacctcagtttccttgtttgtaaaatagttgaactaaatcttgaccctttaatgcttgttttgaaatccaaggcaaaaaacaattgcaagcgcccttacttccgtgttgcttcatactcctcttgcgcctgcgctgtctccttggagcagaggcggggccaacaagcctgttttagaaaccctccagtccttagctcgtttagaacacaagactccaagcttattggagggctatcttgccttacggctccaagccgctttttacggcgtttttcagctcgccattcacttcgctgtgaagatggcgtcgggcagcggggtaggtgttgtgtctgaggaggaggttttgcggggtggggaatggtttttcagacctgaatagagacaaactcctgcacccgactggcttcccgatatctcctcgagatcccagggttcaggttcaagaactccccagtaataggccttggcagagggtcagtagaatcgcggaggtttctcgggttggggtcttgaggctacctcagtcttctcgtacagtccaaagaggctttgctttcaaaacgtcctgtagacacctggaccgcgagggcgcggttccctgcttctctaggggcccagacacggcgacggatcttgacgctttttcctccccacagacaaaaaacttggactttcgccgaaagtgggacaaagatgaatatgagaaactcgccgagaagaggctcacggaagagagagaaaagaaagatggtgggtgctaactacatcaagggctaagggtatcacagaggcgatgcgatgatggagagcgggtgggagttgaagtgcgctgccttcccacgcggtgtaagctctggcagagtgctgcttccctgggcctaggtttctgcatttacaaaatgagagcgaggaggtgggatgaagtaagtagttttgagatgctcttcagctctatttcactctgcttccttgcccaccctttgcttggctcgtttaatgctttcctgaagtacagagaagataacggcatccttagtagtgacagagaagttaagtagagtattttgctgctgtgcattaccgctatcagtgacccccctctttcccttgaaatttcttaagggagagaacattcctggcccaatcaagaccctcccatatagtctgagaaaagccggggaactttgcaggatctgtgattgtttcagctagagcttagtagtgctgtttctctgtgccttgtacatcagggagttggtgcttctctcctgtttaagagattgcataaagaaatgttttattttgtcatctgtttcaaacgtgtacattcttctttcc

SEQ ID NO: 45082 - DNA, 1235 bp, Homo sapiens
ggaggccgaggcgggcgcgtcacttgaggtcaggagtttgagaccagcctggccagcatggtgaaaccctgtctctattaaaaatacaaaaattagccagaaatcgctggaacccgggaagcggaggttgcagtgagccgagatcgtgccactgcactccagcctgggcaacagagcgactccgtctcaaaaaaaaaattagttgggcatagtggcctgtgcctgtagtcctagctactcgcgaggctaagaggggcgtattggttgagcctagatggagccagtgcactgcggcctgggtgacagagggagattctgtttctaaaaaaattaaaaagagtaacaggaagtttcactgggcgggggttggaatgtttatctagtttagcagcgaagttctaagataaggtctgaaatacaatttacaccttgtaaagactccactcccctggcccaagcactagttgtaaaagtcgatttgatcacgaagtgaccctgtgtggttgttttgggagcgcagagtctggaagcgaaggaggtgggggcgtttcgagagttgtggaccaggtgactgctgagaaggagacagtaaaccggggacacacctgcggaagagctcttcagggattaggaaaggctacgtccttgtcactgctgtgtgtccccagatggacaactcctcaattgtctggaggtcgggggcgtgttggacagtcctggtcgctgagtcatgctgaagcactctctttttgactcactctttgtgacgtaggtctttctcaccagtcaataaaatataatccgaaagcaacctccgggctggctttagctcagcggttacttcgacagttctttaattgaaacaagcaacctgtctgggttgttcgagacccgcgggcgctctccagtccttttacctctctgggcggttcgagacccgcgggagctctccagtccttttcactgctgaagttcagctccctttccatggtaaaaggaatcagggctcctcggagaaatggctgattttagtactgggcaggaaatatagaaatggacgtggagcatctcatagagctagaaagtaaggaaatgcttaaaaaccaagaacaaccaaactcaacttttaaagttttttcaatgtttagtatgttcatgtgtttgttctaacagttgcctgtatacttgtatcttctcgcccttttttactgaggcccacaggatttttttctttc

SEQ ID NO: 45083 - DNA, 830 bp, Homo sapiens
gtttatctagtttagcagcgaagttctaagataaggtctgaaatacaatttacaccttgtaaagactccactcttatgacccaagctctacttgtaaaagtcgatttgatcacaaagtgaccctgcgtggttgttttgggagcgcaaaagctggaggcaaaggaggtgggggcgtgtggagagttgtggaccaggtgactgctgaggagagaataaaccgggggcacaaccgcggaagagctctccaggggttagaggaaggctgagtacttgtcactgctgtatgtccccagatggacactctgcaattgcctggagatagcggcggattggacagtccaggtcgctgagtcaagctaaagcaccgttgttttgactcactctttgtgacgtaggtctttctcaccagtcaagaaaatacaatccgaaagcaacctctgggctggctttagctcagcggttacttcgcgtgtcatcaaaccacctctctgggttgttcgagacccgcgggcgctctccagccctcttactgctgaagttcagctcactttccataataaaaggatccagggtttcttggagaaatggctgattttagtagtgggcaggaaatatagaaatggacacggagcacctcgtagtgctagaaagcaaggaagtgcttaaaatccaaacacaaccaaactcttaacttttaaagttttttcagtgttcagtaatgttcacgtgtttgttctaacagttacctgtatatttgtatcttcttgtcctttttgcctgaggcccacaggagtttttctttcaaatctaatggatgctctaagatatac

SEQ ID NO: 45084 - DNA, 2594 bp, Homo sapiens
attgcttgaatccgggaggcagaggttgcagggagccaagatcgcgccactgcacaccagcctaaatgacagagtaagaccctatctcataaataaataaataaatataaataaaacacagacttttgtgttaaggggacctaaacatgactgtcagctgaactcagcaatcagacaagtaatttaatctctccaaagttcagatgtctcatttttgcaatttaagtacaataatgttgactttgcattatagttcatttatttaaacacattttaaaaacctcccagatgccagaagcctgctagactctgactatatagctacgcttttatgaatatctgaagatatgcatgtgtctaatgagcaaaacagatataatccctttcatagagtttactgtctgacaaagaaagaattaggatacatgcaacagtatgtaataaagtgcaaaatctagtactgtgtagctacttaaaacatattatatgctttcttcctttccttttccctgcctgatcttactgccataagaaatcttgtaactgtgattctgtcaaatgaatctaagaaggatgttgttgctgatggactagtatagaaaatagcagcatgacaaattaaatgtgtcattggggaagtgagattgtataatgaactgagtttcctggtcagtcctgctggaactgtgcctttcagcaaaatgagtttgatgatttcattccaaagatcaagttgcagcaattttcatcatgaatgttacccaatcatagaaaaattggcaacatttctcagcagatgttacagtctttctcaaaggaaggttctctcagctgacaagctaacgatagtgctcctgatggcgaggggagagacggtgatgatgactgattgataaaaagtattttagtcatatttccaggtttataaaatgatttgcaaacattttcttttgttccctctaacaccgctagtagataatggaaactcctttgatttggtctgtagataattttatgctatgttatatggaatatccacagcattttgtgaacttgaaaacaaaggaggaagcagcttgcatatgcatatcttgctagcagattggtagaatagagagagcagttagcatgtgaggaccattgaggtaaagtatcccagagttgtaactttttctgggccttgactttggctaattctctgcatgccaaatatcatgtagccatccagaaatctgtctgaatattgagatggtgatcatttctctcctgggtgttatgaagaaatgtgtttattaaatactttgcatcccttaaaggaactatatgaatgataggaataagaattattgacagttttgaatggtctattgatattactatggctttgtttctaccaaatatggtaagtataatgtagaggaaaatacaaaatacaacttttatcccccatttttttcattcaactatacctcaatattcagtgacagggccacctcaatctccgcccatgaaaacgcatctagaggagtgtcacaagtttttcacagtgacatttttgcttactgatacaagacagtgatggtgactgatgatgtcccagtgatttctgagtagcttctaaccagcacataactcccccaacagtctttaagtctttaggtgcccatattttcctctttgttctcccccttcagactgagagtttgtagagagagggcaacagatcttttcaatacacaactaatgcaaaatgtatcaggtttttcttggatttcagctactccctgttaaacaatcagagcttagtgaacagtgattcagtgaggagggaaagcactcaggaaggagcaggaacaagtacaagtttatgaaaaggattagctagcaaaacaaggtcaaactctgcaatagtttgttttcctctccctagtatccctcttcaatcagaaaagagactgttatcagttgctggtgttatgactgggcacatccgccctgggtcaaatatgctgcagtctgcaaagccagcagcagattgcagtcctctgcagtccagccaggccagcagaacttgtgtagccatgtgccctgttatagctgtaatactgaattgggaatgttcccttaatggggcacttgagggcaaaagcagtgaaagcttttcctttctcaaagcagactgttcttcccgtagtgttttaagaacacagacatgtattgggcaaggcaaagccaaaggtggcctttacaagattattaaatctggtcttccagggtatctaatctgtgtgaggaccctgatgaactaattttcttctaaagtgctatatatgtagatatcatcatagagttacacatgaaatggctcattcaatacttttttagatgcctggaaatatttaagggagtaactaatcaattagcagcattcctgggagaacattgtcttgtcattttaacagaaaactctctttgtgattttgcagccacgacagcccaaccctgactggcgttactctgcctccctgagagcaggcatgcacaggtatgtatttccctcctcattcactcagaagtaaccttaacttggtatg

SEQ ID NO: 45085 - DNA, 1402 bp, Homo sapiens
ccagctactgcaatagtttaaaacaccagtttgctatgaattgaaatcttttaattacaagaagttctctgtagatcagcagctaagcgtctattttgccttagtttttatttaagctccaagtcttttctctaaatatgctgtgaccgaataccagtcgttaacacaaaggcttattcacagacttaagttcattaaatcagatgcaatgccaagtcccaacctctaggtgccgctgccggacaacgcggagagagctagctagctagctagggaacaggaaagcaaatggcggctcccccggaacggttttcggcccagaaagcccagcagagatactttcaactcacaaactctcccggaacaaagacactcaaaaaatcagggctcagcgagctctcttcgcctcgggtacttacaatccagtgacgattataagttcagtttcaccgggccggagcgaagggaagaggaggccgcaaggagccaagcgggagagagccgagcgtctccttgtcgtttccttaattcttcctgccgcttggcagagtgatccactaccgattactgatgaaagggcccgggatgggcagcgcgaaatcttgccgagaggcgcagctcgcatcaccagaccccgcacctcgccggccctccgtccgggtcgcctacccagcaaaaacggaagtgctacgtcgcgacgcggggcgggaggcggctgtgagtgacagcccctccgggcggaagggcggagccccagctagcgcaggcgcaatagcgcaattacgctgcccagcgtgaaactcatcttttcgcgagaacttgtttttccgggatggaaatgacagtgtttcggaagagctgttggtttcaaactatttagagcttggaagttccaagaaagacacagattcgtcccccgctaagccagcacttttacgggatcgctgtggggccggatggcttctagacttccgggtgattccgggagatgggggacgccttgcagtaagcgtctttgcttctggaaacatctcggatgttccctagagtctagcctatctggtgccaatacaagaatgtgtagctactatacaatggatttcaaagtacccaaatcaatggagtgaggaggacatgcagcttactatataagtctctctctatatatatgtttgtttgtttgttttggagatggagtctcaggctgtcacccaggctagagtgcagtggcacaatattggctgactgcaacctccacctctggggttcaagcgattctcctgcttcagcctcttaagtagttgggattacaggcacgttccactaccccacctaagttttgtatttttagtagagaaggggtttcaccatgttggccaggctggtctcgaactcctgacct

SEQ ID NO: 45086 - DNA, 1032 bp, Homo sapiens
gattggagacttgcagaacggctagcctcacagccccaaggctggctttccctaaggtaggtttcctatgcaccgatactggcaaggcgctttggctggaaactctggaaggaagccaaaggaaagtgaagttcctggcgctagcgcgtgtcctgctcagagagcccggcgctagctcattcttcgtgcagttattggctgggactctgtgtgccgctgtcggccaatgaagacgctggagatcgggcccctgcccgtcccctttctgcgccccgggatgaggcagagactgaacagccggcgagcaaatcaacggcatccagaaagccatgtcggactcggcgcccagcgcccaagcgctaacccgctgaaagtttctcagcgaaatctcagggacgatctggaccccgctgagaggaactgcttttgagtgagatggtcccagaggcctggaggagcggactggtaagcaccgggagggtagtgggagttttgcttctgcttggtgccttgaacaaggcttccacggtcattcactatgagatcccggaggaaagagagaagggtttcgctgtgggcaacgtggtcgcgaaccttggtttggatctcggtagcctctcagcccgcaggttccgggtggtgtctggagctagccgaagattctttgaggtgaaccgggagaccggagagatgtttgtgaacgaccgtctggatcgagaggagctgtgtgggacactgccctcttgcactgtaactctggagttggtagtggagaacccgctggagctgttcagcgtggaagtggtgatccaggacatcaacgacaacaatcctgctttccctacccaggaaatgaaattggagattagcgaggccgtggctccggggacgcgctttccgctcgagagcgcgcacgatcccgatgtgggaagcaactctttacaaacctatgagctgagccgaaatgaatactttgcgcttcgcgtgcagacgcgggaggacagcaccaagtacgcggagctggtgttggag

SEQ ID NO: 45087 - DNA, 1185 bp, Homo sapiens
cagcctcctgagtagctgggactacaggtgcctgccaccacgcccggctaattttttgtatttttggtagagacagagtttcaccgtgttagtcaccttatctggttttaatccctttccctatgagaaggttagatactaatcactggaagtctttagagtctttccaactctatggttctgttagatggatggagcttatagggaagctgggaaatggtagagggaaggaaaggaagagttgaatttctttcttcccttggcttttatcccagtgagcaaatgacttgtatacaagaggccacaattcagacatggagataaagttgagtcattaaaaccacaagctgactcaatcatgggcctgaaatagcagctgtaatacaatcacatggattcttccccttgacactccaaccattgttctcccacaccctgcggatcacaggagtttacatgttgcttttaatgaaccaagcctgatagtaactctcctcttccaactcctcaatgagtctttgtatactggtcactcccccaggtctccagagaccggaagaatttaacattcctttaaattctagggaaaaagctagtgtctttgaatagggacagctgcctctctggaaaaaaggagggctatgaggcagatatgttccacagtgcctctgtttttttagctcaaagcaatcagccaagaggaatagtcagagacagccaggcaaggggtggaacagccaaattcagtagctgcatagagaaacctatagccagtggagcctttgtattttgagaatggggccatctaagtccagcctctctctcctcttaatcctgttgtcactgcacaaaaaaaatattagagctggaagggaccctgcagaccattcattctagtccaactctcattttatacctgaggaactgagtcccagaaacattaagtgacttgcttaggataacacagacagcatcagaactagatgtgactttaggtcttttgatccctacctagccctgtgttctttgtaatctactctgatggctatcctcctgtttaatgtgagaccgcatcacatcactttacatgatgtgaatgcaccagggtctaaagagttaccagaataactacaaatgtctcccttgagattctcccagatatattcaagtgtatttagtggaccc

SEQ ID NO: 45088 - DNA, 1757 bp, Homo sapiens
taagcaactatatcactcccttttatcctaaagtgttttgcctggttaggtttcagagcagggccgaggaaagaccactgatcaaagagtgcactttcctgaagtactgcctccagtggctaagtcttcctgatgtctaagtcctctgcatctaagaggagcagcctggctggaatacaaagagttaatgtagaatccttgttctagcctggctcggtttccatgacaacagcttaggatagtgaaatctgaaactgtgaaatcccaaaaagtccataggctgccagatccaaggctggggctcactgctcccagcgccacctgctggctgagcatcaccagtgcagctgacctacattccaccctcatttgcttgacccgggtactggaaactgggcaaggtccattacgccacctgttgaccgtgtgcagccctcatcccacatgtcagcgggactccaccttcccccactgcatcctagccagtacctggggacaaaccctggagtcccaggggaaggtgaaggatacttggtgtgggctttaatagcattacgaagttgtggcttacaactaagggcaaggaaattgctttacagaaaagtataaaaagtccctggtagcaagaggtatcagagcagcccttgtgcctgtgctctgtaaaatactgattcctaacaaactcagcagctctgtgaacacctcttcatttgcagaaggtttgtggcccctcaggtttagaggagggtggcatgggctcagtgctgtgtgagcagtgtatgctgtatttccgctgcccacagagagagcagtgggggcgaaggggtagggaatctgcagcaagaaagaagcagagacaggaaacagagggccagtaattgaaaccatatgtttcaacaaagacatgcttctggtagtgaaacagagattctgctgaagaaagaagagggtgaccggctccccacccgctccaaaagttcaatccatttaaaatctaattgtgcatacaactgtgctaaggtactagggacatagtactttgtgaaataagcagaaagggaagacacgccacaattaaaagatgggaggagcgtcaggaaaatattttacagaaaaaaacccgaaagatttagtggagggaatgagaacaggccagaggaacctttggatggacagaaggaaaacagtatatatcacagcaataccacaatcacaggggaatgagagagaatgcaagagcgagcaaaggagagaaaaggtaatagtttaaccagggcaagttggaatgcgcatgtatcagaattggggttaaagtccggcatcaggatctcggagtgaagactgccaaaaatcatttgccaggaggtgagctcagacatgagactctgcctctagactctaggcagagaagtcttcccaacattcctatctcagcccatcaacccgtcttcactcctcacctgcattcatgtctatgagttgctctctcttctgctgcttctctagccgctccttctctgccttctccttggctagttttgctcgcctcatcttttcttctgtctcccgccgcttctggttctccttgactgcttgctggggcagggaagaggaggaaggaacacatgggcattgtatacctactaccagccaacaggaacccaggggaaagtgagaaatgcccacaaaagattcagtcagcaagtatcccttgctcaccaaaaacatattccgaaaattgtgaagatccatgaaaa

SEQ ID NO: 45089 - DNA, 1443 bp, Homo sapiens
ttatttctgtacacatctctaaaagatgatgactttttaaaaaatgccatgaaaccattatcacactaatttccagctgtctcaactgtcaagtgttttgtatagttcatttggatcaagatctaaataagttccatatactgtactggttgataaaatttaaaattccctcttaatctatatgttcctctccatctcattttttcccctgaaatttatttgttgaagaaatcaggacactaatcactggtaaaaatcaagaagcactagcacagttactttacactgtcagtcactggaagcaagcacctgaggtttctctcaacatgcctgcattcttgccactccctttcactaagtgctggatttgagcccaatatatctaggctcaaattctggcttggtgtttacttgctataaaatcttaacaagcaaaggacatattaattctcttttatatctctcaattataaaacaaagataataccaattaggcattatggaaataatgttttgataattggaaataatagttgataatcccctgtcacaaatctgacattaaataggtattcataatttaagactgaatgagaaggcaaagtaccttcatcttttttttaggtgctccagatcagttttaatctctgctgtatctcacccacgctaacctaaataaatactgagtaaactgcagaattctaaaccattctccataacaaaggattctagaaatattctgttttattcagggttgggaagggaagtaacagggtaagagcagaacaaagagaacagatggaataaactcccagcccccagcctgagcctgcagagacagctgctggttttcgtcatactgctgtttttttcccttctttgttcctgaggtggaagccaggaaagggtggggaaagatgagggggggaaggggtggagatgggaggaccgccatctctgttactgaaagtcacctgatcttctcctccaatccctagtctctgacctcacaatctggaacctgagccaaaatagctcaactgcgcgcaccccgtggccgaaaagaaaaatgcaagcagaataggaaaaacgggaaattcttgggaaggatttttgcagtttttcttgctaaaagaaatgcaaacacacacacaggagagtgccgtatcttcccatctaatagatctaaaagaagaaatcactggctctaagaagagttggggttattgtaggatcaggaggaaagaatggttccatcccatcttgcagaaatggggttaccaatgcccttctgttatatcactggggtcccttgtccaatggtacttagaagtgaaaagagttttgttttttttttttttacattggagtctgttttttcaaaaagaaactgttaagagtgaagtaaaggatactgttacttgctttatagaactgaatgct

SEQ ID NO: 45090 - DNA, 1113 bp, Homo sapiens
ttgagccctctcaaaggaaggctatgctttcatgaaggtatcagactaaagaacaaaaacctttccagcctctggaccccaaaaagaacacgaatattgctactattgaaaatactagctgcaacaggacaagatccttttgtaaaagggcaagctgtagctttctgcataatttaactgctgatcagtcctccaaataaatttcctgacaggtagagggcagtatactaatcagcttgtatttggaaaggacagaggttgcctctctctaacgtgatgacatcactaccaaacgcaacaatgacacatctaaaataaaagggatccatgtgccatctggtggctgaaagcagtaaagcacactgctagaaataaaatatcaaattcccacggttgagaagaaaattaaaacttaattcctttacctgatgatgcagtcccttaaatctccaatagtaagtcttctgtggaaactacatcagcagccttcgcgcaatagttttaaagttttgccccagtttagctctatactcctaaacactggctgtaagcaagcagcagctcctgatgcctgacctttggtgcatagagtaagagaatgaaactcagaccaaaacaaacaaaataacaaaaggacctggaaggctgtcagaaacaaaagaagagtttgacatgacagataacaccaaagacagcttattgcaaggaaaaaaagtaacagaaccagaagtttaaaactgaaagataccttttaggttcatgtatctcactttacagatagagtcaaggtaagaaagataacccctggtgcaatcttattagtggtcagactaaaacaacatatcacttttcccctactagacattaccataaatatttttttatttttcgtggaagtataaattgctacaatcttatacctagcaacttgggcccacagattttatttttaagaatttactgtgcagaaatacaagtttgcaaagacaattaaaaatggatgtttccttcagcattgcttgtaataaaaaaatggaaaacttatttgtattatatgacagaatacaactatcagaaataatgacacaaatctatatgtaaggacatcgagat

SEQ ID NO: 45091 - DNA, 1135 bp, Homo sapiens
agtctgaatgagcaagtctgggaaagtgtgaatttttcttcatcctgcctaattttaaacaatatttctttttcattaatgtccttagacgagtatagtaaatctttttttttttttaaagagacggggtctccctgtgttgcccaggctggtctcgaacccctgggctcaagtgatctgcccgcctccgcctcctgagtagctgggattgcaggtgcataccaccgtacccagttggtaaatgcttcttgaataaccttccccaactaatgaaaaactggttccatttctgccacaaagctatttttcctctttcatggacaagaaaaatctacattattatgttcacgttccccatataacacaattcagttcaatccagtgtaaactgtgaatgtatactttgtccatttttcaccaacctggtgcttttgaaataaaataaaacaaacaagcaaacaaactttgacctccattgtccagaataggtcaagagtccactggctgagggctaatcactcacccaaaccatgagaatcttgccatgagaaagggtccacggaatttagttacttcatgtgttctgattatgtaatagaagcaaagcagaaggatgatgaagcagaaagcaccacccaagacaaccaacaacatagttccttttgtcaccaccctaagtcccttggcatatagaaggtgaaacaagcacaaaagggatgagtgcatacaatttgggttaccgtagccaaggttaaacttatttgctcccagagtcattgcttccaaaatcttgtcccccaaactcaaagagttccctcagaaccaagcaacaagcaaacaactctaagatagatgtaatgtagataacagaacctgcgtctaaagaattaatggcagctgaattgttcacagctgaagcttaagtttaaaaaaaaaaaaagggtggggggtaaccagcaacctgttctttctgcctacagactcttgattcgtctctcttccatccatgtctactagcactacctaagttcacaccattattgtctcctgtttgatttactccaacagcctcctaactgatctccctgccttcagtcccatctgccccataccacatccattctccatactatat

SEQ ID NO: 45092 - DNA, 458 bp, Homo sapiens
tgacagaacagtaagcaaagcttccttcctttcaaacattctaaggttccaatacaacttttgaatacatatacaggaaacaaaacataatgttaaccaatttttccaaaatttcaacatatttctcaagcttcaaatattgatacttgctcttcctttcttactaggcctctccctctgctgcctaagcttagagaagactatgatcactcctttaaaaaaaggggtgttgtccattcatttagaaatagtcagtgactcaggaatgctgtttcccaatcgccgtagcaactgtcttctcctcccatgttatgatgtgagtagcaggacatctactcttcctcaagggtgggcatgtgtgtgacacacccaaagcctagcagacagcaggaagtttctgcaactgctaccgcttctacatacaggcaccaagtatgaggacaccttgttttaaatcc

SEQ ID NO: 45093 - DNA, 2531 bp, Homo sapiens
ccctagaacttaagttttggaaggaaagctaacgggggggaggggtcaattcttatcctaaagaaacatacaaaaatgctgctttagtcaccaaagaaggagggggtgtcaatacccttaaccttatatttctagggggggaaaaaaagatgttcaccagataaaaacagatggttactgacatctcagatatcactggaaagggcagtccaggagcacttggtcttgctagaaataggaagagatgagtcactattttaattctatttagaattaaacatctaaccctccagggttaacatctcaaccctctaggtcataaaacaacattttcttcctgtttccatcgctttatcagttttcttcccaaatttgtggagctgggtcaaaatgttgggaggtgggactaagagttacaagccatttgtttagtagaaagatacactagtgtaagggcataaatacctggaagagaagacaaaagagctacagttataactagctattataatgatcatcaatatccaagacttttcctctcctggacagtgccccgtatcttacaaagcttttatagcaaaaaagcaaccaaacggctccctggagagaggcgttggtgtgggcaaaaggtaatgaaatatgatagggttacatgtatatcactattccttcactcggattgaaagtaactggcacttgaggaaagcttactcttctacaggcacgcaaagggaagccgatagtcgccttggggcacaagaggcagtagaaaaggagtagaggagacggttatcatgggaaatgtataaaaaacaattcaattacaaacttcttgaactcgcagtccaactttcttcccacaggagaggtttatcaccatcctaggtcaagaagggcacaatcatgagagttctaatcctctgaaaagtgataagcaacagggcaaagagagaggttctctggagagaggaatactggtaaacaaataaacgtcatgccccagtgaccataggacctgggcaggagcccattcctgtaatcgcaaggacaaacgtccaaagaaggagttgggggtagggctcaagtcaggtaacattcctcaggggaaggattatcaagtgacaccgggcggagggcccacgggggactgggcgggaggaaagttagcaggtaaaaaggatgaatcatggagaaggaagtgacctttaggagaaggaaatacgagaataccaaaaaaggtgtaaggttaagaagagaaaatggacccagaagaggggaccaaaaaagaggaggcgtgttcgggtactggaggaagaagaaaggaagtgaggctgagaggggagagacggggctgagagccggccggggatatgcgggcgggagggcagaatgtaagggctggggaacgagggaagccccgaggtggccggggcaagagccgggtgggattccggggcttcccgaggtcccgaagggagaggatgtcgggctgcagagctgcggaccgagcgaaacgaggaaggaaggcgcgggggcggctccccaaagccgggcaggcgccccaggggccggctgcaggggtccagagggcggttacggggccaggcaggagcgggatgggagggacactcacaaatttcttagatttgccgccgtcgccgcccgccgagggcagctcatctgggctccggcccttcttcttgtcccgggtcccgcggccgggccccaggctcccgccgggcggctccatgtcccggttcacgctggccggcgaccccgcgcctacgccgctcccgcctggcagctccgcgcccgccgccgcccagtcgctctttagccagccgccgcgccccgcctcattagcatgccgggctgcgcgcgcctcatgaatatacaacgacgacgcctcgctcccgcccgcctgccccacttccgcccggacccgcagcccctaccaatgggggaagggagaggggcggagggaagccgcggaagcgcgctacctgcccagcggacctaaccattcggacccacgtgggggggggtggtgagtgggcggtgcagctctccgcggccgcggcggagagcaccgccccctggcggttggagcagcgcaggcctctggctcccacgcagcgcccacgtggctgtacagcctgacagcctggaccctctcacatcccagaccaaaaatcgcgtgagaccattatcctggcagaaaattagtgacaggttttccaagagaatgcagttttcaatgtgtgcaatacccatggaacacatgaaaaaaattatagtgatagccaccatgttttgaaagcaaggtagcaagaacagagctcggtccagggcaagcactagactaaaccagactcgctctggagtttaatttcctagttcgaattccaggttaggtaccatctaattgtttctaatcaggacaaactaattattgccaacatgtgcctaaacagcaataacagttaccacttaaccatgccctttgctctctgctaggcactaggcaaaca

SEQ ID NO: 45094 - DNA, 2201 bp, Homo sapiens
tcccactgtggcccaagctggtctccaactcctggcctcaagcgatcccccccatttcaacctcccaaagtgctgggattacaggcatgggccaccacgcctggcgtggcttaactgttactatcccatatcacagccataaattccaagctgggaagacagcatgtgtatgtctggtagatgaaaaactggatagcgattaagcagaaccatgtagaggtattccaggctgaaaaaggaatatctaaaatatcgcctctgttccacacgcacatacacatttacaaagacggcagcatcgttccaccctggagccctagctccttggaggtaaagaaaggtggtaaaagaggagtgggaactgagggtaaacctcacaccctgatacagtgatatccgctcccctaaccctaattcctgaggccaaggccctatccacactctaaaatgcagaggaggaacacaccttctgtcttcaaaccagccccacatcacgctaaccctaggccaagggctagtgtgcctacagtcagagggtggccgacctgaggtgagaaagtactttccattaagcagaggacgccacccccaacaccctgcactttcaaggtactcctggtgacttctatccagctccccgatactctaggggcgggtcgcacttcatgcactcagtccagcccacctatccctacggccacagctcgccccaccccccaacccccggccgaggcggcggaactcacgatcatcttcttatagagaccgtaatgcaggaccaggctatgggtcaatgccaggcgatggggcttcatagggtgtccagctcctgggggtggggagaagagagttcgtcagctctcacccctggagttgcaaccccgcctcaaaacctccgtgtcccaactcctcatgcatatccctgtttcctcaccgtagtggaagttgcccacgtcggggtcgtagaaataggccacggtcttggccatggtgccggcgggagcaggccccgcacctccgccgcccgccgcccgcggccgccgccagcccctccccggccgtgcgtgctgcgcaagcacgtagccggcctctgcggaactgggcgttgcggccccgcctccatccacacccaggccacgcccccaggggagctccgcccctcgcccggctcagctctcccggtatctggggctttgagcgtcccgggttgggcagggaactggcagcatagctcctaggatgcgagggccatttgtctccggccgggggtcagatcctcgggaagccgagccatcccatccagccgcttgccccaaaccgggcgcaggccgtggtcacttctctaggaagctccgaagatcccgccactccgtccctcaaaggtgcggaaagccggcttcccccagccctcggagaagattcctgactctccgctcggtcggggcatctgagggcaggagctgcgccaggcgtaccggatagaccagtggacaacacccacgccggaccgcctgtcccctacccggacccagactcggcgccgcacattgccccgggggggcccggcgcagtcacgcgcgcgcagagctcacgctctccgccccgcacacctgcgctccgccccctggtcctgggcccgcgacgggtgaaggcatttgggaagccagggcggctgcggaggcgatctccctgacccagggccggagttgcccggagcctgccaccgctctcagccagcccgcatccttctctgttcttccctccccccgcctgccacggcgcgggtatccgcagccacagcccggggccggtgaggcggcgaagggggaggggaggaatcaagggatgagcgccggaagggcgtcgggggccctgagccgcactaggacgcccctggagccggaaccccagcagaagccggaaccagaaccaaatcaccggtaccgggtcggccaggtggtcagggtgggagaaaccaaaaagggagaggggtgcgggagtactgagaggaaggggctgcagaggcctggctcaggccggcgtggaggaggtgcgggcgctgactcaggcaggatttctgctcccgccgcctaagaatgccgtcccatctcgtgctgcagtgtccttgggagggacagaagcgcgaacaagctggaaaggggaacgctcggggcgtcggggaagcgggaccagggtcgtgg

SEQ ID NO: 45095 - DNA, 1237 bp, Homo sapiens
ccagggacctgttcatctgtgtactgcagtacctccagcccccagcctacaagagggacttcttaagaactgttgagtaaatgaatgcatggattggaatcctggctcttgctgtatgacctcgctgaggttccgttctcttagctgtaaaatgggcacggtagtggcttccaaaggagatctcagcccagcgccaggcttctaggaagcgctcaattgaggattttgttacattgatgtcaaaagaaaatggaaaccgtgtctgccgcttgagatgccatcagggggcgcccttgtgcaaggcgctcggcgtgctgcgccttccgcaggctcccgggtgagcgcatccaaggccgcccccactccccgcccccacctttggggggcttatctcctcccctctccgtcccgttcacacgcccaccctcactccgcccgcgtccccgctccggggaccgtctccgcagccccgtgcccacccttccccaccgccaggcccagactccttccgcccacgcggccccatatgctggaaagagcctcccactccccatctgtcaagccacttccttgcccccattcccggcttcgccgctgtcccctcctccaggaagctggtcctgattgaggggcagaggactgccagcttcgccggtcaaccgcccggtatccccgttcccccaaccacagggctttagggaaatgcccgctgccctgggcagatgacccccagtgctgagctctgagcctcgagtcagggtttgcgaacagatgcgagaactctctgtgcgcttcagacccgtggggaaaccctgccgaggaaaggagtgggagggcctgcgtggaaggacccctcgtgtcacggccggctggctgggggtggggagcgggcttcggggcattgccggctgttcgcctggaggacgcagggcttggggagcgcggtacagacaaacacaggctgcttttctcgcccgaaagaccggtttcatttcgcagattgattattgctgcgtgagtgtgtgtgtgtgtgtgtgtgtgtgtgtgtgtgtgtgtgtgtgtgtttgggcgttgttagttttttaaaaatgtaacttgcttgtctaatgaatgtttgattgcacctacatccggagggtgttttaatgaaaggtgaaggctcctggagggaaataaataaataaaggatcgctccccatccgtaggcacccgctcccccggcaattctctatccaca

SEQ ID NO: 45096 - DNA, 815 bp, Homo sapiens
gggcccctgtcctgtaaggtctgcttaataaatgcttgttaaaatggagaattccagtggggaggacagggagcatgagggagagactgggaaaaagaaaaggaggttagctcgaagaagggagagagagaggagggaagggggaaggagggaagagaaggaacaaaggaagtaaagaagggagggaggaaaggggtaagggagaaagagaagaaggctatattatgtgtattcatgggatcgggaacagaagccttgctgtcctcggtgcttagagtctatttggaaagataaggtggcaggtaaagagtcctgcccctgccctgctgccctgcatctgctggggctggctggcgtgtccctggcccgtacctgctctctgcccttcagccccggctccccttggcaactcgcctctgaggaggtactcctgggagccttccaaggggtgggggccgggcaggaacccaagccaagccagggagcatggccaggaaggagtcagcaaagcagatgccgcccctctcctgctgtcttgattagagaaattgagatgttaataatattctgagatgcaaggtgctaattaaagttaattactgtttccttgtgaagtaacctctcctcgtgtttaccaggaacaaggctgccagccgctcccctggctcgtgccaatcacgatgcccgctgcttggtgtacccctgcactctcacaggtgccctcagctgccccagaccagcctggcccagtccaggcaggcacaaggatctgaagttcccaagctctgcctcttggcatggcaccagaccagtcc

SEQ ID NO: 45097 - DNA, 3259 bp, Homo sapiens
gcctcccgggttcaaatgattctcctgcctcagcctcccaagtagctgggattacaggtgcgcaccaccgtgcccagctaattttgatatttttagtagagatggggtttccccatgttggccaggctggtttcgaactcctgacctcgtgatcagcccacctcggcctcccaaagtgctgggattacaggtgtgagccaccgcgaccagccagggaccattcttaaccagcctaaactgcacctggttcctcttcctgtctgcctgtgtatctccactcccaacccaggcatccccagagaaacctggggcagggaagggaggaacacagaatctggaagaatgtaaatctgaccttttcttttacaggcttaaaatctgtaaatggctcctctccaacccctcaatccaagcactttaagttgaccagcaggtccttagttctggcccctgccttcttctccaacttctcctgccctcctgagccacctcacctcctcctccacctccagaccctggcacatactcctcctcagcctgcaaggctgaccccttcctcagtagcctatccctcatttgccctttgaaactcagctctggcaccaccccttccagaaagcctctagactttggagaggacagcgcctttaggtctcctgccagaatttccggctcaaggcagggccgaacacaagatgtggtcattgtttacctgtctgcctttcccacagagactgtgtgtcattcttggggtccagtaccctgtgccggtctggcacatgggaggggctcaggaaatgtttgtagaatgagttaatcaaccagtgacaggattctggtacccagtcggccaccacatctcctccaacttccttaactccagacatcttttcctgggctaggccttaacagaaggaactcctcacccttcactgtggggtcaagtcaggggtggagacaatgcgggcccctcccccgctgattcagcgcctctcctaatgaggtgaggcctcaggtttaggaagggttgccacacccactggtagggggagggtctgtgattctgtaactggaggataggtagggggcttcggttgtagactgagtagggagctgacctaagccggtagattcaagtactgcccgagagatctctgcctttccgccccacaccccagtcaccccgcgccaggctctcggcgcgtcagatcccggccctgcgttcttcatctcctgccccgccacgcccccaactgcagatccaactcgggtctctccgaaagcagcaaggagcctcggggtgggctctatgccccgtgatgctccgcgtctgggaacggatgaaggggtgccagcaacccccgccgtccccgctgtcgatccgggtttacacgaggctcatccgggattagtccctgcggtcggctaatcccagcggctggaccgaccccggggtccggagcgaggcccacacagtaccggcctagggagctagggcgcgggtcgagcaaaagcgcgcgacgctgggcgggtgtgggggtggggaggggcggaggagggagcaacgccccgggaggcggggccaggaaccggctgatccggtctctgttttccgacctctccggagcgggtgtttacccgggagccggacggaggaggccggggccggtcgagcccggaaggggggaggggagcgcagtcggagaccgaggctgagaccttttcggttcctttcccctaaatcgacttccaaccctcgttcctgagcgtgggagaacgcggcagacagacagatgtctcccgccccttatcctatccagttccgcaattcacactcgttgccaaagagtggggagcgggaatggatacacccgggaacgactgcacgtcctgcgggcgcccggggaagaaggcagcgcagcacaaaacctctcctgcggtcacctcccaccccatcctgcacctgagttcttgcggggagggggtgcccacagcaggtcgggcccagaggatccggcaggggtcactttgaggtgtacggactaggagtctatcctcagaacgcgtcagctcgaccccatccccgattaataccagtgcgggtctcagtctcttgtccctcgcgtcccccagccctctccaaggcctccagatttagctcccactctccacgggacgcaggcccgaggacccggaagaagctgagtggggtccggttttcacacttttattgtaaagctcgggaataattacacgggtctttcattgacagctcagcaaacaaaccggaaacgaaccgaaccggagggggtaggggcggtgcctgcgcatgctcgcggcggggtgggggggggtgggggtgggggtgggggggtcagagaaagagaaagacagaaagagacagaaatcattacaaatcaacgggattgtgctcgcagcgccagggatggggtggggtggggcggggcgggggcccttcccgggaggagcgaggcagtgggaagtggcacgaaccaagagaaacacgaccccaatgtgggcacccgacgcgcccaaaaccccccaccccgacccccacccccctacacacgagagagacacggcccccctccccactagataacccgaggagacacagtctcccctccccatgggcagacacacccgcccgaaaccccatgggcgggacacagtcccccctcccagagaagtccccagtggagacgccccttaagagactttctcatggccaacacaagccctcccaacacccggagacagccccgacccagggaagaaatggctccagaggccctaccctcgggagagagaggtatcccagggctcctaggagaaaagacaactcagagatgcccagcctcatcctaaagtgctgcagggcagagaaacccccataggagagatgggggtagggccagaaacatcccttcccagacgtgtttcagagatagcccccttccctgggaagagagatggcccgaaactgacttgccttaagtactcccaggaaccctgggaggaaaacaggctccccagagagcctgggtaattgggggagacatgctcccgtggtcctcagcgggaacacatgtcccccggagactcccaaggggagagatagggcctagagagaccccagaggtgagggatgcccagagaacttccccccaccccggaatgtgaaacatgcttcaaggaccctaggagagaaatatgtccccatataccctccccctac

SEQ ID NO: 45098 - DNA, 1558 bp, Homo sapiens
tcatcatctcagcaaacactaagattttatcagtactaagcattttacacacatgatctctttcctcccaaccctctcaaatgggtagtatttattattacactccttcccatactacagatgatcaaatgggggctgagaaagaataaactgtcttaagtcacagaagtagtatgtggaagaaccaggacttgagaaacaagaatgcctcttcacatcccagagtctgggggaaagaaacagaaatatctgaggctagaatctgattcctgttatgtcacacccgcctccccaccattcctggactgccaaccttgccccgtaaggagggaataagaaacagtgggcctaagggtcaaggaatgaaccagcccaggcttcctaggctgctgctgttcacccaggggcccgtagaaatgcaggaagagagccagggtggcctggaagggcaggagcagcaataaggaggccttccctcacccgtgttcccaccatctctgaactttgtccccagcagttgggcactgggagtcattaatcccacacagcagcctttgatacatgcagcgccttatctgcccttccccgggccctggctgccttcctgggcaacggtgccctacctccccccagtgacatgggcacccaggaccctgagaagccagagcctgagggggaacaggcgcagggacccatgtccctcagatagaggagcagaagtgccgtcaggggtgtaggagtaagggataaggaggggacggagtcccagaaaagctgaaggaaatactgtctgtgtcaacatctgggaagggatgagaacagaggtgagagttcacccggaaacttcacttccagcccaccccggggaccaaggtccattttgctgagtgctgtggccagagaaaaaacacacagaggcagccaccactgtcccagtagccaggtcagctctgactccccaccctcaccccagcactgttacacaacggtcactgccgcgggcacaaaacaccaagggacaaacggactgtcgcggggagaggggaagaaaatggggttgcgtggggtggagctgaacagaagcctcccacagagagcaagtgtgcagacctcagctcctctcccctctctcccacaaccctctattagcctctgcagggcttctgggcacctgcatgtcagatcgttggggttagaaccctcgctccaccacttcctagctgtgtgacattaaccaagtgaatttacttttctgaacctgtttccatactgtgaaatggaaataatgaaacctgcctcttgaaattatttgggagaattaaatgagatctcatgcctataaggtctattacattaaggtctatttacattacatgtaaaggacaaatcatttttttttctaagtcttctaattgctgaatagaccattttatttccagcatcgggcacacagtgggtgctccttggttcgatgaataaacaagccaatcccctcgctggttggtaagtcctatgaaggcaatgatggtatgtctcttactactgcatcctcaccacc

SEQ ID NO: 45099 - DNA, 1889 bp, Homo sapiens
ccctccccgaaccctgattcccacttagctcctcccccaccctcgcggccccctcctggcccttcaacccccttctcagcaattagcttactatcgcttgcccagctcccctgcagaagtagccacagcagcagcccctctgctaagaagatggcagaccagcaagacacccacttccagctgaagtcccttttggaattgggaattggaggtgggtaggagaaggggtaaaaactaaatgcggccagaactgaatccagacttgcctccctatcacactgcctctggctacctctgggggccagtctgcctctcccctcgattccaccccatgccctagtctagttgtaattacaggttccaattcccccagaccttaacgtcaataaagtaacacccacctactcccgcgccccccaccccctacaaacacagctagacctccggcttgtcataaaaactttctgggcggccccttccctggcagctcccgagggttgacccagagcaggtgctagaagcctcgcggcgtcttcctgcacgaagcgacccaagcagccccagtccgcaccgccttggtcagcgggcgctcccagcacacacccagcgcgcggagcgactcctcccagaggacgccgagtgtgtgtgtgtgttgcggagattagggggtggcgggggggacggcggcagtttcttgggctctggcggccccacccccaccccggcagcgcccagcctccaggaacccaaggcaaggctagggcgcggcgtggtgagaacgcgcttcggctagtggggggagcccttgcgccccccgcacccaggccaccgcggggaatccctcctccccggcatctccggcctcggcctagggtcccccgcaagccggagccggcgcgagcggcgcagcgggcgccaggagggggcggggagggagccggcgccggaatcacaaagccgcgaacccggctaggcggggacattctcataaaaccgaccctctcgtggcgagcagagggggttttttgccctacgctcaatcctccaaggcctcagtgccgcccccagtctttcctggcagaagaaatagtagccgaccactgttggggaaactgaggccagaattctgacttacagagggtagctggggggaaggggtgcgagaccacctcgcctacaaattctgctcctatgcctgccgcgatctccgttctggctccagggcctgcccgcgcacacactggcctacagcggggaccaggcggagggggcgctcaggtgtgagacgaacccaggtgtgcgggacccaccaaggtgtgtgggacccaggtgtgctggagacccaggtggctcagaaaactcagctaaatggctggaagagggtcgcaatcaccgtcccaggctagcaccctctacaaaggaacctggggccccagagctccggggaggcgggatggcttggccagccaggtccagcttgttcccggaacaccagccggttcggcccgggagtgggggttggggaggcgccgactgggaagccggcaggccggcccagccttcccgctgtgccgatatttacaataataatgtcgcgattaacgtggcggggcgcttggggctcgccgaacgaccccggcggcttctcctgcctgaatctggactccgagagagaggaacggagtgtgtgtgtttgtgtgtatgcgctgcagggtgtaatgtaatgtgacactgttggtttaaggtgtgtgtgacacccagtgttaagatgggtgaagcagtggattctgtgtttgtgaccgtgaggcgctgctgtaggtgccaattcctgtgttagagtgtgtgccatcaagcgtgtgctgagatactgggttgtgtgtttgtgtggg

SEQ ID NO: 45100 - DNA, 2039 bp, Homo sapiens
tgatcgtgcagacactgaagcggattctgagctggcgacggtgccccagtgggcgctggtgtgcgggaggtatgtctgtgtgcacatatgcagggatgtatgtatgtgtgtatatatgtccacggtctggccctctgggtgcccgcgagaagctggaagcggctgagtgagccgaggtagttgcccaacaagtgtgtatgtatgtgttgtggacaacggtccttgcttgctccgtcctccgggagacccccaccaaactgggggccgcgcgcttccccaaacccatcctccacgccgcgcgctcctggagtctccttatccccgtctctccgagcgcgcccaggtttgggacgcggggactagggttctgctcagcaccccctcccctccctcggcttctcgccgcggacctgggaggacggaatccctcagccgcatcccctgctatgggctcccagcagcccccacctcagccccctcgcgccgagctcgtgttgggcccccgcggcctcgctccgccgagcgcccctccctcagctcccgccggccatgaccgcttcgggccccaagccgctgctgcctccaccgccgccggatccttacccgcctccgggcagcgccggccgcccgccccgctgtccatgagccgccgccggccccggcctgggctgcggctccgcacggctggggctggagctgcagttcgggctccggctccggctccggctggctctgggcgcagcagcccggcggctttgcgtccgcgccgcgctcccgctccccgagtgtgtgaggcggcggcggcggcggcggcggcggcggcggcggcggcggagccagcagagagcggagcgcacagcccggcccgccccctccctcccccctccctcccggcccgcccgcctccccgccccccctccggccgggaggtggagctcgggaccgctccggtccggctgggaggggaccccgagcaccgctccccaaagcctggacccctccctctgccatctcttcactgcccgaggcccagtacacaggccgtgccctcctctgagcttcaccttacacttatcccacccaagcctccatctaggaccgctcctggattcccctccttaccctactcaaacacctgtccccagctctgtctgccccctgggaagtcgaggcaagggaagtgtctcccacagcgccttcttccctgggcacctgctcctccatatccaccctcttcccgcccagatccccgatcgccctgtgtggccctcccttcccgctgcgctcggggaaagtccacccctccccctccggccgaagccgcagagcggtcagcctcggtggccgcagcaagccgtgggggtggggctatggaggggaccgtgggaggaggaggctaatgggacccgggggctctagagtgaggatggggaagatacacaagcgtgaagacgaagtgctgctcctgagcttaggctattcgagggtcccctgatcacctgccctctgcacggcgtagtgctgcggccacacgtatttgccagtgacttacattatacagtcaccgggtccctgccccgcgaggccgcgcagtgtcacggcctgtgtcacacgccctcgcagtgccacacgctccctatcacactcacaccaaatcacacacggtgtcacacgcagtgtctcacacactccaatactcggtttctcccattcagctctggctctctggcgccatctagaggtctctgagtagcttgggaactccctctcctgcgcttgcggtttggtaacccaggctaccaagtgtcccagttcaacaggacctcctgccttcttcgcctgcaggcccaggcagagtgttctaggtcaaaagaatgaggaaggttatccctagccaggcctagtgctgggtgaggaaaggctcttgttatgggatgaccagttgttgggcctctttttgccatagcctctgactccccatctctgtccttccccattttcctgttcctaccactcttctgtgcctttcctctttcttc

SEQ ID NO: 45101 - DNA, 1087 bp, Homo sapiens
aactccgtctctactaaaaacacaaaaattagctgggtgtgtgatcccaactactcaggaggctgaggcaggagaattgcttgaacccaggaagcggaggttgccatgagccaagattgcaccactgcactcaagcctgggcgacagagcaagactccatctcaaaaaataaaaaataaataaaaacaaaatccccactaataaaaagcaaaagcaagaggagctagtactagtatcagtgctgaggtgatgactcagctttctcagggctgaaggtgaggtcactggcctagaaggcacagggtgaaaatgagggcttgacccccactaatacagcagccaatagcctttcttggatccctctggcctggtcactcccttgccaaaacccttcctagatgtctcgtgccttcaggacagagtccaaatgttttacgggcttacaaggcgttatgaccttgcgctatttacctctccagactaaaggcctatcaccaccccatcgccatgactccatgcctccctcccggctccagctacagtgatcttaaactgtgctttctttgcctttctggaactttgtatcagtcagctgtgtcccctgcctgaactgggtttcttttcctcttcttcacctggttagtttccaggcctcatcattcaggttaatttagcatcactgcttccaggaagtcttcctgacttccatgcctaggttatgggccttccctgggtgttcccatagcactctgtactttcttcacaacagcacttgcttgtctccaaagtctacttcccagtatttgtgaccttatgttttcccctcccacactgattctgggctgaccctgtgagttgctttaaccaacagagtgcagaagtgatgctatgccagttcctgccagcttccacttgtgtacttttggaagctctgagccactgtgtaagaagttcagcgacacagctggagaggtcatgtggcgcagaggggacctgagactacatggagaaagaggcccagcctttccaatgccctacttgagtcttcatatgactgccatctgactacaacctcatgagagacccc

SEQ ID NO: 45102 - DNA, 1593 bp, Homo sapiens
ccaggcgcgatctcggctcactgcaacctcccgtctcccgtgttcaagcaattctcctgcctcagcctccagagtagctaggattacaggcgcccaccaccacgcgcaactgatttttgtatttttagtagagacagggtttcaccatgttggccaggctggtctcaaactcctgacctcaggtgatccgcccgcctcggcctcccagagtgctgggattacaggcgtgagccaccgggaccagacggaactattcttttccacaaaagaacaaacacatacataacttttgccacgtctgaagacgagggttctaatagggcgcgggtggtgtctcaggtattttgaaaggagctacccaagaatctcagcttgtcaggccagtcattccatttgaccctatctggcgcgtattggggccccgacaaggtaaggggttggcatgaagctgcacagtgagataaagctggaccggagctagaacccagaatcaaagccttgccctgtgcggtttctcatcgcctacgcagtcgggccctggcctggcatctccaggcaggtggccttggacggaagcccggcctactggcttcatttgtgggaccccgggggtcctctcctccgcccatggagcctggttactcccacttcctcaagcctagggcctggagaagcctttcctggttcgcggcctcacggtctgcaaggtcctcttacttccctgaagccgctccagccccacttcccgaaggtcccgcttccgggtggctcgcttcgccacctgcggtcccctgcctcggcttgggaacgccaaggacatcccccacggaagcctgggcccacatccccatgcccttgccgcacgtcaccgccccgctggccccgaatacgcctccgccctgcacttcctctctgcagcgccgtctttccggccgggctcccttctaattggccagctcagagcttcctcgggtactcggccactcggggcatcgcggcggcctttctagccgctgtcccaagggttggtctcgcgctttcggctgcgagctctctgtggtgctggcagcgacatgtggcgcctcccgggactcctgggccgaggtaagggacgtccaagcaaccagcgtcactctgggccgcaaagaccgaactggagtgggggcgggcccgaggaaacagccgaagcgatcgtgggccgggttagagccaaggaaggcggggcttgaaagagggcggggaagtcaggggctgctggaatttgagatgtggatgggcctagctagaagagggtggagtccaagaagttggtaggactgttgggagggggaggagtccaatggcaggagatggtggactgaatgaatgaaagaggattaggggccaatggagtaggcatagccagtgaagagaggagaggtttagagtcaaagagccccaaacattagtgagagtatatgtatgaacgtttggtcatcttagaacagtggttggcatccacaggagaccagcagaatcacatgggcgcttttaaaaaacgtggatgctctaccctgagaaatcttagtttattggttctggggtactacccta

SEQ ID NO: 45103 - DNA, 2417 bp, Homo sapiens
ccgccaccatgcccggcttattttttgtatttttagtagagacggggtttcaccatgttggtcaggctggtctcgatctcctgacctcgtgatccacccgcctcggcttcccaaagtgctaggattacaggcgtgagccaccgcacccggccttctaagggttttatagttttagttcttacatttaggtcgttgatccatatttagttaatttttgcatatggtgtgaggaaggaagtgtataattttaattcctgcttagcctgacgataatcatgtgacccttggtaagttcttgcacctaagtctcaatttccttatttgtaaagtgagaataacaaatggtagctaaatcataagattacagtgaagatagaaaatttacgtagagcatttatcacactgcttgaagcatcctaactactcgataaatgcggtcggtgttacagttataacatgagcgatgaatgcgtgcttccacagtggagtgccagaaagaccggcagcatttctgagaaggtaaacgggaggaagtaggcttgcttagtccacttggagaagcaggtctgggattgttgtgagagtctctgccctaggtagaccactgcctcatgatcccctctagagattggtaaaaattcgaattctcgggccccatcagaactactgaaaagagcctcctgtgagcacagggctcgcagtaagtgggggtgacggtggtcgcgccggcagcgccgccttgggcctgcgggaggcgcccgagaggcaggggcgaccacggcggctgcgcagagtcctccctatgccggcggtcgcgccagcgggatccgcctggctcagctgacagctcccgagaacggaagaggcggcgcgccggttgagcagggcgtctctaggcctggtcggctggcggcggtgagtgggccccaggcaagggcggagggcggaactttggggttcggcactgccgggcggccggaaggtacggtggggatagctctctgggcgcgcgaggcagagaaggggaccgggctgggactgtacactgggcctcagtccctcaaatccgggaccgggcgtccgcagctcggctggccgggactcccttcgggacgctgaggaggaaggggaaggtgtgggccctgctccttcgggacgccccaggctggccagcagctcacacatccgcattgcgccctctgatcccagcgttggggcggatagctagcgttgggcctgcccctgttttggggcagtcgcccaaacgacgccgcacgcctagtggcgagctgaacccagactaggacacccgaagaccaaatggatagagtgagaaggaaatgggggttagcaacctgaattgaggtactggattccaagtgacagcttcacaagctgaaatcttgtagggtaggtcatgaggaactgttgaaactgcttggagtagaagttcttagccctggctgcatattggaatcacctggagaacttggaaaactactgaggcctgaattaattgttctagggtgtggcctgggtattgagattttaaaaaacagctcctcagaagattctaatgtgcagtcagatggagaacactaacctaaaaccataaactgcatgaatgaatctctcatcccatttgcaaatgttttaacaggaagaaacaaaaagcttaattcaattagcaccatatactcccacctagtaaaataagacaatgtgaaaggacctaatacagtacatagtaggtgctcaattaatgtaaattgattctgaatctcattcttatctcatttgggagttacacatccgagaatctggtttttaattatggttttgtatatagtatttttgcatataattttagggtgttgataggattctccgtagcccatctatagaccacactcccttttcccctcaccccagtgaagaagcctagctctaaagcatttagaataaaacttaaaagtttgtgtttgtgtactcttgttttgtttaagtatttttctgttaccaaaattaaccttgagtgccactggcaggcttaattcatgaacaagagaggaaaaactggaggggagtggcaaatgaaggaatacaagaagcagaagaggaaaggagaaaaaaacaaaacaaaaaacaaactgaagagattgtttgttatggggcatggtgtcctgtactttcatatgaccttggtgttcctccttagctcctcccatagctgagggcagacagataaaaagtcctcagtcattgctggggacatgcaaatactcctttaaccacatggctcagttagcctgccctaggagagtaacatgcacttgtagattaggattggctatatgttaggatatgtttgacttaagcagtgatcatggaaattcagaattttaatttggagaggg

SEQ ID NO: 45104 - DNA, 376 bp, Homo sapiens
gtgctcatttctacagtttgctttattgtaaaggcaagttttccattttgttattaggaagtaatctgtggggtgattccttggcacaatgtgaatatcctgttctccaagagctctccactttcagcatcagttgatgatctttgttaagaggtgtctgttaagtaaacacattggtattgtgaaactgtaagagaaattgaagaaacaagccctgccatgaactattggaaatctagtgttggaaattgcataagttgtagataacataaggaaaggaagacaaattgacagctacaaaacattctacaaatggagggtgcaaggactgtgaagatagaatggagtgatgagcatgtagtagtaataatagtgt

SEQ ID NO: 45105 - DNA, 751 bp, Homo sapiens
gccataggagtggtccaggagaggacaatttgatgctgtaggtgagagttgggagtgttgccagagcaacgtcctcaaggaggcaagagaggatgggatctggtgtgcaagcagagggctcggccaaggagcaggtaacaggaagacagcaagtgtgagagcagggctgacgtctgggtatgtgatgatgggaactcgtggacattcttttctgattgcttctgttttcaaggtcattagctgaaaggaaagctgggatagaggggttagaggtttgggaccttatgatttagtctttgaggatactaaatggactagtctgattattaatgtagtatgactgccagctggtggtaatggctcccctgaggtccaaagtactatgttctgttttacctgcccattattgcataactctaaatcctgtcacactgtatcttaccggaaatggacgtgtttcattagcatctcatcacagtaaggattttggttcccaggaaagaagcatcaaattttccaagttagatctcctcagtaggccagttggctaatccattatgtaatatgccatgatttcccctgattgttatgtacgatcactactcatggggacaactatcaggcttatggttcaacaagtaccagtgccttctagatatcaaggcactgctataggggcagaatagagcagtatttaacatctaccttcatggagtttacatttagtgggaaacaaaatacacgtccagtg

SEQ ID NO: 45106 - DNA, 4451 bp, Homo sapiens
caggatgatgagcttcatcttgtcctgcagtgggggagaggggatgacagaaaggaatcaatggtaaggggcagagaaagagatggaggtggtgggagaagcttctcttacccagcaacaatccccttcccaagctgtctgagccaggaaaaaggcctttctattcacagaggagctaagaggctaggccagtcgtctccaccacccacagaccacgaggaggcgccactgggggcagatctgggttctaatctcagctccttcacttaccacctgcaggacctcggtcaaaggacctaagttctctctgagccgtttcctcctatgtaaaaattgggacaatagtacctacttcacagacttcacgacgggtaatatgaaatgagagaatgcatgtaaacaacttagtattttctacgttggctgttaccatccagatagatgctcggctcagccccgcctccctcatccctgcccctaccggaacgggataccctaccccctccccgccgtctaccccaagactcttcctccagaagtagagaggtcatgggatcatgctgggccactagagcaggtggggcaatgagctctgcctggggagctgtgtgctctctctggactagcggaggggtcttcctactggcccaccttgctttgcgaacccctctgggtcttcagtttcccccaaagcacaaaagggaaaaggtaatcgctccagaaggaggacattttgttcccccagcactgcggttagtgggagtgtgaaggaaagaggcgaaggtggcccgcgcggtcgtcggtggggtacagcgtgtcccccacccccattaccaccccatcgcccctccgatccctcctggaaaatgtgtgagggcggctccccggggtcccgaccccgagtgccgtagggctggggcagcgctccgcgctccggcccgcgaggaaggtccccgccagccctgctacccacttacacggacgcctcccgcggcggctgcagcgactgcgccggcggcccggccccgcgcgggtcacgtggctgcgggtcacgcggcgccgcgtgcgccgcccgccgggctgactcagcttggccgcagctacccggaccgactctcccaggtggaggagttccggccactcagtcccacctcggtccctggccccggcaggccctggaacagaccttaaaaaacactttcccttgggaggcggggattcgagtctggtttgtgtgtgtgtgtgtgcaagaggagggagacttgaggggcgccgggtcgcccccaggaatacaaccccctggaccttggggctggggccggggggttttagtgcaggggttgagctgggggcaggcaaagcagaatcgcttcctcagtctcctagggttgggcctggctctgccttcagtttctttctttgtttagatgccatttatttacccaagtattaaaacttgtgttgtttaaagtacaattgggctttttaatgtccttttttaaagatcaaactttgcagcattatataatagagaaaaaggcaggcccctggtttccccaactccccacaccaagataaccattgcttagtttaagagtacattctgaattgctttctttgaatatgcttacactgttattttacataaatgggaacacatacacatgaggcttatatatatcaaggctcggatatttgacctgcattatttcacttaatccttattaagctccagtgaggtaggtttgccgttactttttaacaggtggagaaactgacgcttggagagaaaaattaacttggccagaggcacaagtggtttcccttgtgccttcaattcagggggatctgtccaaatccaaaatccatgctttttaccgctagcgggcactgcctcccagctggtatgactggatttgggacgcttccatatcagaaaaagagatccatcttattctttccagtcaacattagagtgttccagacttctagggacacttgggaactttccatgcggaggctggaggaaggacttgagtgctggtcatcagtaacatcttccattacatagggttttgccagagctttgtgcgcattatttcatagaatcccgcccaatcgtcagatatgattaccgccattttattgatgtggaaactggggatcaaaggcgtacagagacttgtgatatatgacctcatagtctgacatcccggactttagtcagtgctagggagcagtggtgagaccttctgaatcagcctagttttcctccagcagcaaaaggccaaaggaatcctggctttatgcccacgggacagggccttcctcagtcagccgggtggccacgttctgcaattctgctgaatctgctcactgtggacagccccaggcgctcacccagcccttgggcccaactgcagctccagaccagcttgctaggggtaggcttcatctggtgaggccctgatgagaccagatggtggagctgatacctttacagtgtgggggacttgctctttgcctcagtgttattttgttttgttttgttttgttttccaaatcctgagaggctgtgaatggctcggtgttggtgtagtttttgtttatttttaaattcagtcagaaatctttttttttttttttttgagatggagtctcgctctgttgcccaggctggagtacagtggtgtgatctctgctcactgcaacctccgcctcccgggttcaagcagttctcctgcctcagcctcccgggtagctgggattacagatgcccaccaccatgcccagctaatttttgtacttttaatagagatggggtttcaccatgctggccaggctagtcgtgaactcctgacctcaggtgatctgcccgccttggcctcctaaagtgctgggattacaggcatgagccaccgcccccagccagaaatgttgtctcagcttgaggactgcagatgtttcacaatgaagctccaactccaatctccgatcacgtctgataacatgggccaggtctgcagcatctgcatccagacctttccaggaggagagtgactgacttctggtgactaagcccatttcccctgagttaccccttctgcagggaaccagtgcagggtctctgcgaagcctggaggctcttggatcagcgtggggactaatcggaaagacctgcatttcaattctggtctggctaatttctggttatttagtgagtaattcaagcaaatgactcaacttctccaggtctcagttttcttacctgaaacataagaattgagtggaaattaagtaatactgccctcgtgtggctgttgtgactattaaatgaaatattagcatagcatggcattcacagccagctgttattacttaccccttatttcctcctaaccctccttacagcccactctctaaccatactgaaatgctctctagccctaacctcctgactccctgtactcctcctactccacatctgtgtttaaactattacccacacctatcctcccatcctcttgtcttggaactaaagttgccaaattaaaagaattgtgagtttatccatgcaatggaacactctgcaactcttgtatggtcagatatttttataccttctaatgcacccttgctttgggcaaacaacctgaccagatgttacctcccaaattctgctcaattcatagagtttgtgtggtgctggccctaccctttgacttaggagcaaaccaattagagactccatggctctggccatgattagttcaaggccaggcaggcatggaagacactaacccagcagccattcagagactccttctcccttgctgcttcccactggagaaactggaaagtcaacgactctcacagcttctcccacagctacggggtggccaagtaacttcattctgcccaatgagggaggaggatggcttctggttagatattttacttcctgagaaaagtgctgtgcttgagaaacaaactggcggtttctggttccttccctttccttcctgccttgaaggcagttgtgatgactgaagctggggaggccacgttgtaactgtgaggcaccaagcataaggatagagtggaggagggaaaacacttatgtccttgatatctgactagtgctgggacctcctacttctggacttcttctaagtaaatggtaaatgtccttatggcttaaactttaaatcattgttaggagaatttcctgtgacttgaaattgaaaacatgactcactgctagagcaggtgattcagatcttccttagggtttatgccactactgggggaaaatacacttctcctgagatcttgagccgtaaaacagaggaaagcttagagctacagaaaggtacaacaaatagaagagagacacagaactctgatgacatcatttgagccccctagaatagcatgtctgaagccaaata

SEQ ID NO: 45107 - DNA, 2048 bp, Homo sapiens
aaaggatggcataaacatgaggatgctattataatcatccaccctaagtaggatttgagatccaagcagttctcaaggatttagggttagcaaactttttctgtaaaatgtcagatagcaagtattatagggtttgcaggccataccaaacaaatgggtgctgctgtgttccaataaaactttatttatggacactgaaacttgaatttcatgtacttttcacagtcatggtggcagaccggatttggccccctccctgtcgctggctgacccctggtttatgagtacggcagataaaagaagggagtgaataagaaccacgattctgctgccagacacgagggatcaggtcgctgctgtgaagattgtcaacctctctggttgccaacgacctcgagaatggggttgtggtccctgcgtcagggcggttgtgctgaaggctggatgagggcacgtaggtgaagctcagtgcttggcacgaggtgctcatcagcagcatcgcccttgctttgggctggcctgttagtaattcgtttttagtggaatcgaatacaacacttgagcctcggaggctcaggtcgtcggagcaactacaccagggccggtgcacctcggggcggcggcgcaggactaggctaggccgggccgggccgggcagggcggcgcgagtcgggggtggggcggcggcgcagcgccgtcgtcgtagtccccgcctcttccccaggggccgcgtcggagcctcggcggcggcggcggtgcttacagcctgagaagagcgtctcgcccgggagcggcggcggccatcgagacccacccaaggcgcgtccccctcggcctcccagcgctcccaagccgcagcggccgcgccccttcagctagctcgctcgctcgctctgcttccctgctgccggctgcgccatggcgttggcgttggcggcgctggcggcggtcgagccggcctgcggcagccggtaccagcaggtaagcggcgcccgactccagccccgaactccggtccctggctctgccctgcccgctggccgcctcaggcctctctggccggcccgcggccaactcgacgccggggcttggcaggccgcgctgggcctggaggggcgggtcgggccccgggctcggattcgaggctgccacgggcccggcctgcccgtctgcgaccccaggtgggactccggcggtggaaagtcctcctcccggcctcgtttcccgcatttcccagggcgggcgggtccctgagtcagaacccgcgacccacaggcggcatcgatctgaggcattcgtttttcatttttccacctttggtttgatgtcattggaaaagaaagaaagaaaaaagcatgaaacggaaactgggtggagagaaaagattaaaatctctgctgctgccgatagctccccacagcaagatgctattgctcagggtttcagagcctagtttgtcgaaacccatccccctcgcctccgttttaagacaaaagtaaaaaatgaagcaagagacaagcccgcagtttgcagtagatttggaagaggcgatgtttggctgtggtgatgccccaaaagggagagctacgatgaagtctgcagggcgtgtgccgggtgtattttaaatgcttggaagtgacgttttaagagatttgatggcatagctggggaggaaatgtataggaaatgattggatcattttctcgggtttgatttaatacattgaggccccagggaaaagagctgcttgtttcactccgcgtctgtagctaagttcccccaggaaatttagagaccttctgcagggtttttggaagtgttaatctaacatacagtaatggtgggaattgagccaggtggtaaactgatgttgattggaaccgcaaataacggcttgtgtttgtcatgtttcagatgctttcggtgcatacagatgtcaatcctccttttatcaaataaaatgtcctatcttagacgatctacaattttatattttagaagtaaggaaagccagccagtacgatgaaaacgtagattaaccctggtgc

SEQ ID NO: 45108 - DNA, 1388 bp, Homo sapiens
aaatatatgcaaatttgtagaattaaactcataagagggatcttcacattgatttagatgaactccgttcttccagcagtccagatcatgtcatttgtggggacatagtgagttcagattccatctagcctgatgttgattcatggaggtggagattgggatgccatataaaccagtggagattattgggcactcttggttcttgatgtcagatatgtgagtgctgcatttgtcattttgtaaatattcatccagattgaggctgatgaaggtagggcattgtgggagaatggaagcaggataagtccccagaaatgcggggaccatcaggcctctaggctctattctagcaagtaactggagtgagtgatgagcaagtacagaagcctagtctgggcagtgtgatggcataggcccagatgttcccctcttggctttaagatagtagacagtttgcagaccacacctactgtgaggagcgaagctcctaaaatcattgcttggtagaaatagtttatgagcccaatctaggatgatcctaaatggcgatgatgtgcattcagttcttacaggtaccagggagaaactaaaaaccctagtgtctaagggcaagaccatcataatgtaactgccgtatattggaagcaaaccacatgcttggtactgtgcttgatgcttttatatattttgtatattgtttccaatcttcatagtaaccttgaaaggtagagattatattatctccattttacagatgtgaaaatttaggtccagagagaaaaagtaattttcccaaagtcatatgactgataagtagcagaagtgaaagtcaaacccagatattctagaatccaaagtccttgtttgtttcactgtactctgcagatctgttgcaatatatggtaaatagatcagtatggaaattagctctgattaatcacataactcttcagaatactttcatttgatacaagtacatatttaggaacttcttaaagggctctagtattcagcagacatgtataaagcactttttaaatataagatgcagtatattttacagtggataggtaaaaagctttgtataaggcagtgttcctcattgttattcaaaagcctaaaatccaactagggtaaagggcccacaaatactgataactaagacacataagagcagtgggcatcaagaactgaaactttttactgggtgatcataggggaaaatgagatttgatgtgggcccggagttttgatgggtaagaacattccagagggaaaaaggcacagaaagcaggtgtgaattcagccaggtgaaggcagttctgtggatgtagtaattggctttgtatgagcaagagtttgtgaagggagatagaaagtcctgacta

SEQ ID NO: 45109 - DNA, 975 bp, Homo sapiens
ccctccaggagccaaatagatcaaaagaggttggaggtgggaggtggaatgtcccaggctgtcttctcccaggttgaggagcggaagccatgacaactaaggggatttgtggaaattcctcatgcattgttaccaggcaaaggaagtggtttagtgttgagctctcaatttctaccctggggagccaccaccagtttccgcttctgaaacttgtttgtgggaaactgaaggggctgtttcaggtcttgagtgtggggggctccagataacgccacgtccctcctttccagaggggaaaggggcagaagggcccagcaagccagacaaaacacccccagaatctgctctttttccttccactctgaggctggtggctcagagccgaggcaaatgaacagaaacattttatccaggcctgctggtatttgtttctggcacgatcagcacaagcagattagagaaataagttgcattttttcatctgtttgctgtttggactggaccttggcacgctggatctgtgtggttctctacagcctccagtccattctggagggatggctgggcctgagtccctggcatggctgtccatactctgccagatagtgagtcacttcccaggctctcgggaaggtggtaattagctcaccaggaaagatacacaggcacccatacatgcgtctacatatggagacaccacttaacgtacttacacctgcgtatccttacatgcgccaaacggctgcatgtttccttctcattgctctcctggggtgcctctggctctcctttctgatgcaggagcactctgtgggagccccccagaaaacaccagaggaaggggaagctggcttttctgaggccagtaagggtctcccatggaaactctggctgggaggcagacacggaagaccctaccaggctgcgccacccagtccctgccagaaaactcttgcccagaaaatcacctttgag

SEQ ID NO: 45110 - DNA, 866 bp, Homo sapiens
cagcaagtcctgggaacttgttagaaatgcagattctcaggccccaacccagacctgctgggccagaaactccaggggtaggaaccagcagcatgtgttgtcacaagccctccaagtgctggtgctgcagggcacagtttgatcatcactgggaaggctctaagctttcaatcagtggggaaactgaggcctggggtgaggtgggaggaaggaaagtaacgcattcatcaccggtttgtttgtggcggaaccagaacaagttctgccaggctaggtttcctcctgccccttcttctcctgccagtttagagaggagaaggctctaatgtctgaaatcccaccaattgatggcagttgatctggctcttctctccctctgctgaccttatacccatctgcaaacttcaggaggactctgtaccacctctcatagtgggcatgttgataattcagactttcacttttcagtcaatgttgtgaataagcaagctagaagaatgacctttgattttgataaatgaccaggtctttcacaagttgagttagctaagtgttcctgccctgctgcactcccttctaaatgagggctctatgcctgccacccctgctaagtggacaacaccttctgctccatgggacaatgctccatggtcactgatattgatggcagggggacagagccctgactgagaggagggggcagccacaggctagctaagaatctccaaggcccatagacttgaaaagatgatctgggccaatcaaattcctcccctgggagtttagaattgggaaactcagaggctggggccattagcaatggaaaccaaagctgaaaggccatttggggaattgcatgatgtaga

SEQ ID NO: 45111 - DNA, 1602 bp, Homo sapiens
cttcagaggctgaaatattaacctctcagccctgacttacaaaagccctccataacctctgggaatttatggaaaggcatgaaagtgccatcactttcacaaccatggactcctccagccctcacggaacatcattagaacatcctggggctctgcaatgcaaccaacagggaaggaaagccagatggggcttacatcagcctgaaccccagggaggggaattttcaatgtggagagtgaaggctgtgggggtttgtaatctctctcattcaaggaaggctcagagttcaagtgctcttcactccagttcagtgttacatgccatcccccgtcttaaaagtggtttcatttttagttttcttatagttgaatggatttcacttgtaggagtttattacaaaccagtccccaaaaggaaaccctggggtggaaaggaatctctactcctccccacctatcaagttgaacttaagggtccctagggtaccttcattgatggggtccctggcccaggtctgtgaggaagggagggagccagggcacagagagtcctagaatactgaatcagcaggatatcaaaatccccagaacacgcgcaacactgtatttgctgcttggcgggtctgggagcccagaaccagccagtctgacactcactgcatttgtacctgtggggagggggctgagcatcaggctgcaaaccgctcaatacaggctggctgaaaagaatcaagaggcatgttaaatgtccgcacaattgagcaggatgcctaatcccacccacccacaccctccccttgacttaccctagggaggtgagttgggaaatattgggaaaacctgacagttgtactttgaaagctacaggtcagctaatgacaaactggcaagaggctgtgaatgaatgggtagtttaagcactgccccattcagtctcagcgggttctttcagtgaaggctgtttaaccctttaaacaactcagaataaaggtctctaggctgccagagagcctgcccaccactattgcttggttctttgtgacactattccagtttagctaattaagctacaaccaaataatgacttattgctttaaaaggactttaaaaagagggggagggatgctgagggaagcagaggacttgcccctccctataccctgcaaagaaagacaatctctgctgagaatggccccagtggaagaataaagcatttgggcagctggatttgtctatgaatctttcttccttcccccacctccctacccccagcaccagcactaagaagctcacctctggccacaatctgtcagagatcacaaaaaaaaaacggttgtttttcatcacttcatcccaccacattaccgattcccaaccctcttctcttctctctttcacagccaatcagctgagctccaaagccccagcacacggaagggtgggaatcttgctggactttgggctttgggctatttaatcagcttcgagtttctgcttcactgtattaccgccttaattgtctgctcagattcccataaagaaggattagaagccaagagtcagtaaagaaggagtcagaaggagcctgttaaccactggcat

SEQ ID NO: 45112 - DNA, 2892 bp, Homo sapiens
tccacctgtccacagcctctgccctactatgtgttctgtctcctcccaccagcccccaactaaagcttcagtgagatgaggccatttcagagggtgatctggaaaaggtcatggagctgggcaggagggctaagggcaagagggcatttacactccactgaaagggagtgactcctgataaccaacagatgcctttaaagtctgctcactgtaactgaccaatatttgtccatgaagatttcagaaatctgctactaaaatccccaccctacacccgtactggccacatggcgtggttggtaagtgtgtgtgctgttcaccacattaggatttgctggagcctcgcagcacgtgagaaccctcccaagagatgggaaagaggaaatgtgatttcacactggacatctccactagttctttcccacccttctgggagacagagagggagagagaaagagaaatctttaactgcagccctgcctctcctagctctcctgacacccgccctaaaaaaaaaaaaaaaaaggctgaaaatttcagagatgtttatgctccatttgtgtgaagatctggagaactccaaacattgtgaaatccaccagtgcaatattgggtagggcctcaggccagactgagctcattaagagattgataaacccgcagttcccaacttctctgagccttataccttccagctttgaatcccgagagacttgtcagggaggttagtgcctcggtcagctacagacacagacgagtgcttgctcccgcccctctgcaagttctttggcctccagtgtgtctggcctctcccaaaactggagagaatcacgccactgatttggaggcaggaaagaaggggatgccactaggtttgggcaccccactgtacactcttctttccagcactaaccgcgctggggggtacggaagccttgctgcgccagaaggcggcctcctgccctcacagaggccttggcaatatggatgcccctccagcagctggtgaaagaggcagccagcagctccctactctgcctaccatctagcccctccagcccatttcgcctctcttgcccatccttcagccctataagccacgcaaccattttctgtctcccctgcctctcctgcccacaaccccctgcccccaatcaaggagaattgagaaaccgtcttcttgcacaagagcagctactgtctaaatgctttttgatcgtctgcatggagggggaactgggcacagccctggacccagtgatggagccaagctctagctgccctggctagccaaacccgccctcacccagctcactgtccccggggtcttggcgattcagaatttgtcagaacataccgtctctatcctcttctctgtgatgtcaagcctggtaccaccaagaaggaaggagggaaagcaggagccttatctctcctacattcgcaacctcttcctccagctcccacacgcctggtgttatgtaaacgcaccttcaacccccaccgcagccctagcgcggcctgggggctccggggcctggcacagctcggtgcccgaggatagggaggtacagggtggccgaggagcctcaggccttacagaggccaggcaagaaaaagtcaactgcaaggcagttgcatagcataaaatgcggcagcggagcaaaggtcagacggcgaggaaccgcctcgccaaggagagggagtaggaatgcccagtcctgagccagcccctcgctgaccatcgagggagaggcagaaggggagggaattcagtccgtcacggctccgaagagaaagaaaaaatctacgtcgagcataggccgctacggcgggctgggagatacacggcaaagctggcaccgtgggcaccgagctgggaggtgggcgagccgcccagagcgagggcgccccccgacccaaacggtggctcctgaccaagcccagagacgcccgttccagcgttcgaggcggatggtggcaggagaaggaaagaggccaggccagaggcaaactcccgggacacgcacggggcttcccgagtctcagagggcggggaagccgggcttggcaatgcccaggggtcggaaacggcggtgccaggctgtgaacacccccggcgccgtgccggccgggccgagggcgtcagggagctgcggcgcaccgcagcgactcaaggaggcgcaggctgagggaaggaacactgaggcgcgcctagaaatagcgcaccatttgccccagcccaaggggggagtcgcgtcgcggctcagagaggggcagtttcagatctccaaaccagccatggacttactttgaggagctgcagggtcacaagcatcgccccacgtctgtgtaaatcctgaagccggggcaggttagccgccgctgtactcgcagacgccggtcggaggaaccggcaaggctccctgcgctccacagcgccagctccgcgctgtcagctcagctcgctacctccgcggcgatgttgcaaccactgcctgggaaaatggcttttttatgaatgggagggaagggagcgccagtgcgcacgcgtgccgttcgcgattctatgaatgggtgggcacaacagaccctgagcgcgcatgcgctccgctcctttttttatgaatggggggcgggaaaagatcttaacccgtgattgctgggactggctcaagctccaccaggagccgtcgttcttttacaaagaggggtggaggttccagtggaggctgttgttgcctttttttttttttttttaatgaatggagggcggcggcgactgctgcagctgggccagctgcgcgggctgcaccccctcccagcctgcgagaggaggtaaaggccaccttcacgccactgcgggcctgggcaggaaccgtcagtgtcgct

SEQ ID NO: 45113 - DNA, 2000 bp, Homo sapiens
ggtctttgggatgagacttctgagctctttcctgataataatgtttggacctttccaacccagttcttcctagcacccttgccttttcatccttggatgcctcaggtcagacccctcagagaggtgtccctacagaaagccgctgttctagaatgtgacccattaaaaaactcatagcacttgtagatgtgaaataatcctgttcattcatttttgagaatctaagccccctgtgggcaggaaccgtatctgtgttgttcctgcggtgcgggggcttagagtagtgaccagcacttagtaaaacatactcattaaatgactgaatgaacgaaatcccaggaggccagttgagtagtttttttttttttttttttttttcctggtcccgaccatctgattctcattacttctacagctcgggaagtctctgctttggcattttataaacctcctgtgcgtacgtcgacattttaaccataaatccagagttttgggactgcaaaactcgaggccaggggattgggggagggggataactacccggaggtccgaagcccggcggagctgccctggggttggggggagggacgggaaccctcgggaggacgcccctccgccccctgcccaccccctcggcgggacatggccccgggccgggacgtccttcagattggtgcgccgccgccgcggccgtctcctcccgtcgggcggggtggggggtggtgagggacgcgatccaggtcgtggcctggcggcggctccggccacagcccccgcattccggccgcgcgcccccggaggtgacgccttgaggaagctgtatttttttgggggggagccgcagggaaccgttgggagaggggccctgtgtgtgtccctttaagagccggagcgctgcctccgcctcgcaggcgcccggagcctcacaaaagaacaggatgttgttgatttgtcaccaaaccacagagaggaaatgattgtaaatttcctttaaacatccccaccgcgctccggccgcccccgcttccgcctcctccgcccccgcccggttcggcacagcggggcctcagcgctcccgcggggcgcctgctccccggccgggccacgggccgagcggctcctgggcgcctgcgggaggagcccccggcccggccgctgccccagctcgcgttccagttgctttttctacagttgcagcggaggaaggtcctgggcttttgtgtgagcccgcgcgccgcccttctctccgggagcgaatgggaaccgcgcgcggggagctccgtgctgtgtctagggagcgccttagcgcgccatccccgtttagcctcgcagcttccctgtagaggcaacaaccgttatctccttcgttagggtctggagggaaactgaggcccaggttagttacgtgagccgaaagtcaccagctcttggaacgctttgggggctcttggaacacaccatgcaggtttaggtcaccccagaccttatatttgtgaatcagtgagcgaccggaacattctagaatccccaagtcatcaaaagtggcaatttacattgcgaagtccaaagcaatgattgccaagtccaagttttttcgtgggggaacgtccctcaccacttccagccgggcatccacttttcagaagctgtttgggtctcagtttctactttcactccatttgcttgtaagatttcaggaagcctctggtggagtaagtgtttgctcccaacctgtggcccatgttggagtggtgtggtctgtggtctaggaaagggctgcctttgctgtacagagtgttcttttggagcaagtaatgcttattccggcataggctgcactgggcttcttgaactaaaagcagcagctaatgtcctagacaccgctgaacagaattctctcatttcatcctttgaccagccccaggaggtagaggttgcttttctctttaaacagttgaggaagcaggttcagagaggctgaggaaccggaccagcttgca

SEQ ID NO: 45114 - DNA, 1048 bp, Homo sapiens
aacagtggccaaggtgacacctggcaactgagttgcatggttgacaacagcttagggcctgaagttcctttttgtgagtggaggaaggtgataagtttaatactggaaaaccccatgttgtgtttatggcagaaggggggagaaacacctttggattattgtaaacaagagaaacgggagaacggggtagcctgaatccctctgtctccccctcctttgttttaatttccctaagatagtcccagcacagcatgttgtattatacagcgataattaaaacacttggatttgtgaactgagatttatagggcaaacaggagccagaggagaaaacgacagtcatctcttttatttgcaggcagatatccaaattgccacttgcttgctttttcttcccgacactatcacctactctgcttaattagatcctttcttttccatatcatttccaactgcccgctctccctgctgcactgcagtttgtgaagccacacactgaacactttcccacagcccagggaagatgtgagtcagaaacgcagcagcaaacaagagcggaggagggcacctttgcatcgatcgatcgggctgtcccgcctgcctgtccatcagcctcagggagcagggacgggaggaacctaaccgagggataagatgagaaagtgctagacattttccagccttcctaagacagttttctactgagtgcccatttgttgtggggagtggagaggagaatgaattccccaaacagcaggccacccccaaatcacattgcagtatcaaataatattttgctatgttcaaaactgtcattctaaacttgaaacagggagggatggggggcagttatggggactgagatgaagaaaatgctgtcaaatttagaatctagtagaaaggacagtcaaaaatagctaatgagaatttttggctaaattaatttgttttgggcaaaatatttattgaataccttgagtatttgctgatactatgtgtcagacattgttttaggcactgaggggatacagcagtggccaaacaccaa

SEQ ID NO: 45115 - DNA, 687 bp, Homo sapiens
tttccagtaatcctagttcgaccatacaccaagaaggcagcaggagtgcaggagaactcttgcagccaggattaaggttgggaaggatttagatcctggtttggtgtgtgggacataggctgaagttagagtaattgtcagtattttagattctgtttcaaaaattattttctacaagctttgtgttcagccatatagttcacaacaagcctggtggggaggctggggctgtccacttgacaaacgggaaaacaggcacaggatgtgagtgcctggccaaggtcacctctagtctccagaggagatctcctgccggcccagtgatgagtcatgctggagtgttgctcccggggtgaaatcacaaaggaaggcaggcttggatttattgcaggcagcaaggggaagtttcctgttcttgagaaatctcagaaacagtaactcctccacctgaagggccttactgagtagcccccaaacccacacaggtacagggcctggtttagggtgagggagaggcctttggcctgtgcagaggataagcagtaaacagtagaaagaaaaaagaaggggctgggcacggtggctcacacctgtaatctcagcactttgggaggctgaggcgggcggatcatgaggtcaggagatcaagatcatcctggctaacacggtgaaaccccgtccctacta

SEQ ID NO: 45116 - DNA, 790 bp, Homo sapiens
atttagtaaaggttgcggaatgggtgaatggctctatttgaaggctgtagtgcagttgttctggcaacttaatctctggaagaccacagatgatgtctattatatccctatgcaccagctatgaccttggaaacaggccatcctgacagcatgtcaaggaagttgttatagggaattatttcagccagaagagatctctgcaaagcaatctgttccagcctactgtgtcatggagtagtccccacgtccccaatttttttgctggaaatgcagcggcagccagcgtgaagcctacacctgtcatgagctaatgtttgattcctgccaaagtttgcacttgggttccattaccagggtagagagtccttccagggaagcgtgttaatgtttaaccctttacccacaaattctgtctgtctcccggagaaacctaccacttgccaaaccactaccatgccctttggaattttgcttttgctttttaacattttttggttttgcaagcagactagagaaaggaaaattaatagaaactgggcttcacatgcaaggtccataggccgttttgaaaagtcaaggaagagtgaagctcatccttggccaggagaatatgcattggcagaaatgatataaagcctgatataggaagcaaacctgttagtgtgttaaatgtctcctttcttgccagctgcagcctgagcaggacctatggatgcatggttgggaggttagcaaatccaagcctcagaataacaatcctattgctgtgtctagcaaggggcgggaagcc

SEQ ID NO: 45117 - DNA, 2238 bp, Homo sapiens
ccatcatcataaatgccagccttgtaataccaagctacccaaacaagatgctgaagaatgagtttcctatgtggaaggggtcaatgaagacagcccatagtcaaaccaaatttctgcttgtggtttcaaaaggatgaaagatccattttagctttagtaaaacagggttcaaaggtctggagtttggtttactagggagtttttttgttttgttttgttttgttttgtttccaatttgttgagatttggtagacaagcaaggggcatcagtcttgtctgaaagttctgtcagctcatggtctggaggtggtgcccaggctgctggtggggaagggcccagtggaggcagggctgttggggatgaggctgagaggcctatgggcagagggccacagggtgcattaacctcagagagcagcaatgctggtccctgttgctgtgacaacagcagaccgcgccaggagacccagaggatgaattaaatggaaggaaattgctggtgccctcagaagaaaaaagaaattaaagcaagcttctcaggaatctgtggatgttgctgtgacctccactcgtgttgaacatgtcagcaaggaacattcttggcgatggggttgggaggacctgccttgcccacaggatgtccttcggaaaaagaagattgattgcacaaatcacagacgctaactttccctggctggccctggaacaagaaacccccctccacagtgagtgccaggctgtgctcagcaatggcaggatggcccattttatcttccagcttatcccacatctgttgagtttgccccgatgggacatggtgacctggaaactcacacagagctcagtttcgggatggatcgtatagaaaataaacacatgggataaatacagcacagggcaggaagaaatggttttaaagttaccaggagaactgcgggtgaggtcaggttcagaaatgggactgatttcggaggcccttagtactgacatcactcaaattgctcaacagagacctccaagtggagcagtggcttttggagtttgcccagctctatgtgtgctaccaggcagaagtgctctgacctagttttctttctttctttttttttttaaagaaaattttactgcttgttgtgaggcctccaacagggcactgaactcgagtagatttttttttttcttactattttacatgtcaggttccacatctctctcacagagacgtgccggcctccaaatgggctgcctggcgacaggaccaaagtgagagcctgggcatggcgtcagcctctgtccttttgctccctcagctcaggctgcatcccaaggcactgggattctgtgtttagggctctgccctgctgagaaagagagaaaatggccttttgagggattgaaccagagggcagcctgcaatacaacctcctggtaattgaatcgtgagtcctcaagccctcgctgcaaatacgccagcagctctcctttgcatttagaatagcatccagactcttcatcatggtctctgaggccctgcctgacctggttcctgcctacttccccgccctcgccctccagcactttgccttcctcctgcctttccagccacaggcatgctctttctgttcttcaagttccccaggctcatttcctccccaggatctttgcacgtggtcctgacctctgcttggacagctctgaccccagattcccatgtgttgactcctcatctgatttgcactcagacatcactttctcaaacaaacctaggccaccaccttgtgcaaaatggccctgccgcccatgggtcactactggtcacagccctgtgcttgctttccttcttggcatttattgctatctgaggtcatcttattcagttatttgtttactcctttgtcgtagccccccatcctaccccccagtgtaagctccgtgaaaacaatgagtctgtaattcttgttcaacattcttatcccaatctctaaaacagtgcctggcttatggtgggtacttaataaatatttgttaagtgaatgactgcttaccaagagagtgacctttccaaaatcttgccaggagaagaaggattgaaaatcctcaaggaatgagtttcccttggcccaataagcccgattttaaaggatacaggctgtctccacagagatgctcttgcccaaagtctcagttaattgaatctgataatcactgtttggggttggagtgtacctgttaggacag

SEQ ID NO: 45118 - DNA, 867 bp, Homo sapiens
tgtcaagagagcacgtcaaatatatgcaaatcattacaaaacatctattctccttgttgctttattttcaggcaaatttcagaccccaaaatgagaacaatggaataatgcctctcagtataatttctagaaaccaaagattatcactctcagagctcttcctttgacttgagatgggaaatctgatcctttccgttgatgaggattgtcctgtcttttaataggtttcaggggagattaaatttccattttttgtctttgttttgagtattactagctcagataagcaaggcagaggggcagagagtgactcgtgtgcacaaatatgacccgttgttgggaaaccggtaggaaatcctaggaaaagggtaatctttctaacaggtgcatttctctttgacttatctgagtctctcttgggaaatgctttgctgtgtgtttgcctggtgtcgacaacactgagtccacctccctagccacagataaaatagagttgttcattattaacctctcagactttgcacggacacctgcttatgcaatttagcgatccttggtggctggaaacccttggaggtgcggactgtcttcacatctgccaggcaaactgagtgcctggcttgggtcacctgtattcatagttttccaatgctgaggtagattttaaagtggttacagtatatattacctacagttatatgtactgagcagtcattgagtacaagattggaaagtcagatatggtattaatgaagtctagaagacaggcaaatatttggctgggatctgtatttattatctatcgcattaaaaagaagcagaaccaagacttaaaacttaggtatgtgtgatactaaagtctgtatt

SEQ ID NO: 45119 - DNA, 1312 bp, Homo sapiens
ggctaattttttgtatttttagtagagatggggtttcaccatgttggccaggctggtctcgaactcctgacctcatgatccacccgcctcaacctctcaaagtgctgggattacaggcatgagccaccatgtctggcctatacatcaatttttaagataatgaattgattccctgtcatcatcaaaaactgacttaaaaaaaaaacaaaacaaaactatgaactcatggaggtgtctcatcattagggaggtgagtcaggttgttcaacaagaccaaggctgtggagtcagccagtgttacttcctctacattccattgttgaaagcaagtccagacacaaagagtggaaggatagactccagcttttgatgtaaggagctgcagagtatttgccaccattatttaatctgtaatatctagttttgctgtaaatgcttccatgcttttttggttttctgtttcagtgtgagaattcgaagagattcaaagactatatcaccaccatggtcttgccagaatctgccctctgagtcatttcttaatctactgattatctgtagaaccagccttatataaacaaggaagcatctagcaggtgaggtggccacaacttctgctcctgatcctcatgcgtggcaggctttgcctccatactacttgcattaccttgtagacctccacgaaagcctcgagtccttgtgctttcaggcccagaaggccttctgggtgctcaaatggtcccttccatgctcattgtgctagggccacactatgttcctaacagaactgtccctacttcatgggcactcagatctggtccctggggccagaagcctcttaccataacctgtgtccatttcagtcaatatctaccattaactccttcctgccacctcacctcctgaaggcctgtttacctgcagacaaataaaatcccaaactatatatttgctcccaacccacactggctgtacgagcctgcccagttccaaacagagccaaactctgagtcccagttcaggctcaactgggacatcctaatacacgtagaaaaaccatccccatccaagatcatattactatttccctatatacttttctgatagcttcatatattatttcatgtcattgatttacatttaaaccctaatccatttggaatttgtcttagtgtattataagaagtaagaatctaagttttcctctaaatgagttgtcagatatatttagactgcttgttgactaaactgtcttccccaactgatttgaaatcatatccctatttcatttactgaatgcttagacacacac

SEQ ID NO: 45120 - DNA, 1570 bp, Homo sapiens
aggacttgttccaagcctctctccttggctagtagatggccatcttcttcctatgtccactcactttgtcttctctctatgcatgacaccagttatagtggagtaggacccaccctaatgatttcattgtaacttgattatctctgtaaagaccctatctccaaaataaggttgcattctcgggcaataggggatagggggtgaatttcatcttatgaatttgggggtggacacaactcaaccctaacacctaccaccacatgtccattgccacaactgtcttcgactcattgaatgaaataaaaataaggaaacaccagacacgtcttctgaagaaaggacacaggagtctgggaatgggatgggcatgacaggaatggcaactggagaaagacaccccactgaagaatgagaaaggagcgtggtactgacaggagctaaaactactctcattgaatggcctagcagttagttacacatctaggctctggtaagctgctagttctgagttcaaatccccactcagtcacttactaccagtgaggtttttcccttgctcataaaatgtgggtaaaatagtaatacctcacttatgggattgttgtgaagattaaatgagagactagcccaagcatagggcttcacagtgtacccagcacataataactcaatatgtaccaaatgtgctgttattgttatcataataggggtggtctcaccaggtatttcaggaagaagtgatgacaaagaagagggtaattgccatgactgagtccacacaactctgtgttccctctcatagtcacaacgagaaaggaagccgagcaacagccagacctgatcttctttaattgtgctctgtggaccaaaggcaacagaattacctaggccccacccagaaaatgcagaatcctgggtcccttatgaagccaccgaatcaaaattgtggggagcaaccaggaacctgatttttaaacaagttcccctgtgattcttatgcacattaaaatttgaaaacccctggacaaagccacagttcctggaggagcagagatgagtcatgtccatgagtaataccccatgttgacacagccctggtgcaaggtaggcacgcccctcacacctgttctcatcaccaacattccttggacaaggtcaggagacggtcttgagcaatttggtataaaacaaatctctgtaagtcacattttaaatataatatttagagggattgcattggcaaatcaaattgttttcattattgtaaattgtactgtgctcagatacttacccaatcttgacttcaaatttagctcaacatgacctctggccttaggcttgaggattgtaaggccccctggcccagcacgcttgctgtgcttggggctctgttgttagcactctgtttattttgttcttgggcaccgtccactacctggtcagaaaaaccttagccccactgttccccagtgcctgtgttcatgtcttgccccaaagacccaatcccagaggctatgggtcctcaaggttgagattctacctatggcccaagctaaggtcctgccatctc

SEQ ID NO: 45121 - DNA, 1134 bp, Homo sapiens
aagaaatactccagaacttggctagtgaagactaattcctccttcacaggaaggaagtgggggcaggggaaaatgatgctgtaaatactctaaaatatgtattttttcctgtcccatcagctatgccatctgggatggggtgacgcctggatgagatgtcattttaaaggacatttctgggacatgctggcatcaaggcaagttttcaggtggctgccatttccttgtcatttaccttctatggacaggacagagtctccacccaaaccaccaccctcccacaaaagcgggaaggagaagccagaagggagagaaatcagacttttcctgatttgtctaataatagaaagttggcagagcacgtcacagaatagaaagtatttgataaaaacagcatctgttcagcttgggactcgagccggagctgcatggaaatttaatttattccttcctcgagtattcccattagagtatcacaattctgtctttctcattaatgagagaagttgaaaacgttgcttcctgtgaccaaaatggctttctttcccacgggctgatggcagaggaggcgacagcgcagctgagcgagcggccagcagggggcgcggccctgccgtcctcacacccaccccggacacggagacgcggggcgagcggggcgccccttacacagcctgcgaggggagacccaggaggttttccaaacaagaggctttgctgactctaggggcctaagaataaccactgtgtagtatcctgactgccggcggcctcagtaaaagtggtagacagaggcttccctgtcgctcaaggagctcccagggctttctaggcttcccgttctcctcctgtttcccaggacccaccagagtgccccctgcaggtcaggacgggaaccgacacctggcctttgtcaaaacgcattccagcgcccagtgaattactgtcctcacgcctgtcacctctccatctccggctcctcgctgctctggctccttaaagtcctgctctgggcaaagtggccttaacaggaaatcaaagctgagtcaaactaataatagtttggctattgatcaggcagcccctttaaatcacccggtgttttgtttaattgcagaaaaatacacataacat

SEQ ID NO: 45122 - DNA, 1243 bp, Homo sapiens
aaatgttatccaaagaggcatctcctggccagcagccttggcgtcacccagaatttactagaagagcaaattctcaggcctaccccaatcctactgagtcagatctctgggggtgaagcccctatatctacattttcacaagccttccaggtgattctaatacaagccaaacttctgagaagcgccgctccactgcccctgtgtcctagttaccaactcctgctcattccgggctgagcagtaggtggcagtgaatcgcagaacggtatttggacggctgctaaatgctgagaaggggctggcttgcaccagattggttggtgatggagctggtgacaattgctccagtgttcttacactagcccacagttcatgatgccagctttctcatctcaggaaagttcagggaacaaatccaaacatggttcaaagtcattctaaggtctcttcttagtcacatggtgtttccaaggctttgaaattgtttacttctaactcatgttttcaaagttgtatccttcaacagagaattctgtgagtatctgggtttggactattctcctaagacaccttcccaccctataaaatcccaaagtcatgagtacaaatcatttctgccatccttggacaccttttgggcaaagtatttgacccatctcatgctgaatggacccttggcccctcctctgcaatggaccagatccggtgaatggtgaacatcctgtttccctggatcttttgtcaggcagataaaattcaatgtttggcaaactttgttaaggctgagagtgaggtcactgcagttcaggttattttctatctgggccacaagaggacaccctccactcagccatgagcatctatagtctccataaagctccgaagtgggttgagtgatgtgctggattatgaagaggggacagtcacctgctagagagggaggggatgtcactttccttctgtagagtggtgggatgaagtggctttggatcagacctcagccctgaactctagagctgggttgctcgaagtgtggctccccgaccaaccgtatccccgtcaactgggaagttgttagaaaagcacattctggggtcctagcccagacctgctgaatccgaagctctgggggtggagcccagcaatctctggtttaacaagacccctcccctcccaggtgatttccatgtgagctctcgctcgagaactgctattctctcctccagagcatcttcctggttat

SEQ ID NO: 45123 - DNA, 1783 bp, Homo sapiens
gcaggggcacttgccctcgtggggcttaccgtgtagcgaaggatgacaggcagtagactgtcatcttattatgtaaaattgtgctagatgcagagcaggaaaataacaggcggctgaaattctagtaatgatgtgagctccttcggctgaggggaaccgtgggcgggttctgagcaggagtggccgtgagggggacggaccgtagggggcgggaagactgcaggcaagagctggtaattttaagatgcaaataacatttttctgcctgactggaagaggagcgtttggtcgctcgggattctcccggagcagggggctgtattttgagtgtaaaatcggttgccccgcagtgcagggcaggcggtggtgaactgcagccctagtccccaggtttttcatgcttggcacatcgaggctcttcggcccccaggaccagcagactcgccatgcgtggctcggattcgggctggagcaggcgggcaaggtagcgggggcgggtgcacagcaacgctcacccctaggtttcggggtctgcaacgctgggagggcaagaggaggcggagtttgcgctgcggacctaggcgttggcgagggccacgcccccagccgcagaccctgcctccaggcccctttgattggatcaagaccgcggaagggccgggcgtcctcgggcggcctgagggtcgggcaggggagggtgcgctgattggcccggcggggattaagtcatcgctagcaggttcgagcggcccagacaccggcggggcggccgaggctgctgtgagagggcgctcgaggctgccgagagctagctagcgaaggaggcggggaggcggcgtctgcactcgctcgcccgctcgctcgcttcccggcgccgctgcgggtccgcgctgcgtttcctgctcgcgatccgctccgttgcccgcgcccggaacagcagcacctcggccgggtccgagctcggttcgggagtcttgcgcgccggcggacaccgcgcgcggagtgagccagcgccacacctgtggagccggcggccgtcgggggagccggccggggtcccgccgcgtgagtgctctgggcggcgggcggcccgggccccggcggaggcgcgccccccggctgggcgccgcgcgcaccatggggctcccagcgctcgagttcagcgactgctgcctcgatagtccgcacttccgagagacgctcaagtcgcacgaagcagagctggacaagaccaacaaattcatcaaggagctcatcaaggacgggaagtcactcataagcgcgctcaagagtgagtgtcccgagcccctcggggacgcggctccggggcgggaggaactgggaggtggcgcttagcccgggttgcccgcgcgtctgccgggtttctgctcccggtacactgggggacgggtgtcgacgcctccgaggcaggaaggatacgtaaagcgggcgaaccagcaaccatcagatgaagagagagacccgtcgctccgccttttgcgttcagggatggtcgggaggtgacccagcgcgggtggtgctctggggcagcgcgggtgggcgtgggcgtgcgcggcacgcaggtgtcccagcagtggggccagagtgccgagcgcgccgcagccagcgggcagatcccatcgtgtccacagctccagctcccttaggggcagagttgctcagccttgagtgcccaaccgtgagaatggagcgtgccctgccgagggggcgctgcctccccttgggaaaaggtgggttgtgactgcttcgctccctgtacgca

SEQ ID NO: 45124 - DNA, 480 bp, Homo sapiens
tgtgtgtgaaaagggaactgggaatggattctgcaggccatgcttagcaaaacctccctgaggcagcccacggctctggtgtatccagcacactttattgctgcccctctgtctacagacggctctattgattcagccttgggaagtctttgccccctgccctcttcaccctttttgttgatacattcccagaatgttcaagttcacacccatgttgcaaccctggctcctaagcctgaggacaggatgtgagtgcctgccctggtgctcatgggtatcagcgggacagagatttgtgctgagctgcgtgctgctggcttcccccttgcctgtccttgggaactggggactttacccgctgtctttatgcagttcttacaggccatattttaatgctgtgtcatctcttagaaagatgggttgaaaaggataaactggaagcttctattcatttctcttttatttttaagaatgttgtat

SEQ ID NO: 45125 - DNA, 832 bp, Homo sapiens
gtttgcccctgctgcagtgatggtggagagtggttgtatcagcattatttttataggaccagccatactaatgttgaaaagctcaggagacttacttaaaattcctggacagaacctgaaatctacttggagtttggggaatcagagttttagttgtgattcatttgtgaactttgacagctttgttgtcttctctgagctttaggttttggaaatgagatatgagttatagggtgtcagaacaggttctgggcttgtatttaaggttctgctttctctttcttagcatgtcatccagtcctaacaccaggaatgtagtttctgttccagtatttgttaggagttgggacagcttgggtattggcaggcttccttggttctgcctggcctggaagtgtatctttccttccaccgtgccatgtgggaccacaaaggagaatgccatgtaccaattattgtaaaaaaaaaaaaaaagtcactctggtttaaccctctgtgatctgggaccaagccaggctccactgggccttgttctggccagccaagccatgccccggtcaggtggcacagcctctcccccagcctcttacctctgcacacccttgtttcttggtgctgtgcccataggtgtggcattgctggctggggtcagggactgacggcacaggagacagggctgctggagggaggaccttttggtggctgcaccgtctgctgtcactctgacagtaggtctacttggggtctctgtcctgtcctttaatatcatttaaaaaagcaaggtagtgagatggctcagactctggagtttggatcctttatttattagcta

SEQ ID NO: 45126 - DNA, 1342 bp, Homo sapiens
ttggtgttggcagcagttggcaggcttcctaaggtagagtggtttttttttttttttttttttttttttaaacttggcatttcaaggactgccttacagaggtgggaggttcttttgatggcccatagtagagtttggaaattttgtgtgtgtattcccatacctgcaagtgcactcttacatttttctaggtggtagagtccttgacttccattatagtctcagagtcatctgtaaccctgaaaagataccttacagcaaggggaatgttttattgctgggccatggctgggaattatcattcctggaccagcaccatcaacatcgtctgggaatttgttagaaattcagaatcttgggccccatctggtagctgcagaattggaactggcattttaacaagatacccaggtgatttatctacacattaaaatttgagaaacacttggactgagtaacccttcccatttggtgacaatttccagtgccaactctgtgtaggaggaatttttattaagaaaagccatctttccttacagctttgtttagaaagtagggtgcctctggtaagtgtaatagttctcatctttgccccttacgtattggtgctcagctgcttataaattgagtcagatctagataaaggaatttttgtcctacatagattaattgacatgagctgttaggttggccataaagggctgacccagccctttgagggaaataaaaagttagagatgacaaactattaacctgttaaacatactccaatcccccataaagctgttcttctaagagttcattggtgggtttaaggaaatgattgcactggcttctcaacttgtcatgattaccttggaacagtctttactggtctctcttcttcctcttcttgccttttgcctagaattgactcactctccatctttctatcacactaactgtttgatgaatcatcaacagtagggcagtttagtcttaatttgctcagagtgctgcctgatgactcagactcacagttaataaatgcagcatctttagttttgtgattatatgttttctggtgacatacatgctgggctctgttaatctcgaaaggggaaggctatcttcattttggcatgctttgatctggcagctcctccagttaatgctgaactttagctcactgttgaacattaactctctgtgagtgtgttggcaagagatctgcagggttaaatctcggtataattcctaaataggaaacaagtataatgtggtactggagatacatacacaaatacacacacatggtgtttgtgtacatatttatcagataccatatatatatatagctgat

SEQ ID NO: 45127 - DNA, 674 bp, Homo sapiens
cagctgagaatggtgaaaatgtatccttgtaacttgtgaatgtatggctgcttttcccaacatggctcaagggtctcgagtatcctcagggccattgcacgtaatgcttattgcttttatgaataattttggcaaagacgactgttcatgtatgagcaccatgcttcgagctgcattctattaatgagtggcttgaggactcaggaggaacccaaagagaagccagagatgtggcttccaatgccagcagcattgtttatttagctctggtgccaaagaaaaggctgggttctgacgcaacgccatgacaaaggttgaggaggtcgaatccagacaggaaatccttcaactcctaagcggaactctgccccttccagcccggggcctggaagcctgccagcatctcaccagtcctggatactctcaggaacaggcagatcttttccttgaagaaatcattccctagctagagtgccaggtggaattaacctgcatttctgggtcatccttaatggttaatgattaaaaagatgaagggagccttgggaagcaattgactttaggcatctgtatgtgccaaggaattaaaatccataacataatagccagagctggaaaggctccccaaggcccatgacactccttccacctcatggcccctttctgttttccag

SEQ ID NO: 45128 - DNA, 874 bp, Homo sapiens
tgctgtgtgttaagtgcccctttcccagcattggtactctctagaggtgggcagcaaggatagcttcttagagatggcaaggatatttagtgctggagttgtaataagggataaggcaagaataaacttatcttcatggagcttacctttgagtttggaatgctcatatatactcaagcaactaaggtataaacaccaggatgttgagtgttccagcaaacctggagggccagaatactggggggaaagtaacaaacaagaggactttacccttccattcttacaggggacgatggcatgactggaatacgctgaattcattccctccctccttccttccttattttattgagcattactacatgctagagactactggcagtggagatataaagtttacaaatctgtaggactttcttaacagacctcatctgattttctttcataccagttccaaagtccttgttttgcaagctttccatgaataggtaaagggcagtagctctcctctgatctagtcccaacctagcatttcacatccactgtcaactctattcttcttcttcccaggtaacctgcatttgcacagtaataagcttttctttgtattggttggttgggtgtttaattaggtatgttttatatacctctgttcaattctaaatatctgtctcaggtgatttgcttccagaggcagaagaacattttatgcagcttttaatacagtaatatgtgcatatggctgttcaattttattttttatggtgacgtaattttgacatgggttaattattttctttgaggccatggtaaactattgtgtaagagactagaggagcttaatcaagttagttgctatttaaactaaactttt

SEQ ID NO: 45129 - DNA, 3351 bp, Homo sapiens
gaaatcaaggtgttggttagctgtgctttcacctggacttggggcccttttccaaacacatgcctgtgattggcagattgggtttcttgtggttgtaggacttgagtccacagatccttgctggctgtcagccaggaccccctcccagcctctggaggcagcgccatgttcctcctcttgaggctcctccatgttcaagccaaggccagcatgttgaatccaccctatgcttcacatcactctgacttcttttgctaccagccagagaaaacttcctgcttttaaagagctcatgtgattcaattaagcccatctggatatctctgtattttaaggtctactgacttgggactttaattgtatctgcaaaaccccttcacagtagtacctagattagtgtttgattgaataaccacaggagggaaacctcaggggagctatttttagaattctgccagccacatctgacaagtctggtggccaaactttggacaaaccctaccatgtgtgacactgttgtgaacctggaaataaaggtgggaaaaggcaactatatgggattggtctgtttttgtattccaagggcccagtaatagaaatggcctctaggcagcaatgactatcacaaaccccatgtgcttggttgaatagaaaagacagagtcatggcctcatggccatagctgaagctgtctcatccaagtaagacagctaggacaacctgatacagcaagaagtgtttgctggtagcagcagcagaagaaagtatactataaaagcacagtgatctgggtttacatacttctgtccttcccctgatgacagagcaccaaatagtaatcatgagcctaaattgacaaaagaagttaagttctatgtactcagtctaagagcagaaaatctataagcagttctctctcatcgatggattcactttccatagttacctattaaattagctgcagttcactgcagtcccaaaatattaaatgaaaaattccagaaataaacaattcataagtttttaattgcacatcattctgagtagcatgatgaaatcgcccagagcgtgaatcatccctttgtccagtgctgtctatccattagtcacctagtagccatctaggttatcagatcaaacagcagatacagggtttagtactatctgaggtttcaggcatctactggcgtcttgggaggtgtctcttgttatgaggggagactactgtaatgtgaaagaaactcccattgaaaaatggtttaaagtttagtacctaaaaaggctaagcttaatttattgagaaaagtagttcactttagtggaaccccagtggcttctcattaccttgaataaatcccagacctctggtgtgatcagaaaggcagccccactggccatttttctatgcccagcatgccaagctatttcccaccttgggacttttgctcatgctgttctgctggtcttcagtgttcttcagtttttcacttgcctctttccatagctcactctttcttcttcagatctcaacttataggtcaccttctcagagagggctttcctgattacctgattttataaaattaccacttgcctcttccccacctctagaagcttctatcaaatcacctgcttatcttctgtacagcctactatgttttcttgtttataatttttctttcctttagagtggcattccttgaattagaccttatctaacccacctttgtctcttccatgtctagatcagagccaggcacacagtagaaagccattgtttgttggagatttaaaaaatggatccacgctgggcacggtggctcatgcctgtaatctcagcactttgggaggctgaggtgggaggattgcttgagcccaggagttccagactagcctgggcaacgtggtgaaaccccatctctacaaaaaatacaaaaaactagccgggcatggtggtgtgcacctgcagttccagctacgtgggaagctgaggtgggaggattgatcgaggttgggaggtggagggtgcattgagttgtgatggggccactgcactctagcctgagtgacaaaacaagaccctgtctcaaaaaaacaaaaggggggtccagagagtttaaatgtcccattgtcactaaggaaaatcatggcataatagggagtagcactcagtttaagggaaatatcagcctgtcacctgacctatgggtattactggctatgaatttggcaactgggataagaatggcttaatgactagcccttgtgcagttaatcatagtaagagataaagtctatcctcctgtgcccttgatgttttcagccattctcccacaaggaaatatgttgaaaatattcaacttttagaattcttgtctttgttaaataaaattaaataaatgatcatcttttaatgtcccatttgaagtgttttttagttcttctcactcttcatatttttcctgcttgcaaattctcttttaaatttgttattttcattttcagcatctgttagacaaaaatgacgacagatccatttcctggtagaaattacacatcttttgaatggtgttcctaaccctcagcattcccaggtttgtttaaaatatcactgaccctttgagatactgctgtgtttggtactgagactgagttaatgagaaacttcaaaagcaaagcaggagaaatgcgagtggcgaaaaaatggacgatggaattttttccaaaataaaactctacgcctgtcttctacagattataccagacatttcatgccctactgaaatgtaaatgaggcttatttaatttgggcaactccatgtgaattttaccttgacaaatttgaaattgtgctttcaggtttttgtttgttttgccttttttgcatcctttaacctcagttcaactctcagccaggagctgtcttgagtaagcagcaattcactatgtactctttgggtggggctgcttttggtttttaacaaatatgaaagaataggggaaaataacaagaactgaaagagtaggaaaagccaacaccctttatgccccatttctagatcatttcattgttgaataataatatgataacggatacagggcatctttatagtcttaatcttttcccaggttataggctgccaaccagaaatccacaagaattttccttgtttgactaacaggcctgaatggtgaaaggtttttttttggttgtttacttgtttgtttgttttaaatgtctggttgataagctatctatgtacaaagctttgcttctacttgagtgtgaggtaagtaacctgaacccccaaacagatgagccatgtgaactgtgggtagaacagagggtgg

SEQ ID NO: 45130 - DNA, 1106 bp, Homo sapiens
atactttctactttaaaggattaattgcgtcttccttcctgtctccctcttcacttctccagaacgctcagcccaaaaccaaactggagttgcctttgtccctaagtggtgtcgtggtaccaccacacccaaagcctggctcagaatgaattcagcacccattccttgctttttaaacctcaaaagttcccgactcagtgaaaggcttccattttgctatcctcttctctgtctgcattttactctgtaatttattgacatagaagaggcctcgtgcaggctttcattgcattagtccacttggaagtcttttctccaatccatttgacctcaagctgcttttttgctgctgctgcatgtaagctagactgatccagctcaccttatgctgcttttgaaggctgaaaagccctgtgaccaaatgtttagcaggctgttcagacagtggactgatggtttgatctaagtccgtttcctgccttacacacacctccccatcccccaaggcaaaggtggaaaacccagcaagttacataagttgttggagcagtccagatggctggctgctagcccaggcaaactcgctttggagcacttggggatgcctgcactggcaatgaaacatgggctcattttttaatgagaacaatcattttgttcagctgtatgaatcccagtagtggagtgagatcagggctgtgatcccctaaacatggctgctggcttccctctggggcaggacagggggtgtcttgtagtgggagggtgtcttgtcctactgtttggactttactaaacaggaaggagcgggcagggctgcagaacaggaattataccattgtacagcctggcagtcctgtggaattggctgaatagcggaaggaaggaatctgaaaaggaagggaaggatctcaccacccagtgtgagccaattccagcctcgctattttatctgcccagtgactgatcttagccttttgttgtatacctttcttcttgagaggttttgaaatggtatgcattccttagctttgaggcaccatgtggctgcagttagtcagactagctccaaatcacaagcttggattgttgaacctgttttttct

SEQ ID NO: 45131 - DNA, 822 bp, Homo sapiens
aattcatgtgatagtaggttcaggaggaaataacattcattctgctttccccacatgatgccttttgtacattggattgctcctctagtttagatctgttttactaagcagcagtggtcaagggacatggtggagagaagtgtactgagttctaaagaagagtgtaaatgacgtctctgtggcatattcagatgccatcaggaagcttttgtaagtgaggggagcatcaggagggaggtgtggaaatcagcagcactttctgaaaatggtgtagcttgggaggctgtattcaacttagcttggattttaaatgaattaaaatggatgtgctcaagttatgagccttgcctcatcagtgctataaaaagccctttagccgggctgtaatttgactctcctctctaatgttacgcaatattcctatggttacagagcccgaataagtggaagctaatcattagtttgctaaatgtggttcatgcaacagttcacaactcccagacttgccaactgctgcttgttcagtttcatgttcactcttcttgggtagaagttggtttcttctttagaaaaatgtacagtaacatttgtctcacatccaggaaccatgcaggatggcagctctccacgtgtcttaggatggggagggaaagaggtcatgcaaagcagaggtttttgatacatactcttctgcaggaaaaagccattcagggagtgcaagatggcaaagacacaaattaaagtggcagacattttggatactgggaaaatcacattttgtgaacttttcagaaatttgctgtgatagaactctatggaatt

SEQ ID NO: 45132 - DNA, 518 bp, Homo sapiens
gttgtttgtcttgtttcccacccttacttaatgattacttagctctttatataatccagctaaatgctggtacatagcaacaggattgtggtgtggctttctccttgatgtaaatttctggaagatggccttctgtatggaagactgagcagtgggatctattagtgacatgtttttgggaggagctgcttcctaaatgggttgaggctgcagagatgggcaggaggagcagccagaagccacagggtgttcgcatcattgtgcgggtaaccacatggtggcaacgattgcacagcttccagttgtacttagcagctgttgacacagacttcagaattcccatggaaaaggaagtgaactcctttggaatacaatgcattgggcttttttttttttttttttttttttgaggtgatgtctcaatctgtcacccaggctagagtgcagtggtgcaacgtcagctcatggcaacctccgcctcccgggttcaggcgattctcctgcctcagcctcccgag

SEQ ID NO: 45133 - DNA, 938 bp, Homo sapiens
ttagagctctaggatgtttttcaccttttaccgtatgaattgacctccagaactttcccatggggtctcagctcttgtacatgaagagcataaacttttctggacaccatacattactgttttttttctgtcttctaatcaaatatccaaacataatctaaaagtaccgtgacaggacatataggtttgtcaattccagtcactttggtagactggcccttgaaataaagctaacgttttcaacttcagcctcccagtgttttttcagacttatggcagggaatgtaattttctgtttgctttttggggtgaaagtacattccatttcaaaaatatgccagtcacatgagttatttccctcatttaaaaaatccccacaaaaggagataggttacctagggtgggtatttcatgagtgtatgcttctttatcagtctgtccatctctctgtaacatttcccatgaacccttctgtggatttggaatcttagtccttccagaaaggattatggtcatgtccatagaagctgcaatgagatttacatctcttgggaagtgacaagctctcagcgcaagctctcagcgctgggtcccagagccactgttcctgttggagctaagccacatggctaagggccagtcccttaacctttgatttagctccttttgtccctgtcctttcatctgtaaaatggtgctagtaatgtggatctggtttcagaagactgctgtttattttaactaattaaagattgttacaatggtgaaattcaatggactctacaaatattaatattggtgctgatcatgggtggctattagctgggtagcaggtaactcgcacctagaagctcttacctgctctacgccccagttcaggtttggctaagattctgttcttccaccaggcttcccagtagaggtctccagcacaatga

SEQ ID NO: 45134 - DNA, 789 bp, Homo sapiens
atcttacaactgactaaggaaatatccttccctttggagcctgcagattccaaaagagaggcccatatgtgagggaaatgcagattccccccggcccctgagacagcctgtctgaggcttgagtgcaaaaacatcagcagcctaggacacattgtacagtgtcggtgggggtgggggtgggggcaggagtggattcttgggccttgttttacatggatcatgttaactagctgctgagattatagctctgaataatttttttagttccgttaattcatcctagaccctctcccagacaggcccagtgagaggttgagaattcagcttatatatttctcatgtgtgtcttccttgttgaaaaatgactgggaattcatactattcaaaggcttacgtaatgcctttctctgagcagtcaaagctgtagcatgtgccctttctcaggttgcctttgcagatcccgggtgccctgggcacacctgtttgctttggcagatgacatgtttattcacatggattcctgttgtcacacgggctgcagaaggtgtgtaatgtgtttcttgggttaactatgtgtaattactacacgtgactgaaaaccacgttgataatgtggctattaaaaaatgatgctgtggaaagctggtggcaggaaaaaagttccagctagacccattaaatgaaaacaagccattctaggcgcatacttttggcactatcaccaagtgaacaaagcagataccattaagtatgatgtgagtctgcttcgttaaaaaagtacatgtctgt

SEQ ID NO: 45135 - DNA, 1190 bp, Homo sapiens
tctctagacctgttggacaccctcagatcagggtgactgagggagtgtgggcaggaagcccagaccaggaatccaggagaggctgcttagggctttggggtccaggcagagcaggaactataaggaggtggagccacttggaggaaggcgaggaccagaatggagtggagtggctcttttggctccacatgaccaccatttagctacttggtgtgttggcctctctacatccagttgctgcttctcagtgctcccctctggcttattctttcccaccattctgtgcctgggctttactctccctcacagcttctgcttccttttagctttggattgccatgacccctgacagccccagtgctttcatagcctcattctccttagaatttcacctgctgctttgctaaattctctgccatccagccctgagggaaagcatctatggactggagaccttgaggcaggggattctacagtttaatcatctgtagccacagtgaactgggttaccaacctttcagcaggaactgaaggtagagcacgttcgaagactgccaagtccaggacataccttttgcagacaattacaacaaacttggctccttggctttctgccatccagtattttgggagtaacagtcataccacaaaaggtggttacattcacagaatagaaagttaataattgctgatgaggcaaagtccagaagaactttttctgaagtcataaaagctgtaataatacaaaggtctggataaagaactagctacccttcaaatccagcagcagcttctttggtcacaactgtataacagcacaagacagtattgatttttataattttctcacctcaagtaaattgcatttgatatattctgtctttgaaggtagaaaaatgtgtgccgtgttttagaaaggtttcctttggttcacctggcacggtggcccatgcttgtaatgtcagcatgttcggaggccaaggtgggtggatcacttgaggtcaagagtttgagaccagcctggccagcattgttgaaacctcatctctactttaaaaaaaaaaaaaaaaaaaaaaaaattagctgggcctgatggcatgcgcctgtaatcccagctactcgggaggctgagacatgagaatcacttgaacccgggggggaagaggttacagtgagctgagatcacacca

SEQ ID NO: 45136 - DNA, 1478 bp, Homo sapiens
tggctctgatgcttcctaaatatttgttaagtgaatccgttttagtttaaaaaaacaataaaacttggtttgttgataagctatgaactcctttacccaaaccctgtcattaacatggaagatgcacaagatcatttattgtctactctagctaattggcctaggagataattcacataacaattgatttttatatactcatagccctgaaatttcctggctataaagacaaatcccttgctctatgtgtgtggtggcctggccatgccagttctcttaagtaaacagtcactctgtcgttatccacccaattctcaaaatcaagccccatgtaaatagtcatctccataaatcctgtcaagaaaattaatttttagggtacagtcattggttttattgtagtcctcctaatcctgtgtgacatagatcctttggaaagttggtgctaccagttgggaagtgccccagcaggccccgtggttgtctggctttgttgactgtctgaatgcaacacgttgacaatgggttagctgctttggttttagggttattctccttatgcctcatgcaaatgaaaagtggcaaaaaaaaaaaaaaaaaagaaaaaaaaacctcatttcctttcctagataaggcctgtaggggaatttcggctgttcttggtggcagtataatctcacaaaagatgtataaacacagtgctttgccaaatatttacagagctgaggggcaagaggtgggttggcatagggccagattaaaatgtcctggaaggttttctgtgattcctcagaatgccaaattcatatacatggtctcctcacctgtgaaatggggctaatggtaggacctgcctgctgatcttatcgtggggattgaggagataatgagagccgtgtgctccgtgacctgcctggtaataagccttcagtaaatgttaactcttagtactattagctcatctcagctactattctggaagaacacaaagctcacagctttggtgctaacccaccgggagttggccttatcctgaacagttgcaaaactcacccacagtccatcctgtgccggggagcagcttgcaggcaactcatttcttgagctcttccctgcccacacgtactgtgagttgccaagaaagcagcagctgcattcaccagtggaaattcccccggggcctcctcggacgccacccctacctctggttatgggcgaaggcgtaccaggggaatggcttcctccaccaactccttagtgtctgatgtaggtctctgactaccagtgtgagtcctgtggctcctcagcagtgtctctgcgcctgtctctgtcgtgctcctaagcaggcagagatgctggtggagaatatagtagaagggacttggggaaggactccattttcttaagtttcagtagaagtttggataacctgtagtttttaaagattgatgctcctgccttctttcctctcctcatgg

SEQ ID NO: 45137 - DNA, 1497 bp, Homo sapiens
gccttatccctctgacttcatccttgttttgaaagtcctacactaagctacaaatccactactttcttttcctctgggagcagccatacctttcaactagggggtctcacatctccaggttgtggatatctgtctctttatccatcagcctgtctccttccccacacaaccctcttgtcaaaatgccctttggaaaattaaacattgcttccacgtggaaacagaacacaggaagggaattgtattcattcgtacatcactgaaaagaccaggaaagcaaagagtccagggtaacctctgaacactgaaaaaatgttcatctaatttttttctaatgatcatgctcaatgttggtggggtaatggtgagaaggaattgtcagtgttggtggaaatgcacagcagtagaacctttctggaaagctatttggcacggtatatcaacacctttaaaagaaactcctagcctttgacccactaattttactttcaggaatttatgctaaggaaacaattgagacactggcagggattctctacaaagatgtgagttgcaatgctatttataatagctaaagggggataggagtctgaatatacacaataagaaaatggttacagaaatcagagtataccatacaatagaacagcctgtagccattttaaaaatatgttatcaaaggctatataattgcattggaaaatgccttattaagggaaaaaaaggagggtattaactacatgtgtagtataattctccaaaaaaaagcgaggagaaatatgccaaagtgttaacagtgattatcagtggcataaattatgtatggttgtatttcttttcttcttggtttttggtattttccaattttctacaaggccgtcagtaattttcattattagaattttgaaagattaactttcttcttcgtggtcagcttactcctccagttacagaacctctcatcttatagcagctctactactgtggtgtggagatcagagagggtctgccacatcccttgtcagactgggagcctgcctgggcagccctgccacagtatggcaggcatgccctggctggtccagcagatgttccatcattcaagtgagtcaccacagaagggtgtcaagctgatgatattgctacacactgtacttgaactatcagccacaacccattatgctgccaagccttttagccttatcttcctaaaccgttattctttcactgtccagtgaatttcagagactgactgggactgtctgactccttttgaggacactgtgggccagcaaactaaagtggatgtaagcctaccagttgaatccaaaccagaccagcaaatgttccttgcatgctacagtgtatgctgtgttgttgctgtcattgggcctagatgtgggggcctggcaggaccccaggaatatttaggggcactgggcattcagcttaatacacccatctggactctgagggttgtaggaatgcctttagcag

SEQ ID NO: 45138 - DNA, 610 bp, Homo sapiens
catggtagtatttacaaaggaagtggggcttcagctaagcctttacatggaaacagaagacagcagaaagaaagggggcactggtgctgcctccctcctctattagtaaatgacaatttgcattttatctcagaggcatttgggcacagaaaagttatagctcctaacttcctgtgagctagtgaaaatacaggttcctgtgtcccattcccagagattctgctttaattgatttgccatggggcccaggaatgtgcagtttgaataagcatcctgagggttccgaagcacatggtctggcacatgctttcgtataaatcctggcttgaagcctcagtgagtcagcagtccaacccaaaggctgtgttatctcctgccatctcctgtgacctaccttttggcctccagtttggagggcctctcttgtcccctctaattcttcccttagccctcaaattgcattgtaaatgttttcaccccagtacctgtgctgtgggtgaacagctagccaggaaaaggagaaaggtctgaaggagatggactcagtgcatccagtagagtaataactcaacttggagcttggctataaagcgggagggcctggtttttg

SEQ ID NO: 45139 - DNA, 2335 bp, Homo sapiens
ttggaaaagaaaatatttgcatgtttaattcataatttaggctatctttgagtatactgtaaagtgctgtgtgatataatatcaataaagtacttattaaatggcactttaatgttttcttttaaaataacgcactgttctaaacttcagtattgactattgactcgtgcatagaatccaatgctgtaattagaaagtaatctgtgactagaatagacctttgtccctgttagtagccctgttgccatgttcaggcttttaaaaaatgcttttgtgtcaccaaatatatctataaagaaaacaaaatttctgttcagaggcctctgaaacttggctttcttacatgtggttggtttatgtgacaatccctatgaaatgagtggacgtatgatttttgaattaaatgacttttccatttggtggtattttcttgagtttctgatagagtttgactcaatacatgctttaatatgtcttcaaataagcatatatacatgatgatcaaaggtcacaagtctcggctcctgcggtttttggtgacaaccaccgtgcttatttctgatgagctctgagaagctttgctttccatttaggaagaggtcagatgctaggaaacttgagaatttgctcctcaggcatattaaacaattgagcccgaagagtcatagtccacttcacatttctaacgttcttctcttagaatacatattgttttattcttcctaaatttgactttctaatcacctattttctgaaacctcatgaacacaaggatggaatcatcagagccagaacacaggcaatgcccccagcacagctggtttgtaagtctgttgtttagagcttgttgcatgctgtcccaggccaagccagatcactgagtcttcgcattcatcatgtcccttccagatacattctgagtggcagcctgggacccaggcttccagtgagctcccagcttctgccacaagcacagaggactccctgatgggctcagtggaggcggcatggggaagccagcgctctggggactgaggatgaggcttctggcttcagatgcttgccctgggaggggaggaagggatgtgaagctcccttggtcctggttctaaggggaggggggctatttaaatgcgtgggtcacatgtgagctgtctgcttgtcctcatttgccacttcgggcactcgtttacccctgtgaacagcacaggctggcagcagctgctgccctcactgagttgacagcctcctctggaaaactcccccagcacccaaagcgtcccacatgtgtgggtcatcctgtaactaggcgaggctttctgagtatggtgtacatctatgtctgatccttcatggagagaatgaaatacgtggtgtgtattttatctttgtccttggcctttccaatagatttcccaatcacttcaactttcatgccttcctagcagaaggttttaattttgttttgcttttaacagccactcagagcagagcgcaaactgtcacgtcctgtggttttgcttggtgtttttcactcagttctgactgcatgattagtcctaagagcacctgggttagaagtggatttgattgacagttgaaattaggtaaatgttagagagtgagtgtgatgagagattttctcagaccccaaacacgcttgctcatgagaattaagtcatggctctaatttcttattttctcagttctttcccaacctccactcagataccacacttctctcctacctgaatgtgtcagtgtcattggcttgccctgcttttaatagcaccaagctaagctgccactaattaactatgcggggttagtcagtgttggctgactgcagcctgcacagcagccaagggaggctctaacctccatggtaactgctcggggtgggtgaggtttgtcacatggaggagctttgcataaccatccgcagggaaggggcatgcccatgccgggatgcatccttcagaaagccaccctgcggtacccagtcaacatcagacagtgaggaccaaagccagaaggttttaagttgaaatgatcaacacggagaccctctgtatcccacagcacttagcaactcctgtcgcactgtaaatctgtcacgtctcttacgtcattggctccatgaagcctgctgcaacttcctattagctgaaagccaggtagctttgatgccttccccaggccaaccagcaaattagtaaaaacgtgagtccatgggttctttctttaggtgccaaatcacatcttaccctccaggtcttgtgcccaccgtaaacttgaaatatttgttctgacactgtggctggatgtccttttg

SEQ ID NO: 45140 - DNA, 1597 bp, Homo sapiens
gaattattaactgtttttctaccttttctgaatcttcgtgacaaagaaaaggagtagtcatgcttgcctcacctgtgatgagcaagttgaaattatggccgtagaggatggccatctttctgttacaccttttctcctatcacaccatttttctccctcatgtactttctacctataattaattcatgatttgtcatcaaatgtttgaggcccatcttgctcttaataaacagctcagttaggacagagaccaggtcttgttcatctctgcccagtacccagcccagggctggcatgcagcaggtgctcatagcccctgggtgggctgaccaaggggaaaaaaagtggggaaagcactgcactagaaggcagttcctcctccctgttttactctacagttatagttggaagaaagaaattgcatgttattacacttgggtacttgaacacagggtaactttgtgacccttggcaaaacgcaccatttgctcacatactgggattggagcttgtgggaggaagacctcccaccctccactcaggcacacacagccacattctttcccagcctccttggctggtgctgggcacaagaaaccatctggagaagcagctgaccaagagcccgagaccctgtgctgtcatctgggttacttaggggttgtttcatgaaccttatgtgaaaagggcctgccttcaagcaaaaccacatcagaatcacccccaaacataaaagaagtattcctttgtaaagtcccttcacggaaattccacactgtcccacaggagtttggtctgatatctaacactctcactgagggaattctttgggtctgactgaagtttcccatgtggcagcttaagtccatttccgttctgtttttccttacagtggggagtaactggccatggcccattgagagcaatcaccctcgattttttatgtttccattcagccatcagttattgaccacctcttccatgccggagctgctacaaccaggaagtgtaagacatgatctctgtcttcagggaactcaaaattggcttctgccatagggaaatatacaaggaacagcgtttgccatgtggtatgaccatactagcagtgtgtggcaggtagtgcagtgcgatgaggaagaggcatccttcctactgggaaataggaaccagagaaagtttcacggaagaggtggcattcaagatggaccttgaaagatagagaagagtttcccacttaggcaaatggagacatgtcccaagcagaaggacagcaaggatcaagaatgaaggggggagagagagaaatggggaaggtgggagtggggagaaagagcagagagagagaggtggctgggtggttaggtatgatttcaatgtgactgaaacatgaggagtcagggctttctggagaattgaaaactctagtcacccttacccaccccgcctgttagcctttaggctctgttttctctcaatgactgacaatattagctaacatttaactaggtacctaacgctgtactatattaatcactgaatccccaagacatttgaatgaagttctataatcatctataattatagatgagaaaac

SEQ ID NO: 45141 - DNA, 3062 bp, Homo sapiens
agcagtgagcccttcagaaagcacaatctctggcacacactcagctttggttttccagtggcaggaataagagcaggaaatgtttggattaaaaattttctttccttctaggagccctctgcttactcatcttgggtgaatagttccccatttcttgagctctgtgcagatactcctcattccctgggcagccccggggactccagctgcaagtgttggccagtcacttcatctttggggatgtggcatggaggcagcccccacagagggcccagccgtgctttgctggctggaaatatgtaatgtgaaatttttaaaaaatttaacaatgtgaggccggacacggtggctcacgactgtaatcccagcactttgggaggctgaggcgggcggatcacgaggtcaggagatggagaccatcctgactaacatggtgaaaccccgtctctactaaaaatacaaagaattagccgggcgtggtggcaggtgcctatagtcccagctacttgggaggctgaggccggagaatggtgtgaacccaggaggcagagcttgcagtgagccgagattgcgccactgcgctccagcctgggcaacagacccagactccatctcaaaaaaaaaaaaaaaaaaaaaaaaaacttaacgatgtgaaaatggctcctttctccaccccgatccagctgccgacaacagaccttcaggctctatgggattgccagggaaatcccatgagcgtgtgtcttcttctgggagaaccagtgtgtttctaacccgatcttctaatgcttaaaaatagatcattttcatggcatttgaaccccctcttgagcctaatgagatttaaagaagtcagagctagcagagagagcacgaagactcaaagcagatgatgggtgagtatctgtagggcacaggaatagtgggagtcaactaaggtgggcttactgagcaagactctcactcaagtctcctacactccctgaagggggctaaactgttgcatgttaagaggccagtgatgaagtctgtctcattgatggagcacttccatgttatgggcattgtactaattgctctacattagtctcatttaattctcaaatcagctcatgaaataggtgctgttgttaccctattttgtagatgaagaagccaaacattagattgggcaacttgttcaaagtcacagagttaataaataacagagcagagaatcaaccccagtgggctgacactagagcttaacgcttaactcccatactcttgacgctcttaattcccgtactattctcactctgggaacgatctcagaagctccactccccaaacgtccttcacttctttcaccccaagggaatatcttttgttttgtctgcttggcatccagtacccatctttctggtaacagcacctctgttttcctttggggagccaccctgcctctcccctcaccttgggttccatgggtttgggtgagctggcatcaacccgtgatccaaccgtgaacctgtgaccctgctctggcctatgagatcatcacatctacccagccaaagtgattgattgattcaggaatgggcacagggcctagttaagtccccagtgccagggctttgtcctggggaatggtatacaggacacagcagaggaattcatcctatcgggaaagaatagtaagtgctctttcccccagcctcgatgtctcctcagcatgaacactgtctgccacttgtcttcgtttagaggcccagtataaaggctcctatactttatgttgactatttactgagattttaatagggtacctctcagaaaagttgtttcagatagcaagcagaagatgtgaaatattcattacaatataaaatggacaaacagtgtcccactttgatcaatcctggaatgatttcactaaaagaaaaatctaggccaggtgctgtggctcatgcctgtaatcccaacactttgggaggctgaggtgggagtactgcttgagcttaagtgtttgagaccagcctgggcaagatggtgagacctccatctctgcaaaaaaatgtaaaaattagccgagcacagtggcacatgcctgtagtcccagcttcttgagaagctgaggcaggagtatcccttgagcccaggaagtcgaggatacagtgagccgtgatcatgtcattgcactccagctaagctacaaagtgagacagtctaaaaaaaaattaagaaaaacagaaagaaaagactttatgccttcctccactctggaagcaaagcttatttttaaaatactgactctcgttctccattctgggccaggaaaagccatgactggatctcataagaatagggaggaattgtgtcatacagaggcctctgcaaatactttcccaaccacagttgattcaagtcgtcacttgatgatttggcccatcccaggggtgcatcagtgttgagacatttcaccctggagttcttacaaaggacccctcagtcagttgtaataaagaatggcaataaatcatgcccagatcatgacatggaattggatggcataaagtgctcctcagttcagaaagatgttcacacaccttggaggccgcacccaaacctgttcaaccatcccacaagcatgagtctgagacactctgggggcacccagttcagaccttcaccttcactgaggtgggacagcttcgttggaggccctgaaaggggttaggtatgtctaatctcagataccctgctgctgctcttcctccatgccgtgctcacatttttcttgtttcaaggactgccagataaagggattccaaatcttttttcttttcctttttttctttcttttttttttttttttgatacaaagtctcgcgctgttgctcaggctggaatctcggctcactgcaacctccgcctcccaggtcccagttcaagcaattctcccacctcagcctcctaaggagctggaattacaggcacgcaccaccacacccgactaatttttgtatttttagtagagatgggatttcaccatgttggttaggctggtctcgaactcctga

SEQ ID NO: 45142 - DNA, 1679 bp, Homo sapiens
ggactgtgaacaatctcaagccctctgccacattgctcctctcaaatgccaggggaaaaaggttgaaaatcttgagaggcagggacggtgattttctttccttggaggcctaagctgaccatgtggcactggccccattcatccgctgtgcggcagagtaagttctgcttctctgccccatccctgtggtagccccagctgaagctgatgaatcttatacttagagtccctggtgtgctggaactggctcatctcaggtcaccagagccagcttgaaactggctatggtgggagttatttataccaccaaaatcagcaagtgctacaaatcagccctccaccaccacccccacccccacccccgcccccgccccagcccgtttttaaacacctcctagcacaccactgcttagtctacttgggtgttaatatgatagatgacacctgaacttggctccatacagcctagactggtttccacctaagtgagggtgggcatgtgggaacgggggtggggtgggtgtagaactagagaggtgcagagtcacctttcccaagagcaggcagtactctgccctgtgaatcaacagctgggttttgtttatttgcactggttttcaccagatctagaaaaaggagtttgttccccacctccctcaaacaagcttcttaaaacttgcttagagctgccaagacctctgtacaagtcctgtgcatcagagtacttaggcagtgatgccttccctctgctgctccatttgctgcaggagggaggtgggagctccgtgagacggaagccaccacaagttcattctccaaggtcagtggaactgtcactaaccattccaggtctggttgcctcacttggggaaccacagaattactctttccattggtaactgctgagggcaagaggcccagaggttggcattgccagtatacagccagctgtgagaccccaggaaccaggcttggtcagaggccccaccacctccgagctcacttagtgactgacttttagcgtcctctgggaagcttactgaaaccaaagatcctgacttggtgtacatgggatgaggccccaaattctgcagtgtgtgtgtgtgtgtgtgtgatgagatctcactatgttgtctgtgctggccttgaccatattctgtgtttttgatgacacttgggatgattatgaggctggtgaccctcaaaactcattttagggtcaaatccagacatgactgatgctttaatagacacatttctttttttattaaatattaagcttttctgggttctgtgtatgctgttgttagcaactttccttgtgccacagatgtatgaataagaagcttcttcactgtgtcttgattaacataagcataatatggaaaaatccatatttaggtagatcataaattggtagctatatgatgaaagacctcaccaaacttttcctttaaatactggaatgaactcacttactttaaaagattagattttcagtaacccaattgccagaaactatttcaagcacgcagggattctgacaggatctaaatcgacacaccttcctaactttagtgctgattagagtcagggaggcttttggccaaagcagaaatcactacaaatacaggctgtcagtgacaaagccacggtttctccttcacctcctctgtcct

SEQ ID NO: 45143 - DNA, 1085 bp, Homo sapiens
cctgagatttctgtgcttctgcaggaatttatcctgcttgagaagctcacctggaaaacgtgcggctgaagatggaaattcaacgttaggccccagagctgtggaaggtgttttcagtttggccttcttgccaggcacacttgagcctgcacaaattctgttccccacgcagagacagggaaagaaagctgccttgctgttaggactgtaagactacacccaggatctcagaacagcacttcccccaccaatctgtccacggtggccttagccaaacccgaggaatgaaggcttaacgggaatgtgtcataagaaaaatattccattagagttttctctcccagattccacgcccacatttctgcctgcctgttggacatctccagttagatgacccacaggcacgtccttaccaaaacaacatgcccaaaacgacacttcactctctcttcctgtcttgggtagtgtcacaagccaactgaaaagcctggaaatcctcctcccacatctcacccctcctgttaggaggtcctttccattgcaaataccaaatggctcagattcgattcttcctcttcgtgccgcacatattgacgttcagggcttcaagatctctcgcctggactatttcagcagcctcctaacagtctctcttctcccagctcccgcctctggctcctctgcatgttaagagcaaagtcgccccaaagcaggaaatgggattactctcctatcgtgatgaagcctgtgttgcctctcccagtgactcagggatggagtgtggactcttgagttgccatgtaagggcccagcccatttccccagcttcatctcgccatgaacacccctccctccagaatcccaagctgctcacgggttccctaactcctccttaggcatttgctggtgagcctttgaacaaaatcttccctcggtctggaccttctcttctcccccttttttaacctggaagattcctacttacccttcaaattcagctgaaaagtcaccttctcaggaaaggaagtctccctatgccctcttctttcctcccagagcaagttttcagtgccttttgcatcata

SEQ ID NO: 45144 - DNA, 1732 bp, Homo sapiens
tcacaagatctgatggttttataaatgggagttcccccacacatgctctcttgcctgaagccatgtaagatgtgcctttgctccttcttcaccttctgccatcattgtgaggcctccccagccatgtgaaactataagtgcattaaacctctttttccttataaattacccagtctctggtatgtctgtattagcagtgtgagaacggactaatacaagccctgtacactagaagcactgccctttgctgtagcttcataattctgcctaagtactagaaggttgatgctatgaaaggtggcattcaaggctccaaattcacctttatctcaaacttctttcaatagaacttgtctcctttctttacctgccttcttatcccctttctcagcaaatctctgaaaggatgtctctcagccataaaaaaaaacattgtattgtgtatttgctggctacagaaatttactttcctgtggaatcagagagagaactgatcttgttaaaaggctctagctataatcccttagagagaggatccactgagtagaaaactgtcaacagtataaaacgctgacactttaggtgtctatttccacacccagccatgtttacgtatgatatttagaaccaggattcaactgaccctggcactcaacaaccttcgttctaatttcttccacgttgagttttgttccaagtttctgaccgtttctactctggaaggtggccagggtcctggggtggccacggtcatgccaagtctcagtgccccctccgcttcaggggcttagaccgccacttggaatgcgtgcattctggcaggtgcggtgcatgcaggggtcagacccctatggtttgatgagataagagcctcctgcacagaatctcattttttctccatctgcaccgccatttgggcctcgggcctcatgactcacacagtggctatccatctgcccatttactccagaaagagaaaaggacttctttgcacacagtgagtcatcgtatcacatttcagagccacctgcctgactcatagactatagcagagctctgtaataacggggctccctattgcatgaagatgaatattacttgcatatgaccctttacacccccaaaccaacttgatattcccaccctgagccaataatgggataggtcagggttggcagatttttgtcctcctgttcttgagtcccctccctgcaccttgaagacatgctaattgatggatgagctttcctgtgctgaggccagcagaggcctcagcatcagagttaagacaacactcccagcggcagcccttcacaattggtcagacttggttccagaggttaaaccatattgatatgctaaggttagattgggaagacaggactgttttcagggtgggcactgtggtctccagaaggctacccttcttttcttatatagttaattatttgaatcaggaatacagagggaggtaacatacacacagggtacgaaactcaaaaggtatgcaagagtatgtagtgaaaattctctttcccatctcagttcctcagttctcctcctaaaagtaaccaatatcatcaggctttttaaaattttttttatttttattttttttaattgagacagagtctcactctgttgctgaggctggagtgcagtggtgccatcttggctcactgcaacctctgcctcctggattcaagtgattcttctgcctcagcctctcgag

SEQ ID NO: 45145 - DNA, 2443 bp, Homo sapiens
tgggagtaaaattatttactttcatggtgagggatacttaagctccgttctaacttttgttattacaataaagtttcaatgaatgcccttgaacatatcagttcatactttacgtgaagcacagctgtaacatattaaaaatggaattgtttgtttatacggtaagtgtattttgatttcaatatctacataaactgttcttactcagagagaggacagagatgagtttatcagattagctaacagccaccatgggtctatttcaggttaaaattcaggactaggaatggttcatagaaggaaggagggggatctttttaaattgacactcatgagccccccagtttgaaatgacgcccttgagttgtgccaccaaaaagtatttctctgtgtctgctgcaagaccacatcttcactacagagcccatggactgaaactgtgtccagagattctagaaccttcctgaggcttgagcacagtgtttggagcagcactggtaggtggagaggagagagaggagtgagggacttggagggtagagggtggtgccccaaacacaaaagaagagatgttccgactaatgcgaggcctactgtgcatgtcatttcccttcttgttctctctggttccctttctaggagaatgtctgttcagcttctgttgaaccaaacctccaggttgattttggccaggaatccccactggggattcctggtggagggctgtgaacttgctgaggatatgaagatatctgaagtcaatcaatcagattgcaacatgacactttttatctttttaacctaactgccagctggaaacttggaaatcctccctcagtttttgcttattatgggagactgactcatggacattaacttgcttccagccctttctagccctaccctccctgactcagcattttagtatcacaaagaagtccagaagtcatgtccttggtgactgttgaagctgaagcacaaagaagtgaagtgactgacccaactatctataaccaggagcagcagagcctgggttacacatccattcacccataggtgcatgcatgagactcattcaacacacacttattagcatctaccaggttccaggcgatatgctaactcctggggctacagagttataattaagatagaccctcttcctgctctgttaacactcatggtcctgtagagaagatagtcatgaaaggaattatttgcatttgtaaaatgtgcacaaataaagaaattaacaaaaatgaaagatgtgagagctgtgaaggagatattcatggtgccatgagagtgtggggggtgggtcagagactgctccaaaggggagctgcatttcagctgtgacctaaagatgtctccatccatgaagaggcttattgctgaggtgccctcttcccttggaccagaaaagtaggacaaaaaaccattcctctcactgaccactccagacttaaacaatgaatgagaaaattccctggcaagacaggtagctagccatgtcctgctgaagaagcctaatagagggactttcctggcccaggaatagtttggaagattctttataaatgactaaaggactattcactgcaagttctagctttcctgcctcttctctggacggggagttagaacaccttgcctctacttcattgttaaaaaagaaagcttctagctcatcaggcgtatctaatgcttcctacctggcaatgaggggcctgctggcctccaccccaaccagggcaagggcagctgtggaggggatttcttttttaactgtgctcttgagcctggccttccttagaccctgttttgtaccagcaataattaagtaattgatgtattcctagtttgaagacacaagctcaggcctgggacccagcatgtctggagctgagcccaggcatcaccagctcagtgacccagcaagtatcactcgggccttccttactggatcctatgactgtgaaaatgtgggaaaggaacttatctgtggttcatgaacactgaagagagaaccactgtcttcatttcactctagcaccatatgaagttgatataatgatctccattttacagatgagaaaacagaagcatggagtttttgcccagagtcacaaagtctgtaactgatagagctcagatttgaacctgtatctttcagatactggaccttgcttataaacaggcatctaaggccaggtggtcaacagaaaatagaccttataacacagtacaggactttcttccctctccaccctttccttcttgtcccaggtaacttacttcagcagttcattacctagcaagacaaaaataatgaatatgggcagaaatgggggaggctggcctttctgtttgctttacaactaaccaaggggaagggcaactctggggaaagatgttttggggggatgggaaatacagtggg

SEQ ID NO: 45146 - DNA, 559 bp, Homo sapiens
agagcattcaaaaagcaaatgattgtttttttattaaataatttctccaaaatactgaaaataacaaataacattcaaaaagcattcaaagaaaacaaaaacatgtcctcattttatttggaaataaactcttgttgtaggatagaaaggaattagtgtattattggcaacctatgagattctgcactatttacatattgctggtacctctatgcaaactattgccaaacttctgaagcttctgttgtcattcaactgctgggggagggctgtatgtgaaagtaacccgctattagatggtgcctttaaggatgtaagcaccaccttcctgtctcctgtttacatactttacatactttagtgcaaggggagattgagtaaactaaacctgcgctgacagactcactgttggaatgagaagggtggtcagaatgggaggcagaggataacttcctctgtaatctcactgggtcagagcctcagcaaccttcactgcacacaggaccagtctccatctccctcttcccctagagcaaactgtttggtttctgagaccatc

SEQ ID NO: 45147 - DNA, 653 bp, Homo sapiens
tagctgaaaatttggaacctcaatcaggcttttggcatcccttcaggcagtcgttctgggctacatcagataagaactgagtacatggaaagctgccagatgtaccatagacatcggtgaaaaaagccaatttttgtcatacaaataggaggagtaagatagcctataatgaacaccattggaaaaaatggatgaatgctaaatggtattcagttgcaagtttgatattgttaaaagggctagggtacaacaaaatggttagaactcaagagaaaaccatatggaattgacatcttttattaaggatacatggcagaaggaaccaaaagtataccatagtaagagtgcatatttcaccccctttgaatgggaaagctaaaatatcctggtcttaagggcatcattatctgtaatagttattgattgctcaatgtgtgttcactcacagctgtgccaaacattctgagaatgttaagaagttccattatgaactattgctagggtgcttgcttttaagtgaggaacccttggaacaaaatgccttgttccaggtgaatacctgaatgctggtggttcccaatcagaatggcaaatgtagtagaaaccgaataattcctgaggctgagtttatgttagagttcagagagagaaaa

SEQ ID NO: 45148 - DNA, 730 bp, Homo sapiens
aatccattttaccattatagaactggagattgccaagggctaacttaagtgttaatttttgctacacaagaatttcggcctgaaaaacctacttccttccccagtaaagactataaaatcacattctcattgtagaaatttagatcaaacaccaagggataagtatcatttgtgtgaaatgacattgatgttttcaggcaggtaacagctctaccaaaatatatgctgctaaaatgcagcttttatgcaaccttcaaaaaccaatagctttgttttgtagaggataaagtctaaatttcttcagttagcaaatatagctctccacattctgtgcccagtctgcctttccaaaacgggctctcatttttttaagtacacattccagtgtcagctttcaatctctgttccccagtgaggccatctgagtttgttcatttggtgtctttttggtttgaggactacaccctcaaaatacaggcagcttgacagagtaaacctgcctatgattcttcagtattcatctcagctctctgggcctccaaggtttcttgagcattctagcccacagttgtgatggtggattacctgttgattttgtctcacagcatcagctcgtgtttccggtagcatactttggagcttcaattacaaaatttgaaatgtgacttcagataaaactactgaaaatgcccaatgaaactataaactacaacactcagtgaatggggca

SEQ ID NO: 45149 - DNA, 734 bp, Homo sapiens
atgttaaaggtattcagattcaatgaaacagtactaataacttccaggccattcctaaaagatcttataagccctaaaagaccttatgaaatacttaataattagtacagttgtgcctttaatgtttaaaagaggcagagacaaacaagttaaaaggcattttcctaaccctgactgtgagtcacaagcttgatgctgcctgaagccaactggcatggtgcccatttacagtaagttgtttactccctgtctaccaatcacaccacagagaaggaatgcctagagacatagagtgtcttttcaagatagatcaacagagaaagaggaatttataagtttattaaattgttacagatactgtttttaatattgctccaaaatattccaatccactttccataatctcagcatttttaaaccaaataactagccctcaatagacaaacttacagtaatagtttatcagtggaatgggtagtatcctctcatcagtttaaatatcttttaaataaaatttttaaaggacacaatatcgatcttaaaatggatttgaacttaagccaattagactgaagttgatttaaattgttttaaataaccaatttttagcataaagactgagagcttaatattaatattaatattaagaaatggagcatccagagaaatagaaaatagaaaaaatgaaccctgattatcaagagaaaaatgggtgggaagtatctgtctagtat

SEQ ID NO: 45150 - DNA, 584 bp, Homo sapiens
ctactgctctatgggagagacagataggactggtttcctgtgtatgtgaagtaggtgctgtgatctcggttacactgggaaggctcttttgtctcaaagtatctctcatcagctttttattaatgcctgaaattccatccttatgatttcattccttcaagttatgtcatttgttaaatagaaataccccttactcctcagtattccactgtaacctttccctaatgaagcataaattcattcacttctttttaacaatccactaaaacaaagcaggtttaggagggcactgtattccttgatttggcagacaggaaggggatgccattcccctccccccacacaaaaaaaggccatgactcaatatgatggcttttgcaacttgcctcaggctagccttagggcattacctatggagctgctgcatgccaggatgatacttgacccagaggagatgtgaatttgcataaggaagaatcatctgatgatgctctgggctataccttcgcccacactagctctaccattctctgacctcctggtatattcttcagcacctgctacagttaattgtttcttaatta

SEQ ID NO: 45151 - DNA, 949 bp, Homo sapiens
ggtctgtggtatacaatttcacattgccaccgttggtgccagtctggcccttcaaatgttgctgttctgaagatacatcagagtgagtttttggaaactccttctctgtgggggcagcagacacagcagtggatgctgaactcttggggttctctggaacactggtcgacctattgaggtttgcaatgctttcttccaaaagctttaagtctgtttcccccgaggaaaggctgatttggccctgctgtgggaatcccaggtcatttcccatcacttttgtttctgtctctcccatatacagtcccattgagagtgaaactgctttggacagatctggctgctgcgcattgcttactgagccttttggaaaatcaaccaaaagtcttcgctgcttggagtctgattgagaagcgacagccagtgagggtgaagacgcagaaaccttcacagtagctcctcctcttagggttttatagaagtccatcacatctcccctctcctgagcaagcacactgctggggttttcttctctaccaggagttaatgattctttggagtccatcagtgaatatcaactacaaaacaaaaaacaaaaacggggggaaaacatcataagctctaaagtcacattatcttcctgatccgattagtaagaggcagcttgttaaatgaaccttttagttaactccgaatcaaattctttgttaccagaagagtagtttctatcttccagaataaaaagccatgtcccctgctcccattcagcatgccacatttaaaagtacaatgcaatccatttgcacagctgagggcaaaagtgtatcgaactaagcttggctattcatcctgccgctcactgaacgtgtagctttgttaatcacagacattataattcattacatctgattattctgaaggttcaagttgatgtcaaagtatttaatttcaa

SEQ ID NO: 45152 - DNA, 4690 bp, Homo sapiens
agctacatttgtttacattgcttgagatcctcaatatgaaatgctattacatctctaagttctttcctttccaaacaaatatcgaagtactgaaaaatggaaaaacacagaaccgtaaaatcacattcatataaattcaggtacaactgtatccagtaaaatgttcaaaataattttctctgccttcacctatccaaaccttcacctatcccaattctcagcctattctcaagagagtaagactgttagtatatcgttaatcagggtgttttaagagatgggctaagacggagaagcgcatttgggacactatagtcaaatcccgtccaataaaaggtaacttttcctatgcgatgacgttaggcagcataaatgtcactggccctcactgaaaagtgaatatgaaggtagagagaggggtgtggacttgccactacaaatcttgagggtaaactgcttatctccccacctctctgccccgtttatctgaggcgataacgatctctaaacacgaggtatcgaatggagcccaatgaatttccatgccgcttttttgacagctgccttcaaacccgaaaccaaaacaatatttcctaaaacgaaaacgctccctcaagcgacattatcccccagtttaagttgcaaataacccagccacattaattggccctaatgaaccatgccagagggtcttaagtggtattacaaggttgcaattatcaagtctgcaaccccaaacgtcaaactagcacttgtaaaaatcgcagcacaaaaccattacggttacagggggtctttttctaaaaggggccacttagaaacctcaggcgcgaattaacaacaaacgctaaagagcaagcccttgcggggcgggggtggagaagagaaaaaagtgcgaggttaaaagagaagtacgtccagacctgttgagttctctctccgacacgcccacttctaacagataacgccggccccggccgcagtctccaagttgcgggctgtcagccccccgcgtgtgcaccctcacgcgccccgcacgccctcctcaagccaggcgccgccggggcctccccggagcccgggctcgcgctcgggcgcgccggggtggcgtgcaaatattcgggcgagtaaaattcagacgcggcttagcgttcaccacgaaaacgggtgtcgggcgacccccttggagggaaaggggacactagggggagaaaagaggccaggattcccgcgaggaatgagaggctcgaagcccccggcagttcgacagggctccgctcgccgtccgaggtcaggttcctccccctcggcccggccaggggacgcctgcggagggagaggaagaggccagcgctgtcacccgcgcgctgccctttcgtcaccgtcgcccggcccttgccagccccccacccccactccccgaggctaataaaagtttgtaggctcccgcggcggcccccgagttgtctccggtcccagcggcacctcgggggagcgagcgcgccccggccccctcccgcctcgcttcttacctctggcagaggagccgctcgcccgccaccgtccgcagttcccgccgcagccgagataaacaacttagcttgtgaacgcagaaggagcaggagggaaatatattttttttttctaaaaaaaggaagtaaacagccgcccctttctccatgggtggggggagagcccctatttaagaaagtctcccattgcccagctgacaagccagccctccgccccgcgccgggctccgcgggtcgaggttccgggcgcgcgtgccccgtcccggtcccagctgcttcggccgctccggctgcggcgtctccttccacccacagaatccgtccccgacgggcaggcggtgactcgggctcccgtcacagacacgagctcgcaaaatggaggaggcggcggcggagggaagagagcgcggacacgcgaaagggcagcccggcctgggcgagcgagcgggaccgagcggggagcgggtggaggcggcgccacggcgcgcacacactcgcacacacgcgctcccactccacccccggccgctccccgcccgaggggccgcgcggcggccgcggggaacgatgcaacctgttggtgacgcttggcaactgcaggggcgcccgcggtccctgcccccacgccctccgcgcgggccccgccaccccggccccgacggcgcctgcacgcccgcgtcccctggcgtggccgccccgcccggtgcgccgcgcttcgccccccgcccccaactccccaggaaaaagggtggcggcggcagcggcgggggccgacctggtctctctggggcggcgttaagagggccaccgagtttctccagtttcttttctcgctacctccttcccgcccccgcccagctccgcggctccagacccactcgggagctcgctctgccccttggcggcaagcgccgccagtgcccctgcgggtgacagcgggcgggccacaagagccggggcgcctcccgcggctgagctgcgtgagtggcccgcgccgccgccgccgggccgagttgcgtgaagtgtgtcacttcgaaaggggctacggggttgcacggaaacggtgccgcagcgtctcggccgcgctcggggccgggcggcctgacacgccctctggggaggcttcagggaagggacgggatagcgggggtcggcgcatacgtactttgggcccggggggagtcgcgtgccggcaggtcccccaccaccgcatcatctgggcggccgggtcttcagctgccgccgccgcgctctcgcactgggagagaagttgcaaagcagaacccaccctcccccgcgccccgaccgtcccccaccctcttccccgagtctgcgaggcggcggcggcggcagaaggaggcgccgcctgccaagttcaacccccacccctcccgcccaatgtgctcacactcgaaggaagttgcacgccaaatgcaaaacctccagcgagctggatttctttgcactttttttttattattatgattaaggaaagcagggggcggcaggcttaaaagcaagttgcaggcgaaatagtaagttgctggcgaaatatagccccccttccgaaactcctgacctcttcttccaccccggccagggcccgcgtccaagttcccggtgcaggccccacccccgaatcttgacatttgctgccctcgactctgtgcgttgctcaccctatcacgttcataggacccctgcccctacaaataaaacaaaatacaggcagctttaaaatgccagcgttcaactccctacagatgttcctgttaggagcttccccctcagtccaaggggaagggaactcgtggtccgtcctgagaaaggagagggccgtggggcgaggggtgcccgtgcgggaagcccccgccccagctcccttccccagctcgccgcgtcgggaaggcttggacgatgccgggaccgagcctcctaccttgtgcggcacagattatgatttttgtgactctgggaaaggttgtgctgtgtgggtttagggtttggggaggtaacttttgcgcccccacaggtgacatcgcttgccagctcctgacacgggcgggggctgccgcagctccacctaatcctgctcgggcgctcggccacagccactctctcacctcccgccgcgctcagactgacggcggctccccctgctctgacatcttgaagacgattggggaagcgcgtcccggaagccgcccgccgccatcttggtagggtacagtgtcgccagcccgtccccgcggccaccatcttggcaaaggttcgcgatcgcgggtagcctaagccgtccttccttggttctcaagggtaaacggttccctgtgcattgtctgatgtgaaaggaaagaagtaggctttcagcaagcctcttgtccggagacgatctacgggggccgcctccagaggattctggagccgccatcttggcaaaggaagagatactcgccacctcggaaaagaagagggaaccaaccgtatgccaacgtagaaccctcagccagaagaatttttatgaagggcgctgagcaactccatgttaacaaaacccccttctggacccagaaggcagactccgcttctcctgtcccttggcacaagtcaactagaaggaggcccttgctttggatgctcatctgtgaggctatgagaacactgcttgacctagttgcccgtttttccaatttctgagcctcaagcactagaatgagatgtctttcgttaatttggcccctaaactaccaacagtttcatgggaaacaaatcaagacccaaccctacaataatgttttacacgttttaaaagtgagttaaatagcccatgctaataattatccttgtacactgcttaaaatgattaagaattctatttatatatacatgtatgtatacatatgtatacacatatatattatatacatatatatgtatataattaaggggacaatacagttgtctaatagaacacatctccccatgccattagcctgtctcactgctgaatctctgctctaagaatccacctcatcgctcatacatgctcaaatccttagtggtaggtactctgcttaaataatttatgatttcacaagagttcccaattattctcccttcatttttttttctctgcagatcttaatggggaagaatac

SEQ ID NO: 45153 - DNA, 1268 bp, Homo sapiens
tatttgaaaagctcgttctgcttgcgatgtggagtatgagttgtaggggctaagggagaaagcagggagagcagtgaggagacaggcacattggcccaaggaaagatgacgaagtttgtattggttgcaatggcaggggagctggggagctatggttggacaggagaggtattttgaaggccaaaggtaagcaaagcagtcatccagcagctctatgaaagagatggacttccaggaactttttatgctaagagaagaccttctggtgaagagtaagcaggcttagttgaatggggtgagtgcatagaaagctgtgccagagaaaaggagtcagggagggttgtagtaggaagtaggagatgttggcagttctaggatttcaaggtaaatatctttatatcagatggagaaagttaggctggattgttagtcaaatgtcgaattgcctcaaagtgcagggggggaggggggaggggaagccccaaataccagtaacatgttgcaactggaactcacatactaagctactcatctagtaatttcattgatttttgcccacatggaggggttatttgttcatctccatgccttgagcctatcccaatttatagtagatttttttttctcacatttggcaattttaattataaaactctcacactgaatcaccctgtgttacacatatattgctgtcccctttcatgcttctcacttcttcattcctatttttctttgctatgccataaagaaggaccctaccaaaagccaccctattgtcttgcctattagttatcagaaaacttctggcaaccacagttttccccactttccctgcttcctccattataacctacaatctatattccacattacaggtttttttgtttgggttttaacatttttcaagagaagttattacattttatggagtttaaaaaatagtaaatgttttgcaaaagaaagaatcatgtctccacattcacccaccctttcaaccctaatgaccagaagaaggaaagattctcagctatacagctaccaatgactaacactttgaggattcagtttggatatgttgtttactttggtcttctgatgattagctattttaggcatggtttcaatcaatcagggaatgtttattaatagaagagactttcttaattaatattctctccattcattccttcaacaaaagagaattccttcaacaaaatacaattccttcaacaaaatagcaactattatatgttaggccccagtataag

SEQ ID NO: 45154 - DNA, 1141 bp, Homo sapiens
ccttatgaaacccaagagaaccataggttttccacatccagctgagcatgctcaaataaagacagacatttaaaagcatagacattgatcacgtgctctttaaccagcaaaatactacagccaaaagaaacagaagcacagagaaataaaatgatttgtttgaagtctcattgatttgccaagaaaccagactgaatgtgcaagctttcctaattcctagttgggttctccacacactaaacatagtgatatataatcttcagttgtcaatatttaccttttatgagtttattgcttgtcatgtgttaactcataaagccatttatttacttatatcagtgccatcaaaaaccctttaatttcacaatcacagtttgtgtaacgtagcagacaaagcactgggctgggacaagggactgggttttggttttggctttgtccccctttcttcctgccctcaactgcatgatttgggcaagttacttttccccttttggactgtttgcctttttctgcttaagtatctggactttcccttcccttctttctcaacccacacagaagtaattatgtttctttcattatctctaactgcaaagtttttactagacagcccatatttactggtcatctgctgaatgcctctgtgcagtgagctggagatagaggtaaataaggtatggcccctgccctcagggctttcccagttaagagggcacagggtgtgaaggggcacaggtcagaaggtgaaggcaggggtcagggaaggctcctggaggaggcagaatgagacttaaagggtaaacagttggtgctgggtggcaggcaggtagacataagctccagtgatgacacagattatgctgaaaggaagaatagtgttaacagaactggcttggacgagggcagaactagaaagaatccagactctgacactccaagttgtgtgaccttgacctagttacctctgtttcctcatctactaagtaggcataatgatcgggtttcctcttaaggctgttgtcacaattcaatgagattacatttgctaattttagtgcagtatttggcattactataggtcaaatatccctaatcccaaattctgaaatcggaaatgctccaaaatccaaagcttttt

SEQ ID NO: 45155 - DNA, 3873 bp, Homo sapiens
atatgtgtacgactatcagggttggtggtaaaaactgccttgcttggctcagcatgtctccagtgaggaagccctgtcatgagccactagaatacctgggactgggtgcatctacagtgccagcctagctgaatgtagcaccaagtgtgttcatctcactttgctgagtgggaggtgacactggaccagtgatctggatcgctgaattatacatttaaaatatgtaatgcgctaggttaaaagtgctataaagaaataaggtcataacaaggtagtaaggcatctagcatatattccaaattcacaaacattggtcctgcaggatttccaggtgatggtgactgtggtggcaacggggatggggacagatttctagtcctgaggggcatctttgtggaaacatcagagccttggtccatggattcctgccatagtggggacagaagtgaactatttctggctgcacgtcagcacccttaggcatttccagaaatatttaggggaaagacactctttaaaaggctgaggtaaagcagggacactcaaaattggtgaagtgtgagatgctcgggatgagtttgtttaaacaaagtaagccaaaggggctattaaagcgtacggttccccatgaattcaatgtttttctttaagcaactcaacttctgtggctacttgttacagctatttcaaggagctgcccttggaagccttcatttttatgaggtgtaagaaaaaccatgactcaggtaaatctgtcaacattttcccatagaaagtttatctttagaggctcctcccaccgggatcctctccatctgtccacagcctactgagtaacccaccgactattgcgttctctgccccacgttcattcgttccttttccctattcaaacttcaactagctctaatggcagaaaagtgatctgatatataacgtcacctaaaaggacaaatgactgacagtagctcgatttagtttccattttaaaggaggatgtttggagtccacaatgccttaatggaaaggaattgggctaattgtgtaattctttcaacaaggcaggccattggtgggaggcttttgggcaggggagcttcctggaatctgttaatgatataccccaaaggcaactcaactgactcatgaagttaactctgatggtgctgatgatgttactaagaagccctaagcctgtgctgcctaaagttcacagagttttatttaacatattcttttgagctaggcagagaagaaatgaccatctctcattaacagcaaggatactgaggactggagatcaccctcatttgcccaagtgtctcagctagtagctgatggaaacagcactaaatatatatatatataatttatttatttaaattatatatatatataatttatttatttaaattatatatatatatatatatttaatttcatcttgtgtgggcaaataaaggcagaatgtccaagacaaggttgtttaccttggctgttattggcaccttggaataatattaagctgtaaggggcttaagatcagctaaattacctgatctgtaagcctctctctttttctcatcccccatgtccaatcctccagcaactcctgcaggcttaacattcaaaataaacactttccaccattccactgctcccctccatctgaggccttacctctctcatgtagatggttatggcagcttcctgactgctctccttccttccacacttgcccatctacagttaattcttcacacaccagccagagggatcctgttcaaacctaaggcaggtcagggcggtcctttgcttggaaccttcagcagttcctccctgcaggcagagtcaaagcccagtctgcacctggctcctggctgccttgatggcctcagctccagttctctttgctccagtcagactgtctttccttttcctcaaacttgccacacaccttcctacctcagggcctttctactggctatttccgccctgccccttgagtcttccagatattcacataactggcctctttactttattcagacccctgatcaaatgtcatctcctcagagaagcccctccgccactatcactcttctagcctctcattgtgttttagctctccttatagcactttttacctaacacattatatatattttaaaacgcgttgtctcgttctcctttctagttggaagctccatgtcagttttgttttgttccctgctgtatcttcattgcctacaatagcacttggcacatacttgctgaataaatgaaactgagaaactcagagcaaactatttctttttagataaagcccacaaaaatgttttcttcctgttcagtttaaactatccagcacacaacatcagccttgtgattgtctttttttctgatgctctgacctctgagtgacctttaacaagtaactttgttagaactcactttacccagctatagaatgggaataaaaatataacctaccttccttctcagacactttaatgaagcaaagtcttctttgttctttgaggaaaggagccaggcagatgaaaattcctgttattaaggtacaactaaagcccgaggagggtaggagctgcattttgttcctccccattctcgcacagagaaggcactcattaagtgcttatcaaagttaatatctgtggcacacaaactgcacctgcctctgcagcagtcgtcacagaagctggcccctttcctgggctaactgctctgagagcaccagaatgaaatctgacttagatatgacgcagattccttttttcagaagaagccagctacacaactcttgatgaacaaatagctaccaacgatgagcacaaaccagagaatttcagaagtgaagaaaatttcagatcagaagatcctgtctctcgggtataacttttttttttttggagagaaatacagtgactctcctaattatggtgaatttcctagttcagctcagagccactgattcagcagatattcccccaggcagatcctaatggaaaccaacatgtgaggtctgatgctgggaattttatcatgctcaacaaggatttgaaaactaaatgaatgcgtgcatattcacactaagcaattttcctccctgccttcaccactttcccttttttcttctcttaccctctttctgtttctattccttccccactcatgccccagtgcttccgttggacacatgcgcattttacggtcctgcagggcttgaaagatttctgaccttctaaggtccagtgatttggtatcagaagatctaagttttctccttctctctgccatttaaagaagcgtgttgcaatttccccagcagaagtgaaagtgattcgcctctactcaaatgtctgcataggcacaagaatgagggcgagagggagcaagagaagaggaagaggtaccttttgaatggggtgaaagcaaacccttacataacctgaccacacaataggaggaaatgaaaacttgggttcaagggcaattttgtcattggttattagtctgtgtcatcaagcaggtgccagaaaaacaaattttattttgattttaggcattcattttaacaactggattttcctaatttctcattcccaaggaggatctatgcaagaatgcacaatttatagttaatttggagatgaataaaatattaacataccttttgttccccctaaaacataatacctaaattagtgtgatgccttggttaccatcctacatatgtatttggattgtaaatgagctcagttttaagcacatttgtaacagtggaacaagtgaggcttgtattacatggccaaattgatattaatgatggtggcctcgagaacggattcc

SEQ ID NO: 45156 - DNA, 888 bp, Homo sapiens
ttgagaagctgtgatcagctttgtgtggctgcagcagtatgcaagggagatgagtagggagggtagccagggaggaatttgccaggtataagagtctcctgacagtagtagtaaaaaatggccataccgcatatgttcagattagaattttgtgacctgctgtctaaaagagttctcttagagaggagaaaatttataaaagtaaattcatattttttcttgctgtttgcagaaacatcagactgttttggttctgttttgttttcacttgtacaaactttctcctacatcatgatgcaatctcattgctgtagttttaagttcttgattgtaaccattccaaacagggcagaagtactataccaggaaggaaaacttacacagtccaggaactttgtacctcagatcagagagaaaattcactatggaacagccaaactggcagttttcctagtgctgaaatcagtgtgaatttgtcaaacttaaaaaaaacagaaattatgtaacttggctttgagaaacacctttcttcttttggggtattgagcctcccttctctgcctattgtaaagacccatgaccatctagagcccagcccagaataggcctcatacctcatggctggcccctcacccatggtagagctttctgattgatcatggttctcttactcgataagtgggatgatccaggcagctgttaccaaccagtaataggataaacctctgtgactctcatctcattgtgagccacatatgtaatttgaaaatttctagttaatacattaaaaaactattaacaactgaaattaattttaagcatatattttatttagctaaatatatccaaaatatcatttcaacatggaatcaatataaaaatcattga

SEQ ID NO: 45157 - DNA, 1321 bp, Homo sapiens
cacgtgacctttctctccaataagattgcaagtccttggaaaatagagagtctatctcttacacatcatgccaggccctaactttagcagagtgtcatattcctagcaggcactcaatacatgcttattgactgcttaagtagccatacagcaatctatgatatccaaacaagatagatatttagaaagtaaaagaggactgctcttcaattctttagtgctgcctaatattagattcctgaatcaggtaaacgtagaggattttatggtctctttctgcttttaagtctgtcactctgggagaatgcatgtgtttttaaatcaatggaaagcctaattccaagcttttacattttcatgtgcacacatggtaatggaaaggctggattcagagcagtaattttgttctttgcatagctttgggatgggaagcaaatatttcttcactgttttctcaagtgtgatggtgcaatacattaggtcatctgcgtgaaataaaaggttgagtcctttctgtcataatatgaagggttagataaggtaaaagggttgtaaggtaaattatttatgaaactaaccacatgcagaagaaagggtcagatacatggcatttgggcaagcgattataggcattttaatatgaaaatcatcagatggatggatgtgagttttatacataattatgggggatttttaaaaaagtgttggttaactaaaatttatgtattttatgaaattttggagaatagaggaggacttttctagtccaacctcttgtctagtgctctattccttaaacaataggcctgccaggtaatcaatgggactgtacttacatacccttagtgatgggatgctctatgttttaacaaatctgataataagaaagtttgtgttatgtttgagcttaagtcttgccatgtagcttttacctgtttatattcacattgctctctagagtacctggaataagtttgaggacttgtccacaaaaaggctgcagaggacagctcttatgtaccttcagaattgtgtttatttatttgtcaacaaatctctttatgtgccagatataataaaagaattttaaagacataataacatctccatggcctttgccatgtatcttcaatgcttctgtggtatctggcacatactaggcattcagcagatattattgaatgagtggcgaaggccatgattcttgactagagatgctcagtctcactggggcaatcagacatagaaagagttgaatgataaggaaaagacaacaaatccattacaaaatgagcaaataatatcaacaggaaattaatgg

SEQ ID NO: 45158 - DNA, 3129 bp, Homo sapiens
atattgcaattattgttcttccttgccatcttctgcccaatactcatctttctagcctcagctgcagttgatggtgtacttgagacacagttctatgaatgagatataagcaaaagtcttttggaattttttcagagaaagtttttgtatttctgataatatgaacaaatcaagctagtaacaatcttcctcttctttttcctgctttgaacattgatgagatatctggagctctgacagttatcttgcaaccatgaggtcaagaaaaggtcaagagaatcacagagatgacagccttaacatcactggaccactcactcagtgccagaaactacctgcctctagacaccttgctatgtaaacacgaataaatacattttcaactgtttaagaccgtctggattagagttttttaaaaaaggcttttgaactgatacaatggcatgttgtaaagagagattaagttccaccacctgttccagtttgccaatattcctgttaatgaggcacctcagatcgaaggctctattccaggagaatcagatttttatcaaatggagggaggctgtcattttttctcattttaatgtatacatgtatattattatgtcccaagatcaagcttgctcatttggtagccttataacactggtgagtcatcttaaacttactgccaactcaggccccagcatccttgactagcagtttggtatttataaggcagtgttccttacagtaagtagaaagtataatccatgactggtaagcagaggctcatacaggctaaagtactttccccaaagccatgcaagtcacagaattcctttgacccttctttcccctaagaacttctcttcagtctgcccccgtgggctcccatgcacccatgtttgcattcttggtcctacctgattggttcaagtgtggatacctgactgaagctgtactagtcctgttgtctctctgcagtgctttcaagattggaaaatcattccgatttttaaagaattcattgcaatggatgtggaatgagactcaaagtcccaacattatttcagaaacctgttaatcttgaagagcaggtatatgtaggtcattagagataacagtcaaaaatgtctcctgctgaaattggtgtgtccccctcatactgtgttgccaccttacctgactcatcctgctcaatactactgtggattaggtgctctatgccttttagtttctgtctctccacattcaacctaatatacttcttcctaggaagaagtgtgtgctaccacattatattatggagtaagaaagtaaacatttttttccaagtaatacatgcttatgtctatgtatctgtctccttatagtaaaatctacaaaaagaaggcaacagaaataaaacattgttaatttcaatgtaaggaaagatttaagacacaaattgactgcaagctgttagggactgattgtacctttgctcctgtggatactgggaattttaaggcagttttcataaatgagagaattcaagcattagaaagattttagggaagggtctctgaaaaaaaaggatagcatctaaaggttggccttctctatatttgcatggggttagccttgagcattttggtttacgcaataacttgggtggatcttgtactttcattcctgaagagtgcagtgaacttttttttctgagacagcctacagttgagtgacatgttttagattaccagagccctcaaatttcaattttaactagctggaatgagcagacattttatttttattgtttggtataggaactttgaagagtaatgattcttctttgccaccggagtagtctttaggaaaaacaaaatagttaaggtaatttccataaagaatcctgctcatggcaacagcccccattgataattagtcccattcagagagatgggtatggaattcaactaacatcttatttctctacaggaaatgtttaggtatcccccatgttcttgactgtcacttgggactaagactattttagaatgtaaggggaagatagaagagatttcttggaagcaaagaaaacagcctattagggtcaaaacaattatatgaggagtccctgtgggttttgcgctaagtaagcatggccttatagaaaatacagattgaggcaatcagctccttccaattttatgcaagcagtagcaatgggaagtatgccaagagagatgattaaggattaaacaacagcatgggaacttgctcagaagctccaaaatgttgtcgccagcacctgatatttctacatccctaacttctggattgtgaaaggtggtgcccttctcccaaactccaccccttagcccacttacagctccagggaaagttgaggaagagaaagattctgtctctatcaaatcctaatagggagcagagccaagagagacaggaagaggcatgctcatttccaaccttttttggcaagctcaagcgggagcaaaagccattgccaattctattttttaatacagatttaaaaagggttgtgtctacacatgcaaaggggagtgcacagtgcactgtgttaatttaagcagcacaacaatttttttaataaaaagaaaggctgactattcagatatttgttttacatttggtagatccaaattgggggaggagaccaaagtgcaataatttctcctctagttatgcgtgtgctttccagccctacatttatcgctcttccagttccaggctgggccagccagagaccatccctgggacttttcagtttgaagtgaggagagagaaactctttccttttggagacagaattgagttgctagatgtagtggaccatgatgtgagcgcactttggtagtctgagttggataactattaggagagagcaagaggccaggtgcggtggctcacacctgtaatcctagcactttgggaggctgaagtgggtggatcacttgagatcaggagttcgagactagcctggtcaacatggtgaaaccccgtctctactaaaaatacaaaatttagcttggcgtggtggcgggcgcctgtaatcccagctcctcaggagggtgaggcaggagagtcacttgaacctgggaatcggaggttgcagtgagc

SEQ ID NO: 45159 - DNA, 2434 bp, Homo sapiens
gacctcaaatgctctgtttgggacattcacctgaagaaggtgaagtgcagtctactgcctcttctataccaagagtcgcagttggggcagctgggaaaatcaccaggaaaataaaaccaaatcaaacaaaattaatttagaggatagtttatatacataagatagggaatactaacgattcagatgcaaacactctaagtacagaatggtataagacaggaagaaaatccctttcacgagtcacaattcagaaggtcaattcaaacctttaagtgataaaccacatttctagtcaagctgaatacagagtacagtattttatttgctaaaatctgaatggttactacgagccacccagcttaggtaacatacccaaaataatctctatgaattcccacaacactcttatgggatagccattattatctcaattgtataaatgagaaaacagtggttaagtcactataaggtcacagagcttggatccaaacctagtgcttattttacagcctgtgcctttagcaactataccaccagtatatttaatcataactaatagaaacaaacacaaatattgagtgattacttttattttttataagataaacagaccaagagaaatgctagttaaaagcatttatctttagagcaagaatgctccatccttgtagaaacattgagacaaaaagaatgcataagagcagcagttttaagaaaagtttggtgaaactaagtgaaattccaggcatgagcaatcaatttaagattctattaggaaagcaaaacaatgagattatttcaattattgagttaacaatgagatttcaccatctacattctagccatgagtaagacatttatttgaatcagataaggagatataatgtcatttgaaggaggcccagtacatttaataacagagataaatgaaactgacaatgatctcatactttataaatctaaacaaaggaccaaggttagacacagggatcctagtggttgatgagttagttaaaatgccgctttttaccctatctattggagaccagacaggatttttgttttcttcctctaaacaaggaggttaagaaagaattaatccaattgcatttaaaacaaagtgcaggagcaagaaacaaccttgaaccttccttactcaaatagcagctctgttggtaatttaatcactaactgagttgtgtaacttgcctatgacaaatggtaaaatacctacaatgtggaaatctgccagagtaattccttcacaggaatgggagggaaaggctcagccagctcacactcataccctgcctccctatgctcagtgtctgaaattgcttctgtattaggagagaatatgggaactgttctggatctcaggagaatgtgaagtcactgaaatgtttttgaatacccacttcccttcactccccttcccaccctacttggtacttgctggcatgtggcaccatgtgagctacaggcagtgcataatgaagtctaaatgttagcaaggaatggacaggagatcctgtggtgtgtgatctggcttgtcctttctgccttccttgcgctaatgtttagtttcagacacggaaattttgaatgggatcaatctgaactgttcctttctttgctgataagtacaacttttcgttctccagtctcagcttaagcttcattgtctcttggaggctttcctaagtcacctgaactacattaggactccttggcacacacttccacagctccctatgctttctagtactaaacacacttcttccatcttctccagtgcatcagagggttcactgcaacatttcaacacccagtcacaatgtctggcatgttgcttgcctttagtcaatgtttgcagaatgaatggttgcctttgtcattttctttttaaaaaggtattgtagacaaaggcagtggttcacgcctgtaatcccagcgctttgggaggctgaggcaggcagatcacaaggtcatcacaaggtcaggagttcaagaccagcctggccagcagtgaaaccccatctctactaaaaatacaaaaattagctgggcatggtggcacacatctgtagtcctagctactcgggacgctgaggcaagagaattggaacccgggaggcggaggttgcaatgagctgaaattgcgccactgcactccagcctggaccacagagtgagactccatctcaaaaaaaaaaaaaaaaaaaaaaggtattgtaaaatatttaagacaaacacaaatgtgtaaataaaaatattacaaacccccacatattgactacagattaagaatgaaaacaatattgatacaagtttaagtccctacttagtcctctttgatcacattctgctctctagaggcaactagtggtctgaatttggtgactactatttccatgcatttcttaatactttc

SEQ ID NO: 45160 - DNA, 615 bp, Homo sapiens
tatatttttgagttaattttgtgtatgctgtaagaaagggtcaacttcactgttttgcatgtagatatccagtttttctagcatcatttgtcgaaaagactatcttactccgttagctcatataatttaaaaagccatagggaaatatttaaaaattcagctattaaacacatatctgtgtgataccaaacattgattttgtggatttttcttccttaccaatacattgtttgactttggaccaaacagctttcatgtatttgtccatgtgtttcattaatttatcagtggtatgttgaatgcctattaggcaacactgggcacacagtgaaaaattcgatagtgggtgcattgaacctgaggccagttccttcctccatagagaagggatgggaacagtagatgattcttgcatcttctgtctctcttcctctccaatactccagtcttaatatgcaagggccgtcaacatgctattttcccctatcttcaatgcttttcttatttgttctctcctgatgaactcctactcacttcagttctcaactaacctttcactttctcagggaagatttcttgttcccccaggtcagttcctccttgacttcagctgtg

SEQ ID NO: 45161 - DNA, 710 bp, Homo sapiens
ggttctcaggcctttggacttggactggaaggtcatcacaggtgtttctgagtctccagtttgagatggcagattgtgggacttctcagcctccataattcaataagccatttccttataataaatcttatatatatttatattttattgcttctgtttctctggagaactctgcctaatacacaccaactaaaagtgatgcttactggactctgtactgggttctcacacttactgtagcaagaaaagagtagagattatgagtagctttgctagtaagagcctacaattccacttatataaagcctactgtcaattcaagctgaagtaccatgccattggtatgtgctgccaccaccaagttggctctcacagggactggcacacagccatacacatccctgcaatcatgacctttgatagtgaggtgaggagtcggataaccaggcgacatctctgctccagccagagatgactggaggcaattcatggtgaagatggatgaagataaaaaattcaggtttggggagtttgtgggtgttttgcagaattctgttatcctctttcttgatttattgggggacagtgtcatcttagccacaaccgacgtctgtctgagctgcttgggagcccatgatgataaattactgaaaacactgaagcaattatccagttaatttaggttgagcacctatattatcttcaacacc

SEQ ID NO: 45162 - DNA, 1491 bp, Homo sapiens
aaattaaaaagttagctcagcatagtccctgctacctggaaggccaaggcaggagaattgcttgagtctaggaatttgaggttgtagtgagccatgattacactactgtgcccagcctgggtgacagagtgagaccccatctctaaaaaatagaaataaataaaaaacaaatgaacgaagttcatttcctgggcttcagggaagattgtcagataacatttgaacagcatcagtcacatacaggttcaataacagctggttctaatatccaatagggactggacaagctcatgtgaactttaggggagcattttaatctgcctttacaacataaaacacccagctaaaaggtggctggatctagtatttcagttaacttaaccagcacagccaaatcatagctcagttgctgggtgccatggtgtcaaaaaacccataatgatataacagagctaagaaaatcttctgagacatagacgtcactctgccaatacaaggtatcattatagaggtgaattcctaaaacaggccagatctgtgactccccggtgcccctgccagaattgatctcgaaatggtggattacaacagccgtggtacatccacaagctgcctgggagtttcttgtcttctcatcacagtcaaaatggcttactggcttggttccaccagtcttgccttcattcctacaccaggagtcatgactgcagcatgccttcaggatgactgttatcatgggctttggcttccacatctcagctcctagccagtcctcccaggggcttaggaagtctgctccagcttggccagcctgcttggggaaggactgaggaagagggcaggaatgtggaggtggcctgcaggggcacccctatctgaggaagtgtcttgggagagtggcagtttctgagcaaatggggaagggcagaactggctgccttgaagttctgagggggacaaagaggttgctgtagcatttgtaaagccaaaacctggaatcaaccagaatgctcatgaacaggggaatggttgactaaatggggatgtatctgtgctattgtagaattacctgttacagagggagttagagctcagtccttacactcagaggaatgtctgtgctactaggaaaacaaagtccagagcagtatatgtaaaaccacctccatatgtgtacaaataataatggcttccatttattatctattgtatgccagggactgtgctaagtgcatctaactaatgcgttaactaatttgaatctcacaacaacctgatctatttattagacatttccctggagaactgaagacatttagtagaagaggcagacggtaaaaatctctccctatacatactctctttcatttgctttcaagtgtatgtgaactagttgaacttgtttggctgtgtctataccattactggatttaatttgtgttgcctgacagcttttcaaagaaaacagcttcattgaatcctcagggccca

SEQ ID NO: 45163 - DNA, 746 bp, Homo sapiens
caacaacgcagatttccttcagatcacaatctgctccaaggaacagctctatagaagcccttaaaatgaactgtttaaatgatagcccatttaaaacacatttgctgagggcccactcaattattagcttgctgttttgctaaagtagtagaaatatttgaaatgctgtctggtaaacagaagaatgcagctggcattccattaaaatgagaggtgaaaagtgtcctcaggaaagagtggggagatagatcacagtgtttagggatagaggaatagggaaagcaatttgaattagaccttcaaggacaggaaataggttaatagagatgatgggaggccgcaggatgggacagtccaagagttcagaggtgaggcaactgatggcattttcagcacatccttgttgagtgggtatggctgtgagaatagggttcttggagtgttttacaccttttcttatccccattctgctccctctgcttggtgagccttgcttactccctctccctttttgctctcctggaaaattcctactcatcctcaagagtcaacacaaatatttccaactttgtatgcccttttactgactctcccaaatgtgactcatccctgttactgtatccagtaccctttaaatagcttttcaacttttctacctaaaggtttacacatcttttgtaggatgtttttctcattaccttatatctttagttgctaccatagtggtatctttttttttttaaata

SEQ ID NO: 45164 - DNA, 2195 bp, Homo sapiens
agtttccaagacccaagaggcgttaaaccattcatttattgctttagcaatcacattactttctaaagttgtcatttggcttgggttgggtggtaagatacagtttgtttttttctcctactttttttttcaataagctttcaactaaaccaaaaaacccaaaaaaccctaaacgttgcaactaatttcaataaattatcgtttaaggtttcttctattttggcatataacgtggaaactatttttattatgtgaagagaacgacagcttagtattaagtgtttaaactagactcaacccaggttggttttattcatgaaatattacaaatagttaataaaagccggggagagggagaacaaaaaatgcagttgaaacaatgagtaatatgtcaatgaactgatgacacttctcatgtcctaaagatagttttcgaaggtggaatatgaactgagaaacacatttagcataaacgaatctctctaatctcttcctttgtataatgacctttcattcactcaataaacaatgaggactgactatgtgccaggcattttgctaggcacagaggaaatgggaataaactagctatagtccctgtcttcaaggaacacataatttaactgggggagctaagtgtgtaaacacatatgtatgggaggtgagggacttctaaaacttaaatatgcccatatgcaaagctatgactggtcagaatttttatctccgtatcatggacactaagattttttttaatcttgttcatggcatttcatattagtcacctactccatttggcaaagcagagtacatgtcatagacttgaattctggtcagagtcctgccaacttctagctgagtggcctttggctagtcataccatctctctgagaatattgcctcatctgacaaaaatggagtaggtttaccgcaggaggatgttgatatgagaaagtactttacaaaatgagaagtgctgtagggtatggctgcattcttacagctgatgtttcatctggatgatctctaaattttccagtttcccatcttgcacttccaatagaccaaggagtccatggattaatagttggcttccaaggttaggattctagctgagatcatttgtaaagttttgggtatatatgcagatgcatatttttctagttcctcaggtttcatcagattcttaaaggggtccatggctgtaaaagaacccaagactactaatctagacagtctcggagttttttgtggggtgcagagagtgccttgtttatctttatatcccaatacttatatcataatgccctgtgcaaagtaagggctcctaaatttgttacattaataaatatcaaaatggataagtgctatgatgacaaatattaacattcaaaacaagtctggcctcatcccagggatgaaacattgaattctgatgaagcctgtcattggttgtcacacagggagaggtgccaaattcagacttctttccttatgttttcaaccaacttggggaagctccttctctgctctttcttgaatttgcggatggttttgttcgtttgactgtgtcaaggctgaaggtcactcagtcatacaggcctcctacagactcttttctgagcacatgggaaggatctggtgaacacacgcatcccgctggagagggcttgtttgaaaagctgagcaactttggaggagtagacacaaacctttcaggcatttgcttatgtctactctgactaaatgtttcttacacaaatgcaaatattctagtactaagactttcttgcacaactacttgagattgtaaagtctatatatgtgcctcaaacataaacattattgcaacaggttaggaaattggcctgtcaaattgcatcacaactggaggcaaagtgcaaggttgtccattgcatcatgatagcaatattgaaaagctgaaaaacaatctaagtgtccatcaaaaggaggcttgctaaaataattatcatataacttaacaatggaatgtcagtaacccattcaacagagtgaagtagtgtaacgttcagtatttcattgtacaataaacaatgatttttttaagtgaaaagtttattgcttttaaaacaccttttattttaaaatatttgtgtactcactagatgttaaaaaataatacaataatcctacgtatcttttaccaagcctcc

SEQ ID NO: 45165 - DNA, 3128 bp, Homo sapiens
ttttttcaaagcactaccctttacatgttcatttatgtgattaccacattcatttgttgttttattaattcattcacttattcattcaacaaatatttattgagggcctgctctgggccaaacactgtttcagcgactattgacacaatagtgaaaaaaatagacaagcttcctactcccatggagctgacatttgaatgggcacagacaggtataagcaaataagtaacaaataagaacaatgcctactgtctaattgggaagacagacattcaatccattattccctcagcacccagtatgaacttcaaacacaaatcagaccaggtcaatctctgctgaaatcctttctatggcttcctattgcacttagaataatatgcaacctccaaacataacctaatcatgttcagccattgaaggtagtatcttggttttaaaatatcattaagtaaacaaagaaggtattaggcctacttcatgaaaagcaaatgaactctcaaaggaatgggtgtcctccttaacaccttcattttcaacatctgcaatgcatgagttgcattttgttttatggcatttttttctatttatactcaaatagataatttttaaaaaggttagtttgattatcataccatctcttagaaaactgttatttgatgagttatgtgacctccccaagctttagttttctcctatatgaagtggggatggtcatattttatatcatacatttgctttggtgattaagtgaaccaaagggcataatacctgaaacaaaataaatgtttaattagatgtttttccctttgagcaaatgaatcagcactcatcattattgctgtaaataaacaaacttactgacatgggaatgagaatgtcactgaaatgaaaataacataattgtttacttcacagcagggtgatggttggggcaagaaggcatctgcagcctgggtcactggtaacctgtcgtagtgactgagctgacaccaagccttgctctgaagcaggtatttttatgcagttaaccttctctgggctggtgattatgcaacatgtttgttccctgagcacacattgttctcaggcggccggcacggtcactaaaaatcctacctgttttagaatcttcctattagtaaataccaggcaatgtcactaaaaaggcttacaggctgagaagaggaactgaacaaatcttggagccaagatgcatctccttttcaggtggtacttctccagggaacgatgtccttatctgtgagaccttgaactgaatgtaagctcatcccccatcatttacccctgaatagcctcactcctacagacctgctctttaaccgcttttatagcttcatcaactttttctgatcgtaaaatagaatatatagcaagaagaaagaataaagatcactagtcattctaccctctctctacctccaaataacaacataactttggttgacatttgattatagccttccaggattttccccctatttctctatatagacatattaactggtttaagagcatggactgtggaataagacttcctggcttaaatcccagctgtgtaacttattagctatggagcctaagggaaattacttttagcttctctgcctcagtttcttcacctataaaatagaaatattcctggagtattgtgaggatgggtaatacatataaaatggtttgaacagtgtccactaggcactcaataaatgctatctagatgtataattatatgtaaaagttgaataaggaacacttaactatgtgacttaggaaagagaagaagaatgtctctacttcacagctgatttccccaaataaatagtcggtacacaagaaacatttgttcaatgaatgacagtgtgaacccataaatgaactgataaaacatggacgagtggataaatgatgagaatggatcaatgtagtgtaaatgcagaggagcccaatggaaaatttctggctgaggagaatctgtggatcttggtgatttttctaggaatatttgtaagacttccattaggcacttgaggacttcttggtgggaagaatagaaacccacagaattactctggattgcagggggacgaagggaactgaattgttcagcgggactgtaactgacagtggagctcctggtttcctttgttgtcagatctcctcctactgctcaaacaccatgcttacctttctgcggggagcggaaggctccgttcctgagtctccctcctacttctccacgtgcttaggaagaagatcctgatcagcaaatgctagaactcttctctgagtcccagaacctcattacctgctgggtttacttgggtttatttatagacttgaagaaataacagaagtcagtcactcatcatgaggtttccgaaaaatctcttcagaacttctccaggcaaagtgccccatcttacctcccaactcagaccagggaaatgtatctagttgataagcaactctaagctcttggtgaaaggcagcactctggaatgaaccaaatgttagtattttccatcatggagttcttagaagagaggagtctcaaggggccttgaagagggggtgtgaaggggtgtgtgtcctgttaatgcatggtagaatgggctgagagcctgtctgaggcctggcataacacagggtggtttcacacatggctcatggtgaggcctgtcttccaccctcgtcgaatatcattacatcactcttttccagttacaggaaatccagtgagtgctggccatagtatttccctgagatccaaagcaaacaaacccgcctctcctcagtcccagaggctgacgacatgtgaaggaaaagccaattcatagtatgtttctgttgggcctgagcagctgagggtgaacccactgggcaggcagacagtgggcagctttctaagcacatatacagccagaaagcagggacgcacatgcccatctttttctttttttccttttataagaaacattatttgaagtccatttttgtatttgacagactaccagggctggagtcccagctcttctacttactagctgtttgagttcaggcaagtcccttgagctagcaaagcctcagatcctttatctgtaaaa

SEQ ID NO: 45166 - DNA, 1072 bp, Homo sapiens
ggatacatttcttgagcacctactatgtgccaggtactggtaggtgccagtagtagcagtaatgaaaagatcattgttaagaccaggtttgaatcttagctgtatgcttcctagctgtatgtcactttgcttttctgagcttaaattctatctataaaatggctgtacactcagcacacaggggtgctgcaaaatggctttgaaaatcataaagagccatgtgagtacaaggtggcagtattgtagcgtttgagctaccttctctcggcattatacagtcagacattatggtgtcacctgggattcgcacagtgcttgacacataggggtactcaatagccacttgtagaaggaaggaaagaggtaagaagtgaggaagggaagtccaatgagtaggtcctcagcagttgcacttcagtttcagttcttccagagcaaaggtccctgataaagtggtaaactatctatggttaggtgagagctgcattgtacttgtggtgattcattctgggtcaggctaagcactaacccgcattctcttgtccactgatcattgatccttgaatgtggactttggttctgaggtgaaatctcctctgaaacataaacatcttacttccactctgccatctcactggtatgtttgggggatcaaattagatagtagatgtaattgtgccttgaaaattgtgaagtatgatacagaaaagatattttcttctatttttatgcacaactgcctcacactaagttttcaacaaagggcttaaagggaggtctcatatttattttcatggcttgctatggtcgtgctttctcatgaacttggggaactactgtgggaagttgaaaacaaggtatttttaagtaagaaaaaataacttttttgaacacctttaacaggaatcccacaatgaaaacaataggtggtaagagaagtgagtaagaatcttgctgtacaatggagagaaaggaactaatgatcagcagctagcaaggaaggcaggaaggagaactggcaatggatggtcaggagttcatggtggatggtggaactgctcagagaaaacat

SEQ ID NO: 45167 - DNA, 3438 bp, Homo sapiens
acacagaactgtgtgagctctagagaaccttgtgggatttacattgtgacagtttgttaaacgctggaggctgtaatagcagataaagaactggagctataaaatgattgtttcacttcatctgttaggttaggcaacatgtggaggtcattgtttcaaacaattgaacaaaatttcaaagttttgtctttgttcattaaagaaaatgtatatgacaaatcaaaggtgtgttttatggattgtagatttagggtgatattaagagacttttaatttggagaattggttctttgcaaaataagaaggactggatataatacaaccagctggatatggtgcaggtgtgcttgattcatcttcaatgggcgtcagcaaagtagtggctaagaccttgaacttggagtcaagatgggccaccctttatttgctgtgaatgttggcaaagctatgtctcattttcttcatccatgagttgagaataataatggtaactcttccatggttctgaggattaattaacacaggtaatatatgtggtgcctagcacatggtaagtacatgttattaatatccatttctaaggctccttggtgacagtttcgaccatcctagatattttagtgaagctactgtatgtatatggatatttgtctctctggttgatttttctaacgttggttaaaaatgtatccagaagaagaaataaaaataacaatcatcctccagttttaaaagcagatgagttcttgagaagagggcaaatgagtctgtatatggagcacaggcccagccacttttacattttatttgtttattttaaaaaagaccacatttcgctttgttgcccaggctggagtgcagtggtgcaatcacagctgactgtaatcttgaactcctgggatcaagcagtcctctcaccttggcctcctgaattattgggattacaggcatgagccaacatgtctggctgacccagctactttagagatcaatagtgatctcccatctgctcccccacaggcataaccaacaatctcatgctgagaactgatgcttctctctgcctttgcacattgtaaacatggtgcatttgctgcattttcctatgatcttctgctaaactcaggccttttatttacagacaaacggtgcgacttttacacaggcatcatgggagtaagcccaagatattttctcacacttgattccaggcatgtggggtttggtttcttgatcaaatatctgtgtttgctctgtttacaagtatctgatgagcaaaaccaacagaggtgctccagacaggctggctgtgctgatcccttggaaaagaattaaacaaaacccagtctttgtgtgagtactgtcctagcgtgctgactgatctatttgctgattaaattcttaacctgtacctatttgatgcttacgtcagttttgcgtctttgaaccctaattttgcagtgctttagtgaccaatttatttttttcagtaaactgcataaatgactcatcagcaggaaatgtgaataaatagtcaacttaactgaaaatacaaataaacatatctttcttttgtgaggaggatttgcttaaaggggaaaaaaaccttgggaggatggactatagttcctaagagggcataatcttctgctttttctgtgggattctagcccccttttctgggcagggatggcatgagcccagctactaaggagatatctgtccacatgacatttattagtttagaagtggtagcctcttcatcaggaatttaagtaatttttaaagagttacctgatgagtgcatacatgtatgtgtacgtgcatgtgtacgcgtgtgtgtgtgtgtgtgtgtgtgtgtgtgtgtgttttctggaatccctgtaagtcatctttctggtcactcatgtagccagtgctatgacctcatataattggaactctaattctactgcctactaaacagtcaataatattgagcactattaaacatctcatgaaagaatagcattagaattagcacccagatggcatcataaccatatgggcacaataatgtggatataaagacattttcttgattaccatatccacaggacctttgattctggaattctacatgggattcctaatttccatgtaaatagttttgttagcatggcaatcacaggcagtcattacaagaacctgtcttgtatctcttaactgagatgaaagagaggcaaaacggaggtggtgatgaaagcattgcataaagagtgactttccatatttcatgtctggattaaatccaagtttcaaagttcaggaggccccctgagcatgctggatactttcactgatgactcatgagaggtgtacatatttttctccctttgttcaagcgtggtgaccaactccctctgccctcccattcttatctccttgtaagtgccctaggtgagtatttccccatccttcccatcctgtgatatgcctgggaacttgctgagacaccacactagaagaaagggtgaatctcccagggactttcacgccattatgactttttctatttttgtatggaaaatatgaacctctaatgttctgatactggaaatccagaagctgggcaagtaacaggtaaaattcaaggcaacatagtatccagccacaatgaaactgaaagaatatggataggcttgtacatggttttgttttaaagtagttctaaatactaaagttacaaatattttaaatttacacataaatacatagaattctaatgatggttacaatcatttaataataatacatcaaaaattagcaaaagaggagaatccaagacccttcctaaaaaccctaaataacttcaataagagctaaaatatcaggatacaatgtctaaaacaccagctacactcgattaagtttcagggaaaagccaaaatagactcttgtctctctgactctgggaattccaactcaggatgaccatgaagagatatggggacatttttaggagagccgtttcagcagatcttgtaggtgaatgggcagacacattagcaatctggtatgaaattcatcttggttatcagcctggagtatttccacgtattgatatcctctttactatctttccaattttattctatttagtatttattatatgcatagttttattctatttaatattttcttaatttttattagattcagatctctggttttaagacaatattattatattacttctaataatgatagtagttaatacttatttagtgtggactaccttctaggcacagttcaaattgccatacaattattttctctttaatcctcacaatacattaatgagatgggtgttactattatacacattttaccgatgtgaaaatgaaggcgcttagaggtgctataacttgcccaaggtcacacagctggtgtggggtg

SEQ ID NO: 45168 - DNA, 1520 bp, Homo sapiens
agtcaattctatgatctaaaacttacctactaactgtctaaattgttcaatgcactcataaatgaatggcgaaacccttgcttgactgggtacaaacatttcagacacatatcttgttgttttttggtgttattctctggttcctctatgagactcaatattttcaccagtaccttttcttccaccttgcctcttcctggctttggcagtttctagaagttggctggaccccctgcctggcagagctcctttattccatctcaacctcactgactcaccttccttcaagccgctcatgttaaactcccggttctgacatcagaagcctaagtgagatgtaaacccacctataaccgtctcattttcttcagctaaactgggtattgatttaggttcccttccacaaagccagagctgacaaagcatggcaagataaatggtacaggttcctacaacatttttaggagcagctcaggttctggggtgagcctgaaagctcagggaaatagttacattagctcctgccagcagcagctgctgctgctgtagaactatctaagtcagaggttgcgaaattcaaacatctatggggactagcagttaatgtcaatgaagagtatgctttgagagacacagagaacagagttcttatgctgtacagagggaatgcctattccttaattcgagcaaacgctcacatctgaaatctttttatataaaacatttcagtttttaaatgttggcaattaattcaacattaaaaagactcattgtattggctaaataaaacatatccaatggccgaaatcagtcctcaggctacctttgagacctctggtccagagggataccactgctattttcttccataatctcacgtgttctttattattggtgtcacatttgtttcattttttcttcctctcttctaaatggccttaaattcagattttttttcttcttcatttctcaataaaataggaaacattaaagatatttcttattaacaactgtcatttggaaagtttaaaaaataaaaagcaaatcttccttttataatgggacaacatagctatgggtacagactttggagcagaggagcagcggggttagaaggaaatttggaataagagccaggtggcctgctttctctcctgagagcctcaaatgaccttgcacaagttgctcaactccacatttatcctatcttcttctggaatgctcttcctgctttcctgtttaaaggggcccttgtcataccgaacgaacccaggcctagggcctcttgcatccaggtttggagaaagtttaagttctccggcacactgaagagcagtcccttgtggtggacgtgggtgggttttacgttgagcatctgtgccccttgcttaggtcagtgaagccatgattttcctttgggaaatgacctttccttctttggatgcagcacaggtatcaatgaatgggtcctgccctcccctggccttggagctgtgcttgggctatcaagagaggatggt

SEQ ID NO: 45169 - DNA, 1564 bp, Homo sapiens
ttcaaaagtagagaatgacacaggattccacaagttggtttcccaattcctgactacctttacatagaagccagaagaaatctactctaattagctcctcttgcatctaaatcttctctcagtgagagagaagagctaggaaggacttaaagtaaacagctaaagggaagtccttaactttctctgtctttttttctcaggagtaaatgtattttgggcattgaacaaagaacaacgttgatacatccttcatctttaggaacttgtaatcttaagcagacagtactaacataggttgcgatttctgggctgaaaattttagaagcagctgtgcattaaattttattttatttgcttgaagtagttcctcaaaaagtctactctttcaactagatttgtatttaacttaaagctaggcttcacttaaaattacctcttttaccttgctgtgcaggcacagatagaaatgcaatttcactagttctgcaggtaatcaaccattatctacaagatgatactcccatggactgtgcacacctcagctcctctacctacaaagcacacctgctgaaagacttccaatccagcacatgtaggcacttcataaacatttgttgaatgcgaccatttaaaaaataagtctgattctcttttgaaaaagggggagaaggaagcataacttccagctctgtgtgtcaaaggaacttttaagaaattctattagctaaatcaatagtggtgacttcctgtcagagcaggaggtaagagacatttcccagcagtgacaacatatttggtttggtcagatttttttctacagtgtcacaatgaagtaatccgtaaacaatgcatcacatttccacctcaaccggaacaatattcgagctctcaggtgttagaaaaagcctctgtcagtgacaagttaatcagtttaagatagttcaaaagtgtccttcgagtgcttagtttcttcaagtgctttaaagtgctttagaaacaagttacagttggtggaaagtggtttcctttttctccttaatccttagccatcaactgtgaaactcaaggcctcaacaggccatttgttttaagatcgtgatttcagattttagtttttaaaccaaattctatatttctatgatcgtctatgttaggtcacttcttttcatgcctcttctaaaaaaacatgaacgtggggctctcagacaggctgtgctctcgtgaatggtcctgccaagcctggaccatgtggtatgtgatctcattcttattcatgttttgtgatcctcgctcactatcaaagtcaaaattcctggtgctatacattctggctcatttcttatcttcttatgaaagaaatagagcatatatatatttgcttcctcaagtctcctggacatttcaactcttttcaaagaacagctactatagtgtgagttttatgcaggaaatgcctagtggatgtgctccgcatctttgatcatcatgtcttcctcaatttactgtgggaagaggcatgtttatttccacattttctgcttatttcttactcgacctgcactaa

SEQ ID NO: 45170 - DNA, 592 bp, Homo sapiens
ccctaggtattgcctaaaatcaagcagtagatataactttccacaagaaaagccccaaagaggctaattagatagaaacatggaatactaggaagagtaaaatgggatatgtggaattttttgaagattttgagtcaattatgcaaccataagacaggagccatgggaaaaagtggagaaagaaacatagttgtatgcaagaagttgtatgcagtgttattgtaacaccaagggagtgttagaataaccacaggtgagtggagtggtcataattagtcactgctcatttgtgtcatcagtcatcccagttgttttgacacaacgtaacctttggtcatagctttctttcactcttctggttttcacatatgactttgtttagagaactggcctgcacactcaggccactaggctcttcagggacatcagtagagatgctcccagggccaccaaaaggcaagatttaattcatcattgcggaagagtgaatgaaattcactttcatcttacgggtgagggaaaaagaaaggtgcctaggaattatactggtggggctcctgggtggctcccaggaaccttggctaggtaattt

SEQ ID NO: 45171 - DNA, 677 bp, Homo sapiens
tcatgtgtgttcatctgtcaagtttcaggtgggtggccctaaatgaactgactccctcctgaggcccaatcaaagttaggtctcccttctaattctccatcaaagcactccttgcatagcatttgccaccacttaaaattaaactttaatttttgtgactattttataacatctatcttctaaccaagctgtgagtgccatgaaagcgagaattagtctgttaattcatcaccacatcgccagtgcctagcatagccccagcacaaaagagcttggtgaatatttgttgagtaaataagtggttggaaggcacacacccgagctgtctttgtacaacacaaatctgtttgtctttctcctgcctaaattccttctttagttactcactttttaacagtaaagaaaaacatgttttagcctgattaaaaagagctaccacaatttggctttttgtctaagctcctcaggtcccttcagacctccaagcctttgcatatgctgtaccctcagagaaatgccctgcctgctgtttctgcccaagtgggtaagcaccttcccttccatcaccttcttggtgaagcccagactctccaagaaagggctagttggttggttcttaatgtttccacagtgctttgtcagtatttctgtgagagtagaagggtggcatactttct

SEQ ID NO: 45172 - DNA, 582 bp, Homo sapiens
cgcttcataaatgacaatgaaggaaactgaacagcagactgattgatggaaggtcacccaacagatcattacagtgataagagaaaactgatggtatgttagagaagtagaatgttctgtcactgcagattgaccctgatctacagctagggaagaactgtatgggattccacagacaatgagtatcaatggcacaaactcattcttgaatttttgccagttcaagaagagactgagtcatcgaatgctctaaatgtcacttcacctcatgttctgtcaacacagagggtaactcagagtggccagttccactcaaccatccaagaaaacaaaacaagaaaagcagacattaaaagagggcagtgttctgcacttcacaggtctgtgaccttggccaaattacttaacctctgtaagccttaatttcttcttcctgtgtaacatggagatgatggtatctacttacaggcaagagttgagataatatatgcaaaattcttggcatggtagaatattaattgaactatgaagatgattgtatccactattcccttttcccttcttggctatttcatttccatt

SEQ ID NO: 45173 - DNA, 1265 bp, Homo sapiens
tttccaaatatttctcctcaacatctctttccatcaaactaaaatgtcaatttttttttaaagctctgattaaaggataaacagtttcataatgggatttgaaagcctgggcaatcatatcattaaaaaaaaattggctgccaagcagcttgctcaaatgacaccaggcacattgcctagtgaactttaggtgaataggcgatggagtctgtctgggcctgatttgcagagacttcttaaagaagggaatctgctgcaggcatgcaaactacagcaagactgagctgtgcatggctagttttagggaaggctccagcttggggagcttggaaggtggtctttatcagcctgccaagatatctgtgtggaatcacgcccaccatttcttctcccaaagagacagatgaacagactccactatgaccaatgcaatatggtgaacagatgtttgcctcacacagctgaagtgagctggctttccagagatttaaaggaaggagaaggtgtcttgggaacagtgttcccaatattatgatcccaatcataactcattgctaccactccaggataggggggcaggggcggaatatagttctgtgtcatccaccagtggctcctccgggtcaaaatccagatccaagagaatgtaattcatgaagcgatatttactagatagcttcacctgggctgactgtgacatcactagcatgtttaacccttcatttacatttacttatccacactctaccctgactcatatcctttgtttccataataaacttttagcaactattgacattcatctttccctgagctcacctttttcctgaattgaccccaacaacctgtgagacggccaaaggcttttgcctagtctttgagtcagctgaatacacagatgcctgaacctatgccagtgcatctttatcatatttgtagtccacctgctctttgtttatcagctgtctgtacacacataagataactctgcattctccttacttgagttgcatcagtcagtagtgtcttttgttactgcctagggtgagcaaagaacattacctatagtgaatgaggaacacctttgttcatgccacaaaatccattttgtcttttttaagaatgcacctcactttaagtaaacttaatatatgaaaatttagattccagtaagaaaattcaagtttcacatagcttttcaggacctcacttggctacacagagcagtgattctcaaggaggttgattacacctcctcagagatg

SEQ ID NO: 45174 - DNA, 614 bp, Homo sapiens
agcttagttttaagaggcaaaagaactaaaaacaagactgtgacaatataaacaaagattaaagatgatgtctgcttatgtaaatgtctccagcaaaagaaactacagacctgggttctaatgtggttaaataactgctgctcatcttgacttcatcttttatatcatgctttttctgaataaaactcttgacaaaaaaaatcaataggttgggtgagatcatcaaagcaaaattattttacaagtcaagcttccctatcagctggctctcccaaggcagattacagcatttgtctcaatgaatgtcaaattaaacagttcctgtgtatttctggaggcaaagtctgaaagtgcaaaagctaacatgctaggaaacttttttttaaggattgagaaacattttccccagcttacaaagacacagttttgactatagcttttttttttttttttttttttttgctcccctaaaactgtctgctaaagggaaggggaagactaggtttaaaaaaaaaactttatgaaataaagggttcttacttttctgtttagacatatgatcaaatgaacagatcattaattgaataaattgtctagatattcttgtcacattc

SEQ ID NO: 45175 - DNA, 1234 bp, Homo sapiens
tgtgttttcactgcaatgtagactaaattaattgccaaagatgaaaagttacttgctatagggtcctccacttcctccataatcataggactgctgtgactgatcatcgatgctgtaacttgtctggtagaaatccgtgtttaagttttcaaagcctgacattgcaaataatctgtaataaaagagaaatggcaaatattccttatgcccaaggttctactgaattcgttcctggcagtctgcttaagcaaatagaaacacaacaaatattttttcagtaattcggagaggggatgggggcggaaagtacgcagcatttgaacgacggtagcggagagagagtaagaaaatgtatattcttttaagttgcggcccagtaagacaactccaccttaaagagctgatatgccttccattaggggcgaggtcgtgggagttgtggttccataagcggtctaaaatatcaataacaacaaagatgatttttcaccttaggactgggctttacagctgacaaggcgactgcttccttgcaaaataaggcctgcggcctgccaggaaaaagtgcagaatctggaaggtcgcgcctgaggtgcaggggaccgcgtcagggcaagggcttgaatgagagcgagggtctgagcgaaaggaccagggcgcggcgccgaaagacggcaacaagcccatttgcacgggtgtggagagaagctgaacactgtgccacgggcctgggtcactcaccaaactctgaggctgcgctggcggcaaaggcagtagcttcactaatcccaaacaacccccaaactctgtttcagaccctgaaccagccccgttgctacgtgtcacagggccaaagaacggcttccggggcacgcccgctcgcgcaggcgtgttagcaggttgggcaccggtgggcgggaggaggagacacgagtatggagcttgcgcagtatctacccaacctgcggctggcccgtgccaaagaggaaagtgcttccggcagcctggttaggggtggaaccaggaaagcgcaggcgtagcaattgctgcttactcgtaggtaggaggaggagtttctcagacctaggtgatggaggaagactgggaggcgctaaaatgagacagacggagtcccctctcctgtccacaaactacaatgcctacaatgcctcggtgtcagcatttactgtgattcaagcactgtgctaaagtgtttgtatgtattatttaatct

SEQ ID NO: 45176 - DNA, 1600 bp, Homo sapiens
atgttcactatcttgcttgtggtttgtggtagcatacgttaaatatgcacagctgcttttatataccagttatacttcaatattaaaaatattccattgaggaatttttagaatctattaccctctatatattttttcatctgaattggagaagctggagtctctcagaacaacttaccctgcttctttttactccttaatccaaaagacatctctagtaaattagagagcagattttttaaaaagtggagtagtcaatttctccaagttatttttattctcaatcttatacctgagatataagagacaccacagaagagataccacagaagagaccacatggtgattctttgtctgtttgggtgtggtatggaccaggtcacctcacaggattcctcagccttaactgtgctgtttctgcctctccaagacagaatggctaagaagaagacattaattacaggttaaaaatgacaagccagtgttataacaaataactgaagcaaaagtctcactttttttttgaagctctattaaaatcaaagtttaatcacgaattgtgaaatagaacgcaggcagttaggagctgctaaaatattaacacttctattgaaacagaaactcaggcattttattattttcatgaccacctctgagatttcataattaagtctttcagtttgatttatttagactctaagcaaactttcaaagtgagtttgagggactttgtacttggaacatgaatgcattgcatttcctgaggcaatttggaactggggtttcatcatttcaatgccctggctcagaagcaggtattctgagaaacttctcttgagtatcctaattcattaactgtaagaaggacctcagacattttccttatcagggtgaatattcagaagggaaggagggagggaaagaaattacatttaggagtgaaactgtatttgtcacagcatattaatttatctagttctgttctctttggcgttacaaacagacatttcttacctcccatctaagcctttagctggttctaaatattttctcattgatcagaatgagtggaaaattacatttcaccccgctgctcccaaaacacattaaatatatataatattatatatatatatatatattcctgtcactctctaagaggtagtttggcattgaggagcactgaatgtcacataaccctgagatcctgagattgaacatgtggcagattcccaggataatctatgtttgaacatactatgtaaaatttaaccaattttaagaaatgggattggtgaattaaggaagaaaatgaaacctaaatgaaatactgactcaaaggtggcagttataacacaacaatcttttttactggcagaaggagggagagagggattgtgaatcacatcgaacatatacctaattatttttaatatgagagagagagaagtggattggggggagcaagagacaggtgagaggggaaagagagaaatagggacgagaaagagcattgctagataaaagtagagtatctctatttaaaaatatggacgggaaagagcattgctagataaaagtagagtatctctatttaaaa

SEQ ID NO: 45177 - DNA, 2093 bp, Homo sapiens
gtataggactttagtggtcccctcctcacccaacccattcctgggagcaactggttaaaggcattttgttcctgaccagctgccttacccattatcttcaagttcctggaatttgtgatacaaagaacaatgtacagacaatcaatagtttatgttattttaatataaattcttggtaaacaacttaggaagtgcttcttattctcctttaaaaacccactttcgacttctgctcatcagaatgtatactcagggcaccttcactcccaggatgcagccctcaaacttggctcgaatgaactctctttttatattgattttgcctcagtttcttcatttaggtcacaactgtgctaagcactttacacaagttacctcatttggatcctcacaacaactctatgagtcggtactattattttccccattttacagattagcaaactaaggcacaaagagagtaagcaacctgcacgatgtcccacagctgtttaataaggagcagcggatggggcagcagaaccatcatgctgagtaaaccaggatgactgcccaatggcctcccctcgcttttaaggggtcagtgatgaaccggaaagctccacacgtcggtcatctgcaactccacggagctcacgagctgggattcccggaggctcttcctaaaaggaaagcctcttctttcagctggggcaggtgtgaacgtgatgccaagcacggccccttttcccgctccctgtaaagggagtcttcgaggaaatccctctcgacccacacatccctgaagcaaagcccgcagctggaaagagacactggcggtgccagcttccgcgtggatgaaggagaggagagaggggcaagcagcggaggcagcgcgggatacggaaggtggaagcggggcggtacctttcggagaaagctggcgaccacctgctcgaaggggtacttgtacacctggtgcacatccaccgagacccccatccccgcgcgccgcgggccccgcgcaccggccacgcctccgcgagctcagagctgcccagggctccgcagaggcccggaggcgcccacactcggacagccacatgggcgtggcctttttcctccgcttttcaaactttcgaaactttattggccactcggagaaacgcgcagtcggccacgcccacgcccctactgccagagtccggggcctggggttacagagcgcgggaggcgctggagcgctcccagagcacccggggccccgcggtctccacgctggcggcgccagagcggccctggtgccctcccgcggccgcgcctgccgagaaaagcttctctgcctgggagccatcacgccccgccccaggaaacctggaccttgggcttatgcgtttatggtatcaccgcctggagtcacagaataagccgtggttggcagcacgggaaaaaagtattaataaggaaggcctggtgtgacaaaggccagcattactcatgccaccaggcagctgcctctgaggcttgggtttgggcctcgtgtaaggtaaagattgcctcgggaataagaaccgcgttttagtgcaccaaaacctgcaggtaagttcctttgctcgctaaggttaaacaccacggagcaaggaactagaggatacaaaagagttgcgagtattattatttactgcaaccaacagatgttaggagaaccagcacgttaatccgtgtattcagcacggttctgaggcctcctatgccccagcgctgtagtgggcactgcggattccgcagggaggaaacaccagctctgctgatgagccggctgatttcacacccaatcaacaagctgggaaaataaaaacaataatcggttaaagtgacacgggcgcggacatgattttagtgagggtgattatggagggtctctgaggtgatgacttttacgattttgccatctcgctcgcccctgccatacgcagtcacactggtctggcaaaaccctagccttgtgtaaatctaggtctcctctgactgtctctacccaagccaccagaaggggctgaaggaaaatacacacccactgtgcatcttttaagttcataaccactaaccctatg

SEQ ID NO: 45178 - DNA, 1216 bp, Homo sapiens
gataaggagaaaatggctaacctttactgagcacttactcctgtcacactctttggagcatttacaagcatcttctcagtgtgtgctcacaataatcctatggagcaagtgctattattaccattccggtctcacagatgagaaaaccaagcacagcatgtttaagtaatttgctgtaggtcacactcttatttaataagatggcaccagccatctgactccagagtgtatgttcataactaccataagttagaaatgatgccagaaaaagataaactatagctaaaacagaaagaattcagatattgtcaattaatatctatatcttttgagcactttctatggaccagacattgttttaccaacatgtattaggaaatttattccttatgacaagcctgggaagtacttgttactgattgcatttttatggatggggcctagagcttttgaacacaaagggtcacagagctgttactggtgaagctaagtttctaaagcatgtctccagattccaagtcgcaagctttctccctaggaatgcaataagaattccaaacacaaatgagtcatcctcatcactcagcaaatattttttaagcacctacttgtgtcagacacaaattaatgacacagacatggttcctgcaccatgggatgtagattgtgtgaaagagagacacaatttataagaacaagtgagtaaataatgaatatcatataactaatacataattaacaccatcacatggcaccctaaaaaatgtctaattgctttgacagatgttatttacagtcagttatagaaaatcattctaattcttttttaataagggaaaaaaatttgtttctcctgtatttcacattatcctggaaggcctactcataaaaagagacatcttgcactaatcagagcacttggggaattactgaattttgcaactttctcacttgtgtgacaaaaaaaaaacaagattgtggttacccaattgtctgagcaaactgtcagcttttgcacagacttgccctgagtttaataagaattaaggttgcatcctgctcctggttttgaatcaaaacatttactgatttcatcagaaaggaaacagtgaaagaaagggagaaagacaggttaggagtgaaatgatttatcacttacttttctttagtaaggcacagtatctgtcatggattaacgtctaattacagcagtttc

SEQ ID NO: 45179 - DNA, 3226 bp, Homo sapiens
atacctttgtaattttacatgaaatgtattatcgataaatcaaaaaatagaaatataggcataatctgaggatatgaaaagactacagtggataacaggcaggaggagagcttggaggccactgcttttccttttttgaaaaagcttctctgtgctttgatttttcacgtatgtgtatatacgtgacactagttttttaatttaaacagattgagcaaaaagatcactaaagtccctcttatctctaaattcagagattgactatgattttcaaagagcaatattttctaggtgtccgacttatccttgttttcatagcttgaccatttttacttttgaccttcccaggaaatccttatgaagatttaaaataaacacaatcactttggtatgtttataatggagcaggttctgactccttggatactacagaaaacgggaaaggtgaaaatatgaactttgtaaatacttggccttagggactggcttatattttacctcttacaatcttttcccagaagcaattcagtaaactgaaggaaagatcataaagttaacaactgcaacaacaaaagcgtggtaagtaggcagcgccctggcagtgaaagcgttaacagggctgggtaaggcgatcccttgaaatgagtaagactgagtggttaaagttttcaaagcggttggcagcagcggcgcttggaggaaaggaagccggttggagggcgcagcgcacccctgctgcgcggaggagggggctgagctgaactcagcagaagttacatgcacaaggttagtggcccccacacgcctccccagcccgctgccgcgctgacatctttggagaggaggcttaggaaggcgaggcgccatcgctcattctcggtcgtgtctgtcctgcttactagtcgctagtggggccactggccttctcgccaaacctctgggctcggtgcttaccgaagccctggcacttgtgagggacagctgacttcttccagacttttctaaactggaggcttcttttcatacatccaaaaggaaacttgtttctggaacaagtactgttttcagagtacacacacacacgacccctacctgtatatgctgccccagtacggtttttacaggtcgtgaccacaatccagaattcctatctgcttcatttgaaattgagaacaatgtcaaagtaactaaacaggctgcactactttaccttgtgggaggaacattgtctctgagcctaaggtaatcgggatgaggagagaaaaaaaaaaaaagatgaaaaaagaaaagaaacaaagcttccaagcaccctgacctgtggttaaggcaaaacaatttttggaaatgggtttctagtggaaatttttcttgtacattgctagaatcatgtgggaaggtatattgtgaaggaaataattctacatctgcatgagattcagataaacttacccacctaaactaatctgcatgtggtgcagataatagatacatttagatttaggggaaggaggaggaggagatagcttcacagaaattgcgttcggagggggctttgttgtaagaattgagactgtccaggagctttccccgggcagggggtaaaggacctcttcccgccctggctggtagagaggggttggggggccacttcagcaggccagtttatctccctgctttcctgtccacataggcaataagcagtcagtcttgtgctgaatgttccctctgatcctcacagcaagcacgagttgagtcttatacctgctagcattgaatcagaatgagtcatttgaaacttgggtgccggaacaaagtacttgcaaactgccttatgagacactgcctcaatgtaggtgggatatacctctcggagcagtcacatttttttttctctcctctccctccttcaagcaggcaaaaattctgacgttctcaagagaccagctctgcccccgtggctcaactgaccctaccatgtggacgctgctcctccaggtgggaactggagttttgaaataaaatggatgatttgacgttacttgatcttctggagtgccctgtgtgctttgagaagctcgatgtcacagccaaagtcctcccttgccagcacaccttctgcaaaccatgtctacagagggttttcaaggcccacaaagagctgcggtgccccgaatgcaggacgcctgtgttttccaacattgaggcgctgccggccaacctgctgctcgtgcgccttctggatggagtgcgctcagggcagagctccgggagagggggctccttccgcaggcctggcacgatgaccttgcaggatggcaggaaaagcaggaccaaccccagacgtctgcaggccagtcctttccggctagtgcctaatgtcagaatccacatggatggggtaagagagatcttatttgctaatatcatgtccacatagaggttggatttgtgtatacaaggagctagagattatcttcttttagttacattccagagtgctgctgttgatttcccagtgataagtttctgtgggcagtgatcattttactcaaatacaatgaaaacctgagcctatctaatccatctaagaattctctttagaactattaaagcttcctaggttctcctttcctctagtccagaaagtagtagaacaaggaaagccttttagattatatttttggtgtttcacttctgctgttctgaggccaaactagtgcctgggaaatgcacggagggtggggagaaacaaaagagagaaaacaaatccaactgcttgttgcttttgagatctctcagaaatttccaaatgtcaggttttgtttgaattttacccaaatccatcttcccacccctagtcataaagtgctattatggcaatactcattcataatctgttccaagctatcaagatacttgacgcgggagatagtgcaggagggaagcatctatgtgggtggactgattgatagcaaaggctgggctgtgaagtgcttcagctgtgtataggagctctgcagatgtgtctcattttgcaaaatgaatgaaatacagagaagatacacagcaggggctgcaattaaaaaaccaaacagacccagttacgcctcacaggagattaatgcttttcatgtttggataatgggaatcgctctgtccagcgctgaaagcacaccccgaggactttatctgacctggctatgaaccttgttgtgggataatgtgt

SEQ ID NO: 45180 - DNA, 3725 bp, Homo sapiens
atgaggcttaaaggaagtgttcatcaaagcattttgaatttcagattttagatttttcaatttgggatgctcaactagtatgtattctgcaaatattccaaaatccaaaaaaaatctgaaatctgaaactcttctggtcccaagggatactcaacctggacaactttactcaatttcttttcccttttttttttttttttttaaattatgctttagagacagggtctcattccgtcacagtgcagtgcagtgcagtggcccaattatagcttgctgcagcctcgaactcctgggctcaagcaatcctgcctcagcttcctgagcagctacaactacaggcacacaccacacctgactctcccttcctttctccttctatttattcatgcttgtactttagaccagcctttcacatggtgaattctgtaatgggtgtgccacacagtgccagggtcaaacaaacctgagattaaagtaaaactaaacattttccctttgctgcaggactttttgcacgttttaccatgctgatgaattgtaaatttctaagtgagagcttaataagaaacatttcccacatttctatggcactgacacccctttcttctcccttttcttgtattagcctcttagtaatattaattgtccatggaacaaaatttgagaaacgctgtctcagagttcacatgctcagtcataatgcaaaagatatttttaggaaactgttggaaactcactattgccaccctctgcagtatttatttagttcctaccagttttcagctataggcactatggtaacctgcacagcaaagcaaagattctcacctcctcagtgcagaaaccagtcaagactaattggtaaaccaactagtcagtatacctgtatacaaagatacatatatagagacatacatgtatcaaaattagggatattgatattgattttaaggtattcattataagatgtattgtctatttagttatagttcttagagggaaagagaaacactactatgttacatgctcactgtaggatgcatccaattttagaaatgttaagatgtgaaaaaagaagtgtcttaccaaagagtacatactgtcttattccacttatgtaaaattgtagaaaagacaaaaccataaactatagtgattttttgcataatgaaaatgttttatgcaatggtatatagttttacgaaaacatcaaagtagacacttaaactgggtacatttttgtatgtaaattataaccccataaacttgattaagacaaagaattcttagactcaagaaatgatggtttatgaaaatatcaggtggcaaggcaattcagtttgaacaaaatgaagcttgattgataaaaagaaacttcctagaaaaacaaaaagatgttttaaaagtcaggaagtgtatggtcaagggaagaaaaggcagggtctgttctgggcatgtggacctagaaaaggcaggatagggcagggatatcttgaatgagaattgaagctgaaagagaagggaaggaaacagatagaggagaggcagagtgactagatacttgccttcctatcagggtgactagataccaccaggaagacgcatgtcaagcattctctgtaataaagtctctccagcagccctcatgccagacttgttgcctgccattgtgaggactatcagctgtatctacagcaacttcttggattcagtgcagccaaacaagaagttatctctactccaagcaggtgaccgagcttactgggtaactgaggagcagtctccatgtccttggcagacaaagccagtcttttccattgaaatggtcaggttacctgaaacccctagcacacatgaacaccagcaagaacatccaaagcaagtgatataacatgagcagggaaagataaatctgttcaccatgagctgcttcctgcatctggggcctgtgccagtccccagggtcacactgccccagatccccagctcagaagccagagcattcaacaaactgttcctaagtgcctgctatgtaccaggctctgtcttgaaagctcacaccagggacactcatgagctcagactccaggactcaaatagtagctgagttcatctcagatctctgtcatttcttcgatcttttttccgagtacaaacaaaacaggcaactcatcttatctctgaatactgtgctcagagcacccagcccacagcttggcccatattaggaattttttttaatggaagagtaaataaataaacacaatcatgcctgtggtagacctcatgggatcatgaaataactcctcattatgcagaaatgaaccctttatgaattgagccattacagagctatttgagaaacaagtggcacactatattaggcataaagtcatgtggtgactgaaacattcttgctgtgaatcaccttattaaatacctttttgggtgatgaacatcattctcgggaaaatacagtgggccagcttcaagatctcttagctcatgagtcgctaaccctaagaagataggcagtgccactctgcatatgactaaactcttacatcatacaccacaaatttcatgtgctctttgatcttgagagaaacacttcatcttaactgacacttagtcatagggataccagtgacagaaaggaagaggctctgaaagaatttgccactgagtttatgagttgaactgacctggcctccaatatgaagggaagacagtgtttccagtagaaacatggcccctgtacttgtgctgccaaagccctaattttatcagttttttcaacaattatattttttattgtggtaaaatacacataacataaaatctaccatgttagcctttgctaagtgttcagttcagcagcattaagtacattgatcttgttatgcaagtgtcaccactatccatcttcagaactttttcatcaccccatactgaaactctgtacccattgaacaataactttccattctgtcctctcccatatatatatatatatatttaaaataaaattatatatatttaaattatttctgaataataggaataggtatttagtattatttttaaaatatgtattccaattttctgctgcttctgaccttagacatctgatgatacaagtaaacaagacaatgtttgcttaatgtttacaagacaatgctgtccattcatgagtactgcctgtgtgtttctgggcaagttacttagtgactctgatcattgttactatgaaatagaaatagtaaggctcacctcatatggttattgggaggatttaatgagatgatgcctataaagtgcttagcacagggcctggcaccaaataagctcccagtatgattagctatctccttgtactcctccaggtaggtttctcttttcacatgctatcatgcccaccacagttggactgctatttccctgtgctatagacctggggataataaaaatcatggcatcacttggaggatatatcaagataattcttataaagctcatagcacagggcctgactcatagtaagctcagtggcaatcaatgtcaggcattgttattattaatatttcccaggtctcacttgttcaacagacacatataagatgtctttgatgggtaaagtccctttgcttgggctccaaaagtgagagagacaggatccatgtcctcaatagcttgtggtcttttatgtaaaccacatactactt

SEQ ID NO: 45181 - DNA, 641 bp, Homo sapiens
agctctgacctatttgaggaaagagacttcattaaaatgagaagcattttatcagaaaaagctactccctaaaagagtgaaggatgagtctgaacgagccaaccaaagagttgggcaagagtatttgaggcaaagggaacagtagcttgtgcagaagcgggaggagggaggtggagctgttagaagccatgacctcactcctgtgcagaaagggtaaggagacacgggggaggcgtgagggaggcaaggacacattaggttctttacacaataggaaacctctaggaagatgaaaccaggagcagtctgatcaatttatattttctaaagatcaaagatcattctggctgccttggtgagaaggattgggtgaggacaaagtggaaatgggaaaacctacccagagaacatggcaaagagggatgacagtggcagcagagacagagtgaaatgactaatttgagatagattctggagactcaatttcttcactgatgtaggtgaaatcaataacacctacatcctggggttgtgagaataaagggagacaaacaatgaatataattagtttgttacaatgcttgacatgctgtaaatactcaataaatgttcgctattgttgtttttattattttcaggcc

SEQ ID NO: 45182 - DNA, 3618 bp, Homo sapiens
aaggaatttcatgggggtaggagcacctttggtcatggtaggaatcatgggggccaccttagagtctgtgttccaaagatggataggaaaggaaggaaaagaagagagcaagaagaaaagaaaaatggaggagaagaatgtatctatgtatatatagcatttattaaccatatattatgagcaaggtactgtgccagttatcttcacatgcattttattatgtaatctttctccaaaccccatgtggtaggtgttaactattgtaacgacttacaaaagaaaactagaattcagagacgtgaagcaagtttcctgaggtcgtacagtgcaaaaagtaaaactaggagtcacacttgtttctgctacactctatagcccaagctttacctactaccctgtagtttaagagaggtgggagaaggaggagaaaaggaaagagatggagaaatgagagataacagagcttccaaacatatgcaaagttgttcctaaaagagatgacaatcaataaggaaatctgtaggtctacaatatattgaatcggttttcccaagaaccacccaattaaaaaaatagaatctagaactgaagcctgtgggatcacagatgagtctcatgtgtctgaactcttttctggcccacctgagtttcagaacctggaaccaaacactacagccaagctatgtccagaaccttggagacacctggctcatccaggcagtgccctacacgcatgttctgccaagcttctgtgggagaacatctgggcccaggcagccaggccagggcctgagtttgtttttcatggctcgtttgcaatgtcctgttctatttctggacactccgtccttcccaactgacactggagctcagtttcccaatagccagtttaacaaaatggctccaaaagtgccactcagcactagtcattggaaaccagaattttccatcatttactctaagaaggctggctgaacatggcacatccctgactcctgtcttagttggccaagtctctcatcttagaggggcagctgcagacatcacaggaagcctcctcatgcagacacaaggtgactcacagcagtgagaggaaagaaaggtatttggatatcagatcccccttccaccaagtgagggaaggcaggtgtgctagtcctagctcccaccccagctgtctgcactctttgacttgataacagccccagctggttccctctgtgcacttctgtccatctttccagagtgggagatgagcaagaatatctgtgatcttggtggttcacagtcagccctgctagagtctaaccaagcaatgaaccgtgttgagttcaaacttaacacaggaccactggacccttggcagagagccaaaggaaacagaagatgttgaatcattcccctactggggcagtgcctagctgtggagctgtagggctgcagacaaatccctgctctgtgcctcacatcccttatctgtaaactggagataattagaggccctgcctcgtggattgttgtaaggcttagatgagatagtacattaagacatggtatcaattgaccaataaatgttacttacagtaggcactcaataagagatcaatggtgttgcctcaaatacatcattatacagcttgcataagataatgacaggtcacatacacaccagtgaagaaccttcttttgtaacgaggtgggtttttagtaaatatttgtggaacattaatcgacttagaatattgaacaactacaatagagaagccacttcacataatgctacataaagaggaataattaacaaatgcaggatattgcaggggaaagaggccaggattcgccctcagaccccaccacttacatatcagctgtgtgaccttaggcaggttagttcacctccctgagcttccagttcttcacctgtaaaatggttgtaatacctgcctcatcagctggttgtaaggattgagtgagatactgtatctaaatgcactttagcccagttctggacccacaacaaactcaataaatgatgacttttattagctattttgcagactaatggaattaagaaggaaaaaaaaaaaaaggtggggggcgggttttggaaacgcacttgcctaaaggctaaaacactgactgcttggaaaccaccacgtagtttcactccctaaattgaaagaaagaatgcctcattcaagtgcctgattaggaatttgaataatctagttctaactagaaaagtcaagaaaaacggaaggtattagtcattgactgatagaatatctgagctggatagaatcctagaccatattgaccagaagtgacttagccactgtcacatagttagcccaggcaagactaaaacatgatacaaaatcttgcatgcctaagccatcgattaatagctgggcttactagccagttatccccatggttctcagttaaaggtcatttgacaccatatagaggtcacccactgtgtgggcaagtcctgttgtttcggttagagcctgtataataaggcatgttggaagaggaagtccttctaagacttactcataaagtacccccttcccagagtctggctcatgcccttatttgtctatacacactctaggcaaagtaagaaattgttgcagtgaaatgcactcatgtgctcatgccagctcatgacctcagccagtccacaccttcatctcatttacagatgggaaaactgaggcttggagaaggttgcctcggcagaggccaagcaaggggaaactggggcaagagcaatatcttctgattcctagtccagggctctttttcttaggcccgactacctcctgcacatgctaaaacaaaagacaagacaaggtaagctattgtcgcttatcatctacactttgttctgacatatatggttactatttttccacagaccatgaggaagggaactaacagtcactgaacaccaatcatatactattgatgccttgcttacattaattctcatcacatacagtaataaaagctagtacctattgagtacttactgtatgccaggcacagttctaggggctttacatatatctgtacaaggtacccagccaaggagatactctgtaggctgaattcagcctctgcttaccaagctctgaaatgggaccacattagccccatggtaagagtgccttttcatgtaactcctgtgcccaaaaagatgccctttccaaatgtacacaaagacaggtatggacatgtggtgggggtcttacagtatccccatatggctggtcctattactatcagcttgctgagatgtcacagctagtttgtggtagaggcaggacttgaacccaggatttggcccttagctcacatttagccttcccaagaagcagcttgagataggctctaatgctacatacacatatacctcaagaacagacattctgactgccttgttccctaacgtagctcctgtatctagaacagttttggcacacacaggcactcagtaaattttgtggactgattgacccctgtttcacagatgcagaaactatgtgtcaaagaagttaaatgacttgcttaaggtcacacagatagaaagtttagatgggatttgaa

SEQ ID NO: 45183 - DNA, 2352 bp, Homo sapiens
aagcccttggtacattttaagccgaggatacctttcctacctcccaaacctaagattataagagtggccaccagagccctcaccctggtctatttccttctacaacactggccagcacattcatagaacctggttgcagagataagtcaaatcactgcaaacttgggatggccaacgccccatcctagcttctctagattcctttgcagggatgtccacagggtgcttttatatatgtcttcatgccctcctgcttcgtctactcttcatgccccatctaagtgtttttgaaaaatgaaatacttaagttagaaaaccagacttagcaagttgtacttccaaaagcagcaatcatttcagtaaataaacattttctgattgagaacattaattcagggtttacctcattttccttcctggttttgttttctacaatatttaggaggcaggagttagttaggagggtggttttaaggaaaaaaaaaaaaagaaaaaaaacacctctaaattcattagttgaattccaccagactgtgtgaacaatctcataataatcctacatcaatacgagagaagttgtaactagttcacttagggtaattatagggcaggtttctgccaggttttaaagatagactttgaaatcttcctttttttcatttgcctcctgctgtgtgtggggagaggccctggctcctgggatatctgccagagctaaatgggggccaactggagaaacaggcaccaagattgggttcctgttttcctgtgctcatacttctgggaacacagatatcctaccaaatggtcacctgtgaaaaactcagggcctagaatctaaattctgttggaaaagaactgattaaagtcctggccctaagtaagattatggcaaggtttatagcacaaaatttctgattttgcgctagaacaatagttcccaaagtgtggtccccagaccagcaggattaccatcacctgggggaactggctagaaacacaaattcttgggccccaccccagacctactacagaagaaactcttggggtagggcccagcaatttattgcaacaagccctccaagtgattccaatgcaccctaaaaatctgagaatcagtgtcaagggacatgatgttaaacagcctttccaggagataagagttacttttaaagagggatttgttcaaacaaagcatatctacaaatatccaaacaagacctttggaattagctagaactaggctctgccactcaccagccatggggcctcagataagttatcttactgctctaagtagtggtgtgctggtaaatgtttaacaagcagctctgtgggggaaatgggttcgctcattttcatggcagaaataccccatcatggctactttcaaactatcaacatgatgtcggccaactcaaaaaacttttgaaaatttaacaattggctttcacaagcccatggaagctggctccagcacaccattgtctctaagactcaatttccttatctgtcaaatggatgaataatagcgtttacctcatagggattgttggaaggttgaagtgagaaaatgatagtggacttttattgagtatttatatctatccaccaggcacttactatgcattattcactgacttctcaaaaccatacaataggtactgatattccttccattttatacatgaggaagttgagctgaagtaactagtccaaagtgatacagtagcaagtgggagaacctgaatttattccagagcccgtgaggtgacagagacattagcccaatgctcagcacggggcaatgctcagtaattgggagctattatcataagataaataaacttctgaaacgtgccctactttggaagtagggatgaacagtttgtgttggatgaaacctctcagccccagaagacacatacattttcttctaggagaaaggccagggtacctgatgggaggaccagctgttgattattcatagtaacaaacgacaagagttgaagctaattgacacccacacgtaacgaggcagttgtaagttcctcccctccccaaattaattaggtgtatgtttttccaggctttatctttgtgtacacatacacatatgtattttgtattagatcagggtgtacatatttttttgcaaattgcttttctttttaacctgagactagatcatgaatctttcccatgacagtccaccccaatctatctcattctctctaaagctgcttagcattccacagtagttacttgctatcatttatttaatccacaacagaaggatacttaggctatttctaattcttcactattataaatgatcctgcacttcacaat

SEQ ID NO: 45184 - DNA, 1802 bp, Homo sapiens
cctcccacctgagtctcccaaagtactggaattgcaggcatgagccactgcacccagacagtctcataattttttgatggtttgtttgaatcaggattcaccaagatccacacattgcagttggctgataaacttcctaaatctcttaagctctaggttcccccacacgcacacctcctcttcctttttcccatgcagtttatttattagagagattgggtcatttgcctcgtagtttcccactttctgagtttttcctattgcatccctgtgttgtcatttaacatgttcaccagtctctgtgtttcttgtaagtgatagttagatcttgaactatgctgtctaacacagtagacactagccacatgcagctcttcaaatttaaataattaaaagtaaatagaatttgaaattcagttcctcagtcacactagcacatggcacatgttcaataaccacagatgggcagtggctgctgtattggacagcatagaatagcacatttccaccatggcagatagttttattgagcagcagtgcttctagaggcatcacaggatcctctgataattgttaaattattttttctcatatgcactcaagaacaaagctgaacaccctgaaatctgcattactagtctatattgcaggcttacataatgtaagggaagtaactaatgtgtggtagactctacttctgcctgttttaagtggcagtggctgtgtttacagaagatgattaagtatttgcatgagtgcctcaggtatgtatgacattctgtggtgacaaaaggtcagcagctccccagcatgcaaagcagcccgaccctttcctagcctcctaggaggaaaattgagggaattcatgctaatccataaggctcagtcctgcagtgattataggacatgctggttccaggatattcataaacattcatcctctcatcaagatgcaggtgctcctggaggcttcttcctgactatgtctttgtcttggcatgcatgtaatgagcacatttcatagcacaccaaacaggtttctcagcttgcttctgtgacacttggcaaagccgaggatccatgtcgagaggaggcaagcacttgcacccagcccacagagaagtctggctgaccatgcactctagcaggagcctcccctggttcttgaaaaccttaaccaatctatgaagaaattgatatttgggggttctggtaggacatatttggaaactttgaaattaggagactatcattcatggattcattccttctcacaatacttattgggccagacactgcactaggcactgagatcagtggtgggctgggtagaagtttctgtcctcacaaagtttacagtcagtgaaggaggcagataaataagcaagccacttcaacaccactggtcaaattccaccatgagagcatgtgagagcatcataaaagcacatggaaacctgaccctgacatggacattcaggaatgtgatatttaagctgagacctaaaagataagtagcgattgggcaggagagggagagggtggagtgtagaaagaatattcttaagacctattctagatcttaagaattctagatccaccaaataggcataataataccccgcaatgtcatgattagagcccagtgacatagcagatgcaaaagaatacactgtatcctaaaatcccagttgtagaaaggcaatggtgctagccagaagcagtctttcactctggagcaagtgtgaattagagagctatgtagtggtgttttggagccagcttctaccagctcttagcag

SEQ ID NO: 45185 - DNA, 1425 bp, Homo sapiens
tgttttacggagaggcgctcaattttttctttttttttttttttttttttttttttttttgctgtaagtaggaatcaacttacatactcctctctccacctcggctttatttgtttgtttatttatttattttatttttaagacggagtctcactctgtcgcccaggctggagtgcagtggcgcgatcctggctcacagcagcctccctctcccgggttcaagcaattctcctgcctcagcctcccgagtagctgggttaacaggcgcgcaccactacgcccggctaatttatgtatttttggtagaaacggggtctcaccatgttggccagggtggtctcgaactcctgacctcaaatgatccacccgcctcggcctcccaaagtgctgggattacagccgtgggccaccgtgcccggctctccacctcgattttagaaactccagagaaataacaaatatgatatccaagtactccgtaaagttaacagacatcagttcgtggttcataaactagcaagaaaaagcaaagtctctacgaaaggcacgccttaagcgtggctctcttttagaaaaggactttcccttcaggacagcacatggagagcccctagagactggccagtccggctccagggcccctgcggattcttctcgctcaaactcaccgccattgcaccgcccagccgactgtgcaaatccacgacaatgaccctggcgacctccacaaaggagtggttacctttcccctccctctcggggatgccaggcctcccacgaaactaaagcacacgcttcacacctgctgaggcaatcatccggctccttactaactacagccaaggcatctcacagcccgccgggaattgtagttcccagaccacccgagcagacacccagcaggcgctaactgactacaattcccagagaaaaacgggttatcggaagtctacccgataggcccactcagaggggaaccggcagtgacgtcactggcatgttgaactacaaagtccatgatgcagtgcgggatcgcagaatgccgcgagtgcgccctggttaggttggagtcccttggccatcaaccttttcacccggtagagctggttgcctgtcgggatgccaggatacgcagttaattactatacggtgactgaggtgctacttatggcttgccactatgcacagatattttttactgtcagtggcattcaacagcccagcatttagacattgtataaccgcgtattgacaatctccttttttttttttgagacgcagtatcgctctgtcgcccaggctggagtgcagtggcgcgatcttggctcagtgcaacctcggcctgccggattcaagcaattctcctgcctcaggctcccgaggagctgggactatgggcgcgcgccaccacaccgactaattttt

SEQ ID NO: 45186 - DNA, 2496 bp, Homo sapiens
gccttggcctcccaaaatgctgggattacaggtgtgaggcaccgcgcccagcctggcctacatttttaaatggagaaaaaaatgaaaagataatatttcatggtatgtgaaaattatataaatttaaaattttatataattttaataaatgtttgtaatacagccacaatcattccatttacatattgtccctggttaattttaagccaagacattgtatgacgagtagttgccatagatacctcaaggctcacaaaaccaaaatatttagtatctgatcctttgcagaagtttgcctatacctgttctatgtatatataggatgtctgtttatttgaggttgatccatttcttttatatgaggtgcgtgctcattaggtatttttcaaaatgttattacaatgcataaccccataaactgttcatcatcttaagaggagaagctctgttttgctcagcattggactcctagtgccttactcagtgctggcaattgcagggactcagtatatgttattgggtaaacattttaacatcagtgctaaatcagtgatttcaaaactccagaaagaatttctcacctactagaaagtaagttgactatttcagtagtttctaatttgtcttaaaaatttttttgtaatccttctttgctgattaaaattctcccttcccgtcccccaaccactgaattttagatatacaatgaaaagataattaaaaacaaactattggagtcatttttcttcctaaataaagcaacatttattaatagtactagcaaaattgaaatggcctcagccttttacatccgtgcgccacgttttaaaaatgacgattactggattccaaggcatggttgtcagaaacattctgcgtaattaaagcagagcagcagaaaatacaaacgtgagtgccaatcaacatgagtgtgtaaagaaaaaaagtaaaattttgcattctgtgcaatgtgtcgaacgtgaacgtattgcacgttgtgttgcagatttactacagctgagtcatttcgggacacgagtgtgtgtttccaagaaaaacgagaggaaggaaccaggctgaggggctcgccgggttcccccaggcactcccagcagcagacaccggtattccgcggcgggcggcggcgtggtcaaaaaaaggcgccgctgcccctttaagaggcaaagcaccttttccaagataccatcttgcaccaggagttcacttaagctctccacctaccttgctatatctctcctccctgactgggtaccgcctgccggcggggcgagcgagccttttcattggtcttgccctcagggccccctctctcttactggttctcaggcctgccactcggcactgtctcccgcccacctcagccttcgggctaggttgagtgagggctcttgggttagttcctgttaggccccggccgggggagtaggttgaagtctcctaagatgcccggtgggctggggcaccgggagctgtgaagggaacgtgagggggcggcgtagtggagacccacggcaggcctgaagaagagcggcggccgagcccgccttccctgcaccatgctcatagaggatgtggatgccctcaagtcctggctggccaagttactggagccgatgtgagtgagccgggctgggccggggccggcgaacgtgggcgttgggggctcgcgggggcgtgggggaggggaggtggcgtggggggcggcgctgaggggccgcggccgggaggtcccggcgacgccttccctgtagtactatcaccattgtggtgggggtgagggtgggagaggagcgctggggacggagaggcgccgtgaatatggggactgggggggcaggcaaggacagcgaaggcttttcaaacgcaaatatcggggtgctggaaggggtagcaggggccgtgagggaatttaaaacattgctgtttgagaactgagagagaggtaacggggctcttgagggatttttaaaatgtgaatattgagatgtcgaagggaatagcagaatatcaagggtttgataaacattattattccgggactgaaaggtctagaagcaaaatatcgagggcattttcgaaatatgagggcagaagcggatagcagggacattgaaactgtatagcgattattggtaagttctgagggatcaagaatattgaaggatttgaaaaatactatggagtagatgaaaaggatgtgtgggcattgaagggttttagaaattattggggaggtgataagtgtgatagcaaggatattaagggattttaaagtattattgagggcttgatagtgctaggggaactgatgacttttagatacatagaggttggaaaaaagaggtttctgtaagtttagttgaaggttgaaagggctacactggtatgcagcattaattggtggaggagtatacctaacagtatgtagggatttttagatacaggtggtgttggaggaataaaaggagcggtaga

SEQ ID NO: 45187 - DNA, 320 bp, Homo sapiens
aaaattagatccatattcagaaacatgtaaatttttctgcaagtgggaaaggtctaagtagtcttggcttttttcctaaagcaagtaaatggtaatggtttttcagtagtgttttttggcttggggccaaaggtgtaggaccttactctttgatcttatgattgcatgtctgaaattttctatgaagcttatgtactggctcagcagttgtgtaatatacgtgcaatagagatttcattaaaaggggaaaaagataaatttgagatttttacagatgaggtatttttagggcaatgtttctattagcttactccgataaa

SEQ ID NO: 45188 - DNA, 1140 bp, Homo sapiens
gggaagctgaagtgggaggatcacttggacccagggagtcgaggctgcagtgagtgtgatcttcccactgcacattccagcctgggaatcagagcaagaccctgtctcaaaaagaaaaaaaaaaggtacatatctatatttggtagggctattttgatacatcagtttggtatgtcccatgagtcataatgtttggtgttaggttatgagcatttagacccttcaaggaatggtgggaatttttcccttagaacacaggacgatgtctgtgcaggcagtaatggatttatgagtctgctctaatgtacattctcaccatgctatgctccaagtgttttatggaaacatttggcaaatgcttcaggaggtttagcaatgattttgctagatagactagaatgaaagcccaaataaaaaagaatctcttctattatgttttttagaacccccagttctataaatgaggacctttgataggaaagctatagggatggctaaacttctacttttctgaaactttggatccctagtcccttgtctgtgttgctttgtctttaaaatttgctttcccctattggaatttgctggggagaaaaaaatgtttaaaaattagtaccaagtaacatttgaaatggagcagttttatgagttaggatagtattaggcatttgtttaatgtttattgaatgcatagatgagctgggaggtgcttattagtgtatagcgtttcagaagtggaaataagaagaactttatccaacataggtggggctgtgagagatgcagtgagatgaataagcagatgattcaccttttttctaaggtttgagtctatatatgtagatatcaaagccaaaggtcaatacctgtattaagaatatttcttgtcctcatcatgacttttgtaagtagagcaactctacttagaaaaaaaattatttcttcaaccaagacagatgctaacatttacctgacacagatataaaccatgggttatcctaggcaaaccagaacatatagttgctctaattaaaagggactttattttttttagctctcattggagattgtagatccaccttaacagatttctctcctgccctatgttatactttttaaataacacagaatttgcagaaa

SEQ ID NO: 45189 - DNA, 2019 bp, Homo sapiens
aagctgtaaattgcaaagaggcttgccttcgccaatttacctttcttaatgcagcaacttataacacctattggcttgcaacggtttagtataatttgggaggtattcttgtaattaataatatattatttaataacatggatatagagctgagtggtgacttaagactcctgctactgtaaagctaggaaatagcggctttccacagcaactgtgcaatcggtttaggcgcggcccaggtcgattttgattggcttgcccagtggaaatgctctccgcctgagctactactggccaatatggctccacaattggctctcctggaagccgacagacacgtggctaccgcaggctgagccgaacttgggaggacttagttctgcttaccgcgagagggcgccggcggttcctcactgctaaaatctcatttcccataaagcccccgagtcaccaatcaactggctgtcttcataccgctttcaaagtcggcgggcgccttgcccaatagcaaagaacatatcgcccccatttcgaagattgatggaaagtttgaccaaccgcatctcagacttctgctgtctccgcctctctcgttggggattgacgatttttctagccaataggagacgtcgggtcggcgggtggatgaacgcggccctctgtaatggcggagcgtggcggggacgggggcgagagtgaacgattcaacccgggggagctcaggtaaggaacgctgccctccttcacatctctgctcacgagagccccagaggctagacgctagacctgccatgtggagatccggggcggacggtgggtagcggagccgggcggcccgggccgggaccgcatggggtttaagaagggggaaggggaaggtggcttgaatgagagccgggcccgggctgggccagggcctcctgcgcgttccctggctgcttcctagtgctttcttggggcctcgccgcctctcgcggcctgcagccctctggccgggcgcggtgctcccgcctttgggccccgcctcagccgcgtgtcgcctccgtctcggccgacctgagtctgtccccaggccgcgctccgctgcgggcctgattttcctcatcgacgtctctgcactccgcagttactttccctgtacccctcgccacttctggctaagccttctccacgccctccgcggctctttgggctccccacgtttgccctttcatttcatccccctcattgcttgcctttcttaacttctgtggcttttcttccttttttcatccctttattccttattatcctgtagttgtgagtaacaacaacagtagcaaccccttattaggcacttaccgtgtgccagtaaaccctttacttaggtttgtctcatttaatcctcacaaccaccctttggagtagttgctattaacattttgcaggccacagaccagaggggtcttcagttgttactcgcccatcttacaggtgagataacagcctcgtggaggttgagtcagtagaataagattgcataggcggatttgtggctccaggaagtggcttgaactcaggcagtcaggtttcagagcctgcaatcccaattggcgttctattcgtctactactcatgccatttccttgaacagtgcagtgacctttttttcccctggaacctcagtgtctatgagtttgtaattaaaatttggtaaaatgagagtgacctggagaaatcttttggtcagtggtttttgaggaaaagaggtattatgctttatgtgtatttggtactttggtttttttctgtatgggagaaatggcatttcagatgttcagctcccattctgaattgtgctgttgtcaacgtttgaaaatgaaaaagagcagggtagattatgaagactctgttgatactgtcttgaacttaagatgaaattgtgtaaggaaatgggtattgttattcaaggttttagaagaggaaaatgcctttcagattctgtatggtcgcacacacaaatctccactttggcagaaa

SEQ ID NO: 45190 - DNA, 860 bp, Homo sapiens
acacgttggtacgctggatccagcagcctctctgtggtctcagaattagagacaacaaagaaggtccccaccctcagggaacatacactccagctggagcagcagagagacaccacaaagcagcactgttctgctctcaacagtaggagctgaagagcatgcagggggatcctgaactctgccctgggaggtcagggatggctccccaaagaagtggatttacacagcaactccaaggagagacatttggaaccaagctgtaagcacattaggaaagagtaagggatactttccagagaatccaaatcgtggcatgaggtactcttgagaaggttaattcagttgatgattcaacatgtgctatttaatccattgcctccagagcaaacattgataggattaaataacagtgcagagctctacttccgggcatcacagaacatagcggggaagaggtcatagagttcagtgtttctccaagtgttatgtcacctgttgggaattgcaaagctaaagctttccagaggtgaacagttttctgatgctcttggaagaaaatcagagccccttctaattactcacaaggacctatgtggtctggcccctgcctgcctctttagcctcctcttctctccttattcctgtcttctttctgtctttgcagcatatcatgactcaaggcctttgcattttgtcattctttcatttattcttctgtttattcaagaactgttgattgaatagaaataaatattctaggtattgggaatacaacagtgaacaaagtcaactcagttcttaccctcatggagtttacattctaatggaggaggaagacacacatagataatatcctgcct

SEQ ID NO: 45191 - DNA, 2817 bp, Homo sapiens
ataacctctaaaacatccactgtgcttgcccaagcaatccaggtcttccaccacagatcaaatactctgttcaccaaagcagaaatccaatagttaatctatgtgattttctttgtaaatcacagttgattggggcccacatacagcatccctgcaaggttggccttattatccaccaaaggttcagaaaacttaggtaacacgtcagggttgctgctaggtagtagcacagctaggatccgaatgcccattgttttcattcttacacctgtgatccttgcattggacatgcttctctaggggcattcctgtcacagcatggacaaggacatagtttcatttactgggcttgcaatgcagcttcaggggagaggtggctcactcagcactgttcattctggaaaccatggtttcctgtttcaggatctgatgactcgctatcagaccttggacatgttatttttctctgaagtttccatttataacaagtggactttgcataaacatatgaggttgctacatggttaaaaagtaggctgtgtaaaacaacaaaattacaagatgtgatttaaggcactcagggggttgtgactgaacatggagtccctgtattgcaaagcagtttctcctcttgcttttcttcctaactccacagctctgctcctcactctgtagattttcttacaagactactgggatgcttacacagtcaacactgaggcatgtgaagcacgtgcattgttcaagtgtgaagccaccagtgggcacagctgttattatatatgaatagtcaatgacagcatattcatattcaaatatataatctggcccaaattgaaatcatagtagaataaccaaccaaggatacctaagtcagaatcctctctgttccaccaatgattgcaaagtttggaaatgaaagaagcctcagggagaaacacacacacacacacacacaaccacacacacaacagaacacatttcatctagcttcagtggatctctctgaaatagaagcaaaaactaagtgagtaaaaaccttgcttcagtggagtatttattgcatactgaactactctgtcaagtactcagcttatcattaaacattaatttccctagaaactggagctttcacttcttgtagctgtagcaattaaggacagctttggctgggcagctctgacttcccagcatgactaagagctctgtggccttgcctcaactatgacacagagacctttgctcatttataagccttgtcatttttctgggaaatacaagataaatcctgcccaaatgcaataacccaggtcagacctgtaaacctaattctagtaataaacaaactaattgtcaagaggaagctatagttattgattaagcctacccttttgccctcaaacaaagcatcttattatctccaggagtgtgctttttgtttttcatctctctgtaatgtactatcgtcataattgtataaaatataattttgtactataatcaaaagtgtggagcccagcagagtctgcaactcccatgtctgtagtgtttatactcaaaaaggccacatcatggcttagcaacatggtttcattcacgcagctgtctctgtctcaggaagggacaaggtgtcacacctgatgggtgcagggacagagaggtgacttcactaaagtcacaaactgagccaagggctgcaccgagaataagcatctagttccaagcccaggctatgttctttatgcactttgtacctggttctctattgtcatcacaaattcatattttgtaataaaaacacaccaaggatttttgaccttatgtatcatgtgaggctctgaaagattacgaatccaccacaggcacctgccacaggctgaattattattcttcaatgataggctgtctttacctctgttgaaggtgctgctgattctcagttacccaggtaaatacaggggaacagacactaaaagcacaagataatcagagagtcgttaatagcatataaagatttgtctccaaggaatgttcatggcagcattttcatagggaaaaacttacttcttttttctcaagggatttcagaacaaaatagaacaaagcattcttgatgaaagtctactagccttgttttttttttttaaaaaaaaaaaagaaagaaaagaaagaaaaaagctgccaaatattccttactgcaaatgaacaccagagatataagaaagataaaagctgacactgctgcaaatcacatatttaggggaggaacatcctggcttggaggcaaggccatgctgacctctgagacgtatctaggggcccagcatgtggcaggagcaaagttcaacctggcatgtctgagaggccacatcacaggcgccacaggccaggcaggggagcggatgatgacattcacattgaactcacacaggaacctagcaagaatatccagttttgagaaaacatgagactctgatttatcaagtagaaaacaaacaccagactgtacagatcaaagcagagcatttagaaacctcactgatggagaaatgcaaatcaaaaccacaatgagataccatctcacaccagttagaatggcgatcattaaagtcaggaaacaacaggtgctggagaggatgtggagacataggaaggcttttacactgttggtgggactgtaaactagttcaaccattgtggaagacagtgtggcgattcctcaaggatctagaactagaaatatcatttgacccagccatcccattactgggaatatacccaaaggattataaatcatgctgctataaagacacatgc

SEQ ID NO: 45192 - DNA, 922 bp, Homo sapiens
tggtgaagaatgagaccaagaaattttaactggatatatgataagcagcattcgccactcagcttgccacttcgccttctctggtcctctttttcataaagttgataaccttctcttcatacttgccttgatttaaaccaagttttcctgttaacttttcttcctaatgagcactttgccacccttactacttgcctttctcttccactgtgcaaaaactcccagactttgttgtttgtattgaaaagccacacccttttgatctttagaaccaatccatagtccatcttgggaaatagatttcacctcccttcatgtttctgcatctgtaatcagcttctgaagtcagaatgcagaaaggctggaacaaaatcgtctgtacttttcacaaatgctgataagtcagccaagaaaacctgaatagtacaaatgccctgctgcagaggttttgtttggtagcaagtcagacacagcaaggagaccaaaagaaagcattaataattttgccttcctcctgatgtgctgaacaacaagcagccccatgtgctatgatttcttgggaatgcagtgcacatggcggcctcaacacagtgagtggcctgatacaattcaaagaatgaaagtcttggagcctaaagacctgattggttctgctcttactaggtacacaaccttgggcaggttgtttaacttctgagtcatcagacataaactggagctaatattctctttagtgatacatagtccagcttgtatataagccatccatctaaaagtcatccttgcttcttctctcttccttatcccaacaccacccaacctgtctgaattgtgttgattccatgatttaaatatttctcaaattgcatatccaatcccaccagctatattagttggcatcataatgtcctaaactaacact

SEQ ID NO: 45193 - DNA, 759 bp, Homo sapiens
gtcaagtaatttgcagccacaatcattttctattgttcttcgaatatgttcccatcacttcaacatttttttttttttgcctttaggaatgtgcttctctgtctggaatgtcctttttttcttctatctcccaagcattactcaccctatgagacacacaccccctgcaaagcttccctctccccaccacatagtagcattggtccctttctctgcaacaccacattccaaaagtacctttataattataaaactttgtgcctctgtctctatcagcaggctatgaactccttgaaggcaaaaaccaagtcttacctccctgcttcacacattaaccgtctcttataggctaattgtgtcatgtttgcctcatggcagatttagattatacagccaaagagtttccaaatgttgaagtgttattcaaacaaaggtcgtcattatccataagtaagccttttactgaaagaatgtaataacttctcgtgatagctttgcacctgacaaattctaaatggatactccatttaactgtttaaaaaaaagtttaagatttttttttttactttctttctctggcttaaataagagtgacgtctagttgtttgttctttatctgttatttagatcactgttccccaggttttatcaaccagtcgcctctccacaagcctattgtatcaggtcaatccttctctactttcttcatagttttgtacctaactctttgtaacacctgattttcgtggatctaattct

SEQ ID NO: 45194 - DNA, 868 bp, Homo sapiens
ccggactcaccgtgatccgcgggatgttcttcttgccttggtaggacatggtggcggtggtggctgcagcggctggctccctccctccttcttctgctccggctcgcccgcgccttcctcagcgcacagcgccccgagatcaggtggagtgaatggtgcgctggccgcgccgccgcctccgcccgcctccgcccccctcccgggctcccgcggcggctgccagagacaatagtaaatctccccggtccccctttcacccccgcccccccacgcacaccctcctccacccgcgttcacgcccgggttttgtttttttttttcttttgctgcgccagctgggaccccataagacaagaatggctgatctgcgactcctccctcttctctcttatccctattgattttcctctttgcatctgcctcacccactttttctttttctttcttttttttttttttctgattcgcgagtgctgcggagtcaggctgctccacagccaccagggggcgcgaggggcttttcgggagcggaggctgagtcccgggggtgggagcatcagctacgccctcccggccgcggggccgagttgcgggcgccgccgcccccagccagctcctcgtcggatctcctaccttccccgccctagtttcagaatggagacggttcccggcttccctcccggcacccgctctcctctgccatggcgcgggtcgaatgcggcggccgcgcctttgttcgagaggagggctgggcgccgcctctgctgctcgcggggtggtaaacagcggcgcagccccttcagacgccggagactggtccgactctgcaacctggcgggcctgctggggtccccagacccggaacata

SEQ ID NO: 45195 - DNA, 595 bp, Homo sapiens
tttttttgtgttcatgtacatggttatataatgcaggcttcttatttaatacctctgtagggaataattagaaaatagagaaatggagtctatggagaaaacactagaagccaaatgggatgataatatagaaagagaggtttttataatgcaatggtaggagaaaaaaagggaagctagaacaaggggtacttgaacttggaaagcatatctccttctctttaaaagagtagatctcaactgtttgtctctccctgccccagccagggacatttggcagttctgcacatttttttaaagttagttaatatgtttatttattttaagttgtgtaattcagtggttttagtatattcataaaattgtgcaaccatcaccactatctaaatgtcttgacatttttgtactgtcacaactgggagtatgtgcatctagcatctactgagtagaagccaggaatgctactaaacattcgataaggcacagaacagccacccctccccctaaaaaagaataaagaattatctgcttcaaaatttcagtagtgctgaaattgagaaactcttctttaaagtaagggggctaaggtttgtgc

SEQ ID NO: 45196 - DNA, 1108 bp, Homo sapiens
catgcgctgcaaggacaccatcagttcatcgtttctcttggcgaggcacttgttcctttccaggagaggtttacattgcttttcggtttcccgcacacgttttaactgggaagaaataagtgaagatttgtgtcttgcgtttgggggacgtgggggcaggggagtaaagtggtgggagtgaaagcacctctggagacagccttgtctctgcttcactatgtggctgaggactgaccactgacatttcaatccttcatttaacagactgtttgctttcttttcagttttctctaacggtttttcatcacagccttcatagccttatatcaatccattgtcttaaggaaagtactccagagactggttttggaaatgctcgggaggacgcgctctccttgctttctttcgcttccccgacttgttactccaccgtgctcagctgcaatccctgcacctggaatgacctgcattagctcagagataaaggagctcacccagaccacacggccactaagtaatgcgaccaggagctgaatccaagcctggttatgtccaaaggtcattctttcagagaccttgtggaaatctcctgactcgcactacagttgttattttaaaagaaattttatcgaggggaaaaaaaccacacgtaagtttgaaactctgtggatgtttgtgtaaggatatcaaattctccccaagcttagtaaagtatgattgtattgttatccacccataattaagagtgagcatactctcatttgcttggttagtctaaagcagggtttctcagtctcggcgtctgtgacattttgagccggatgtttttttgatgtaaggtgtcctgtgcagtggaggatgtttagcggcatccttggcctctgctggctagatgccagtaacactctgctaattgcgaccatcaaaaacatcagatattgccaaaatcgcctgtagttgggaaccactggtctaagtttatgaaaattgtcttgaggggattgtcaatagtcctcccctttacttttaaaacactcctttttgtatatttcatgatcatcctatacattatagattttcattttcagcttctcatgattagcttatt

SEQ ID NO: 45197 - DNA, 892 bp, Homo sapiens
ctaatatcctgtagtggtagagaaagtcctttgagtctaagagagataggaagcccttggaaggtattgggcagtggagtaacgtgatgtgctacatttcagaaggacttctctgaatgctctgggagttaataacctatagagggcaagagtggaacttgcccaaggtcatgcaactattaagtgtttggcggtggtaagggacactgtctgaattttcatatctggcttcctgaaccgggcttccagaggaggctaagatctgtctagtgagtatgctattttcactttctgtgtgtcctgtgctcagttccctcctgccacatgcaataagctctccatgtttacaggggacgttgccctctctggcaaagggcaggagtccactggggtaggccagcaggcagagctgtgctcgctgcatgtggacacagccagagctgctcttaatgccacgacctcaggtagccctcgctcaccttggacttctcttgatgcagctctatctgaatgtctgtgagcttggtcctgaggtcttcattggcagcttgaagggcaacaatgagtgcctcgggcttctcgcccttatttcgccctttcttggacattgttcctttctaaatggagtctgttggtttttaatttctttcaagcaggtgctgccatgttactgtttcttatcctggagtacgatgtctcagcatctactgtgtggtgctccttggtaaggtctcctcaatcgctgccctggaagccctgagaagaggcagagatagtagttattgttttggcaaagacctggtctaagtgccagtcagtctactctcagcctgagttacctgtaagagcctcctcctgaggctctcctatcctcagtatctcctgtccactt

SEQ ID NO: 45198 - DNA, 959 bp, Homo sapiens
ctaaagagtaaagatgagtcagcatcaactctgaaaaaattttcaaatttacctagggggaagtgcatctttggcaaaagtctgccttgaacgaaatgctcttccactgcttcatcggctactctctgtcataaggatcctttcgttggtcaaacagcacttaagcaccacaaggctatgattagtgatggcaccacgtgaactgagaactgatcaattctgcttagattacagttgactacacggccaaagatcaatgtttcaaagcaagaggattatacaaaataaatgtagacagttcatgttttcaaactacacatgttagtgaaagttcagcaagcaaatgaccagcgagtggctagaaatattaattcttgtctctttactacatttcaggggcctcgactaaaccatgtaggcttgatttcaataaccgtacgtaggatgaaaggagaaaaacataaagtcacataccatagttaaaagagattaaacagtatatatgtagtcaaatctgcccatgtaagagtgttagtatgaatcaggcatgtttaagtgtgcatttggatactggactcttaaacctgtagagagcaaaaacccaaaggtcacactcagatgcaacaatcgatttcccttgtcgtaggctaatattttcctttctcttgtttcagagtgtggcattgcaccctgtaggtcaaaaatgtggacaatctggctaagaagagagcaagacaggtaaagcattccttctatgtgaaattgattgggggaaggcattcctttctacttcatttttaaaaagctgagacttatttttcattattgctaaacattttaagcatctggctcaaaatactctgtattctaaattttatagatgattttatttaatgaagtcctttaaaaagaagtcaaaattcaaatgttttccataatatagctaaaaataatatatt

SEQ ID NO: 45199 - DNA, 421 bp, Homo sapiens
agaggctgatgtttctattgatgctcaattttctgttttccttttcaaagaaagaaaaaggagtggtccctaaaattctcttattctggttagctggtgtcaaggccacagtgggcatcataaacaccaccaggtcttcctgcctaggtcttctatgttctaagagtaactttgtgttgggcaatacagggctgtccaggttacatgggtcatagtggaaagggcagtgttatctgctgggtaaacttcaccccatctaggtaaatttacaggaaagggcagagttatctgctgggtaaaacttcaccctttctaggtaaattcacaatttcctctcttgagaccaaaacgtagaccttcccactgctaaactaattctgccatagtggcaaactcttccttaactttttgcctcccacct

SEQ ID NO: 45200 - DNA, 2288 bp, Homo sapiens
ttgtgatagggaatggccctttgcagacaacaagttaaagaggataaaaaaaacccatggagaaaggggcctgtctccaattataaatctgccatttcaactgtgacatgagtgggcaaaacagttttctcaactacaaaaatacacatcatacagtgttcatttggtgtgagaataaaccaagaaaccataagtaaatattgtgcaaaaatattattcctcacatgtccaggaattataattgctagctagtaataatatcaccctccttccatgaattagaacaatagaaaatatactgaggcctcatacaatcaattcttgacagaataaatattgtttgccccgggagatgaggagtgcattgaccagagaaatcctgccaccgtgctagactattagtcatattgaatgtgtttacattgctcaaccttgtgtacattttttccttttcttctttactgctctgagtacatatttatgcatgtctatctttgggaactcaagtaaacatattatgacctactcccctctgattcaaggactaattattcacctgagtaaagagtgatgacaaaactcaagagaactgctctaatggatgttgataatacatgttggaatggggatattgggctggcacctgttgattttcacattctgtgcccaaagtttaactagtaagaaaaaaatgacagaaactagagatatacagcttattatatttagagacctccttgacatttggagacctccttgacatagctgcaacttaattcttcaacttttatttttcattatttagggaacttcatggcttttcataaatgacctcttgtttttattccactgcttgttctccaaataggttgcatgtgtacctatttgctgtacccatcctctacagcttgggtaaaatgtctgtggtgcttgatgcaattaggaaagatttactcactttcctttgcctctcatagcagtttgtaaagctatcacttaataattacattgattacatcctcctcctcatcattatcattatagccactactaatatttttcaaaagcttctattcatcagtcactgcagtattttattttcatcattttaatcctgatatcattgttatttctcttttataagaaaggaaactgaagcacagagatttcagttttcttgttcctggtaacagattaacagatatggtatttactgatttgtgtgtgtgtgtgtgtgtgtgtgtgtgtgtgtgtacaaacttaatgtcatggttagaacattggattaaactccaagaaaccaggattcttaatttaatactgccacaaagaaagggttgccccctcgtctatgtaaaccctgcacttaagcgtctctgttacagcactttaaactggaaattctaatttttcatttttcttatttgtctcctttactaaactcctggatgtcatgaccttttatctacacagtcaagtacactgttagatccagtggcacctgataatatgtgcgaaatccatgccttctaagcatttgtgggcatagtagactttaataagattgcaaagaattgcatcacacactaggcaacaaaatattttaaaaacatgtcagactttataactactcttaactggaagtctttcttggtcatttcccgccaagcagtagccaaacttacaaatgtatgttactccatcttcattctcttttctactctctccagccaggaatgaaacaaccagtttctttccttgtctagaacagaaacagatgacaccttggctctggagataccatatctaacaagttcttttcaggatattttcccaaaaaagacagttctttccctaaaataaattctggtgccagctgtaaagataataacatttccagcatgtcatttaatgattgaaagtctaatctttgcagaatgacagacctcagttcaaacctatgtgtaactttgagctaaacttcatatttatgaccctcaattttcataatttttcctctaaataccctcaggctggatgggttttaaaattcaaattttttttgtaaatttttgaaaagttatatgtgcagttcagaaagcccagtggtgcctggcacagcaccctttaatcaaatacaccaataattcttctgcaaaacgtatcatgtagagaaaataattatccttaaatcatctcttgacagattttgctgtcaaatgagttacaaaatgaaacaaaagaaaaacttctgaaacaaaacaaaaacaaaacaaacccctctgtgg

SEQ ID NO: 45201 - DNA, 1309 bp, Homo sapiens
gccccacaaagtgctgggattacaggcatgagccactgtgcccagccacattaacttttcttacagggacaagccatccgtgttggaggccacctgtcttggacccacaagagttttatgaatgcctcccatcagctcttttcactgatagacctctaagtctcgttttccagaagctttgctcttctctcaatctggcactgatcccctacagcaatcattaactaaatgttcaaacataagacaaggaagcatccagttgagaaacgtgtttactggaagaaaaaacaaatgtttcttgtaacctatgaaaatcaaagaagaattctgtagctaaaggtagtagtgtatatctggggacaaaaggtcaattaatgaataaccacatttcagataaggaaatatagaatgctgtggaacaactatagcaagagggagagtgtatgaagatcataaaaacaatttcagtagattctggcttctggtcccatactcttaaccaaacctcttatgtcttattaatgaatttattcttgccaattcatatgatcttttttactttttctcacttttctagatgtgttgtatatgtctccagactctagttggcttcactgtactgtgaaacatttccatataatgccctgatatcatttcaaacttttatactttataaaatatatctgattattttttaacaattcttctttcccaaatttctccagttctcttgagagcatagccattatttcaaatctttggtttagagtctcctggggtcttgttctttgcttttccatggctcttgatctaatccatcatcaactttcctaattcatctttcatctacattcatctttctattcatcttccatcactctaggcctacagtattcccccacggttccccatggtctctcctacttgctataggctatccatctcatggtcctgaagagggagaggacctggattgatgacttgatctgcctctcaccaacactgtgatccctgtctcctctttccctcaccagcctcctatttcccctaacatagtcactggattagtctgctctcatactgctaataaagacatacccaagactgcgtactttataaaggaaagaggtttaattgactcacagttccacatggctggggaggcctcaggaaacttacaatcatggcagaaggagaagcaaacacatccttcttcacatggcagcagcaaggagaagtattgagcaaaagggagaaaagtcccttataaaactatcagaccttgtgagaacttactcactgtcacaag

SEQ ID NO: 45202 - DNA, 933 bp, Homo sapiens
cagtcagctcccatggaatttatactagaatagtgtcattatatcataagagcacataaaaaaatttcaaacttcatacatccactgaaaatagaggctaggtttttattaaaattctactttctttgtgttagaagatacacctcttgtctcccaggccagtgctctttctggagtgcccaaagaccccttctttcttttatgttctgaatcagtgccatcagctttctctagtcactgctaactactgaacaattcatgggctgtgatcagaagcacttacctgcatagcaggtcaggaataagacaagcagtcccaggacaactgtcaggcgaagtactgagacagccattctggtagcacggggtattcgtgcagataaattgttcagatacatgtgaaacaatgctccatttatagggcatagataggtgacatcatctgctttggaatttagattgttgcacaagatgtctgcacagcttgcttttggatctgtactaatgagacataccctatcattcaaaccaaacattttacatatagggaaagaaaaaccctcttgatttttaaaatttgtatctataaagggttctggagtgaatctcttgaggctagtttcaaggccagcattgataattaaagggatatcaggtagaattgctcgtcagtgccaagcagcaggcaacaaatcagattggcaaggcaagcctacaccctccctttacactctatgccttccctcgtgctctgggacaatcccttgttcccacatgggcatgccctttcacaccccatgcgtctgctcttgctcttccttcttcctcagataccctcctccttgtctcccttcggatcactcctacgtattcctcagttcaaatggtccttctttgtgataccttcatgataaccactccacccttctccag

SEQ ID NO: 45203 - DNA, 598 bp, Homo sapiens
ggaggagataaagtaggaagaattgggattttgagacttgacatacctataagaagaaggcagacaatctaggagggtccaggaataggttaaaagatggctacgaaatgtgttaagtggatcttgctacatgtactatgtaatactatagtcaagtttgttgatggcttcagcaaatagggctaatccacatgaattaaaattcagggacatgaccctggaagttaggcaattataacattaatggttaacatttattgagtaattactatttaccagccactgtgctaacagctctgtatgcattaagtcaatgaacttgcaaagtaatcctgtaaagcaggtgctattgttatccccactttaagggctaggaaagcaagtacggggatgttaaataacttgcccatcatcatatatgcagtaagtagcagaggtgaggcttgaatccattgcagcatctctactcttaaccactagaatcactggagttcagaaactgaagacactgagaggctatgtagtccaatccattgattctagagaggaactaactaaaatccaactgggaaaccatgacactattgaaatttgtagt

SEQ ID NO: 45204 - DNA, 422 bp, Homo sapiens
ccaggctggacctgagtgatgtgagggaaattctactgactttgccagtgattagcttagaattacctaaactcaacacaggtaaatgggatgtctgccataagctttttgtaaaaatttctaggaattacaattcctgaaggagagatgatttttttttcctgtggtttgatgcctggaactactgcaaccagttgacctccagcctgaggatgatgcaaaccttgctactgagtcacccagtcttgaggcttgctccacctctggacttcctgttatgtgagatgataaatctcttgctgattaagatcttgtaattgaaacaggctcccttcaaatagatcactttgcaaactatgttaacatagtggttcctgataaagggaatcaaatttctgtggtaagaaggggttcctcaggtt

SEQ ID NO: 45205 - DNA, 2539 bp, Homo sapiens
ttttatatctacaggacatgaggtagaaaaagtacacttgtagatttaatccgcatatagcaatggggttagtgataaaaagtgaattccaatgccttgacttacatgaaagaaatccacagggtcagttatacaatgaaaggctgtcagctattatattcttactttggaatcaactttgttcctgtagttttaagtaaaaagagttggcagaaattctactgctaagatctctaaaagtgagctcttaaacatatttgcttatgttctagcctttgtttgtagaacaggcattgaggagttgaacaggaaatgtcacattctttagccaggagctattcctatacactcagaagcagcagctggatgagctccagctgtaagggtttactcaggaacttctggtagggatgctcaccctcagattagctgtcttagttcattttgttttgctatacagaatatttgaggctaggtaaattataaaggaaagagttttttttttttttttttttttagctcattgttctacaagctaagttcaagagcatagcaccacatctggctggcttctggtgaggcgacattctgggtcaaaacatggtggagaagcattaaagtgagtggcatgttcaaagagatctcatggcaagagagtaaggaagagagagaatctaggaagctgaactcaattttataacacctgctttctggtaactaatccagtccttcaatagtgagaacccactcactaccaagggaggacattaatctattcatgagaaatacatatattttggggttctccaaggctcaaacaccttccactaggcctcacctcccaacatttacacatcggagatcaaattgcaacatgacctttggcatgtttaaatgccatgtggtttggcatgtgcttttccttgacaaatgaagcaaataccctatcttgagttaacagacaatcatcatggaaaaggtcaatcttggatgtgggagggaccctgccttgtttgtgtatttatacctgtatgggatagaccactcttctctctctggactccttggctcagagcagcatatctccatcattggcattcaccatcactatgaagggcttcactgcttttgccatccttggtctagcagtcactgcttgggctacctcgccatatggcaagtcagggtttctttccaatagtcacgcgtttatgttaactgtaatatattcagccttcattaaattataaatgttaatgtctaaagaaaatttagaaggcatctgtttgaattggcctgattaacaaaagtgagttgagtcagatctttagtgtgaggaagagagactgaggagagggataaaaggattgtggctgtatgttccattcctgagcaggatccctcaggtttatgacttgccctttcagaaacaacctataaagctttgggaccataacccatgccatcctactcagaggatgcccacaggaactcctggacatctgtgacagtcctttctcaataaacagagctttccccactggatttttttttttttttaaatcagagccacatgcatgtctatcttcatcctgagtttggacttgcatgaagaaatggcctcttttagggctgggctgggcaaggactattgctgggaaatgggttttggttaccatgaacaatggggatttagctttgcacttctaactgtgcaatttgttctttctccaactgctcctcttcaactgattcttgcttcgctctcttctggtgatcaaacaaaagggacaaaggtgagtgcaaccttctctgtgtggtatttgtaaaaatgaagtcatagtgaatgtgtaaatagagctgtgaaagtagctaaactggctcacagtggattcacgtaactcctctggaggtaaaaacatgtctgctctgcgccttcctggtggtatttccttctctaaagcttgcacaaggaacctcttctcaaaagaaccgcagataaagtaaacttttatctttgtatagtattttaaattttctgagcatttttcacattccttattcttttagactttcattagaatccttaaaggagagattgatatttccttgttaaacagaaaattcccttattatttagcgcatgttctggtctgtttatttctgtagcacaacacctggtccatagaagttcttcagatgtgtttgttgaaaagctgaagaggctagttttctttccacttccttccccttcaacatcttcatataagaatagaatttaataatgggaatacagggcattattttttgttccaactataggtgaactgttccagatacattaaaggcttaaagactgcatgcccaagagactggagaccaatatgtggcacagatcagaaaacttacagtaatgaatgcatgttttgcatgcaaaaccaggaagtgttatactcaatttgaagccccaattcgtctttttttatgattataaagcccacactggccaaaatcttggtcttttaaaacatggcttgac

SEQ ID NO: 45206 - DNA, 2152 bp, Homo sapiens
ttcctttattaaagtttgaatatgaagaaaccgacagaagcaaatagcataaaaattcatttttgtcttcaattacaggaagaatgtaacatgaaagctgagattacaatgaatagtacatgaatatgatgaggttttgttttgtttgtcctaccagagctccaaataaaaacacagatatatggtttgacatacggaatgggatagctaaaactgtgactgcctaagacaagctgaaacctaaggtgccgaaccatattggggaaagaggggaaaaaccagtaggtctgctatcaatcaagaaaagaataagaagaaatgggattcccaagccttcttcagctttttcttctccagcagaatagcctagtcaatgctacgtcttgtcaaattgtgtctcacatggctttaatgcacactaactttcctaagaagtatttgtatctatttaaatctagggattttagcccatattaattacatgtatattagggcaagaacacaggatgtaaaaggtaaaaatctgaatttcagtccatctgcgagacattgtgaaaatcaattacactctctgaagacaattccttatccattaaacaacagaaaaggtgattaagttgatccttgcctacatgtcagagtcgtgtagagtttttaatgacactcatgtgaaattcctttggactgtaaaatactattacttacgtgcaaagataatgtcccgaaatcacagaagggatgacttaacattaacatctttaactgcgcccccgtccttcctctcaaaaaaaaaaagttctctatttttagttgaatgattctgggaaaatctctattggaacctatcgacttcgcaaatgacaaaggcgaggtccagagacttatccaagaccccagagtaccagtggaaatcaagaccaaaccacacggtggagactggttccgacgtatcagactcagtgcttccggcatggcgctttagtgtcaggtgaaagaacagcaacccgccccgcttctccacccctgacaagccttccgaaatgccacgctgaacatggctgccgcgcttcgatgcttcttcacacacacaatatggacacgggtttgaggctccagccccggatgacaacactccggaaatatgcgagcggcggcggaagcggaagtgcctcagcggtaggggccggggaagtgtctgtagcgtccctccctctcaaccacaataacaggcggagggtcggcgtaggtgaggcggcggctgagtgggcctggggaccgggagcggggtggcaaagcccggagtgcgtgcggcagggctgaggtagctgggtggggattctggaacttccgaccgcttaagctcggcctctggcccccttggggcctagagctccttgagagatcaggggttgaatttgtagttcctggccttctaggccgtgcttgcgggggttgcctgcttgtctgaacctggccccaaaatccagcataaagaactctctctgggccccagtttcctcaatgaaatgggtgagggtgttggactggacagcttctgtgactgtctcccaccccgggcgtcacgaatttcatgattttaatgttaagtcggtgtttcggccagtaaagtgaaggaggtctgtgttcagcgtagtgaggagatgtccctgagcaggaagcagtgaacacatctttggctgccacgcctgagtatcaggagccctgaattctagtttcaccccttccacctacacaccgtgtgaccttgtctaggtccattagcttttctgtgctgcagtttgcttatctgtgttggatgcctttgatgtccgtgccctagctgtggaaatcagattcttaactcccttttcatggagtctttacagacctgaaaagcatattctccctgcactctgcacacccagaatttgactaagagatgtctaccgtgtttctttgcagacaccaagctggccaagggcaactggtcacttaggaaggttcctgtgcaatgagaagctctgtccagaaaactttgttttatacacctaaaccagcagtgtaaatcactacaaagtgaaaaacaggagaccttgatttttgttccaaagttgctattaacttgatggtttactttggccaaatcccttcc

SEQ ID NO: 45207 - DNA, 778 bp, Homo sapiens
tctgatttttaaaatgccattttctcacatgctctgcttctcttcagcacaagaacaaaaacaaacaagagaaaactagatttctttcattcattaaagatttttgaggtctctgctatgtgtcagggatttcgctagagctagggatacagtcgatgagaaatcaacccattttctgctctcctggggttaacagtcttgcaggagagacagacagtaatcccatgagtgaacaaattaaaggtataaacacaaataataagtaccaaaacgtacagaaaactatgaagaaatataatgtaattccaattaaaactcttaacgagcttttctgaggactgaaattcacactgatatttaaagaatatgtaataattaacaaagcagagagggtgatgtcccagtacaaatactagaaaaccactaccactggccaggttgttcctggcaaattgtgtgacctttaaactgtgaattggagggaattgagtattccagagtaatgaattaaattgctagggccagcgagccaaatccagccctgctgcctgtttttgtacagctcatgagataagattggtttttactttttaaatggcttaaagaaagatcaaaagcagaataatatttcgtgacatatgaaaattatgtgaaatatgagaaaatttcagtgcccataaataaagtttcattgcaacacagacgcagccacttctttacatactatagctccctttgtgctacagctgcagaattgaattgctgcaacacggctctg

SEQ ID NO: 45208 - DNA, 1700 bp, Homo sapiens
acagataatgagtgagtgatgccacactctcaagagttaaaaacaaaacaacaaaaaaattaaaacaaaagcacacaactttctctctctgtcccaaaatacatacttgcatacccccgctccagataaaatccaaagggtaaaactgtcttcatgcctgcaaattcctaaggagggcacctaaagtacttgacagcgagtgtgctgaggaaatcagcagctgttgaagtcacctcctgtgctcttgccaaatgtttgaaagggaatacactgggttaccgggtgtatgttgggaggggagcattatcagtgctcgggtgaggcaagttcggagtacccagatggagacatccgtgtctgtgtcgctctggatgcctccaagccagcgtgtgtttactttctgtgtgtgtcaccatgtctttgtgcttctgggtgcttctgtgtttgtttctggccgcgtttctgtgttggacaggggtgactttgtgccggatggcttctgtgtgagagcgcgcgcgagtgtgcatgtcggtgagctgggagggtgtgtctcagtgtctatggctgtggttcggtataagtctgagcatgtctgccagggtgtatttgtgcctgtatgtgcgtgcctcggtgggcactctcgtttccttccgaatgtggggcagtgccggtgtgctgccctctgccttgagacctcaagccgcgcaggcgcccagggcaggcaggtagcggccacagaagagccaaaagctcccgggttggctggtaaggacaccacctccagctttagccctctggggccagccagggtagccgggaagcagtggtggcccgccctccagggagcagttgggccccgcccgggccagccccaggagaaggagggcgaggggaggggagggaaaggggaggagtgcctcgccccttcgcggctgccggcgtgccattggccgaaagttcccgtacgtcacggcgagggcagttcccctaaagtcctgtgcacataacgggcagaacgcactgcgaagcggcttcttcagagcacgggctggaactggcaggcaccgcgagcccctagcacccgacaagctgagtgtgcaggacgagtccccaccacacccacaccacagccgctgaatgaggcttccaggcgtccgctcgcggcccgcagagccccgccgtgggtccgcccgctgaggcgcccccagccagtgcgctcacctgccagactgcgcgccatggggcaacccgggaacggcagcgccttcttgctggcacccaatggaagccatgcgccggaccacgacgtcacgcaggaaagggacgaggtgtgggtggtgggcatgggcatcgtcatgtctctcatcgtcctggccatcgtgtttggcaatgtgctggtcatcacagccattgccaagttcgagcgtctgcagacggtcaccaactacttcatcacttcactggcctgtgctgatctggtcatgggcctggcagtggtgccctttggggccgcccatattcttatgaaaatgtggacttttggcaacttctggtgcgagttttggacttccattgatgtgctgtgcgtcacggccagcattgagaccctgtgcgtgatcgcagtggatcgctactttgccattacttcacctttcaagtaccagagcctgctgaccaagaataaggcccgggtgatcatt

SEQ ID NO: 45209 - DNA, 1095 bp, Homo sapiens
agcgagaaaacctcaattctatgtctcaaaatggaggagactggctttttggattagaaacaatgatagttaagaatctagatttatgtaaggaagcattttctgagcattattcccaataatatatatggaaaatagtaaaaggaacagcaggaggaaaacaaaaattgaggtcaaaagtttgagaggacagaagtttggaaaataaattgcacaaccagtatttcccttttggagttcatattaggcagtagcatcctaaaagtgctgagaagttttgtaggaagcatacctggttgacctgatttaacctggcttgcccacagagttctatttatgggtttttgtctgtttgttttggtatgtttgttttataaggacacctagtaacatcgtgcaaacttactactctgctcagcacactttggggaacgctggtataaaaaatgaaaggtgtcttcaaatgtttagagtgttgctggttaggggggaagtggacttggtcttgtaaaccaaacggtagagctaggcctaaatcatggacatatctgggaggcagatttggctccatatgaagactagaactttctaacaattagaatagtctgaaaggtaatgagctccctgttcctggagacattcaagcagaaacagaatgctgtcagggacactggaagaaattattgctgtgtagaaagttctccgggtctgctgtgaaaagcaccttcatataaaacatggacggggcctccaccagcaaactttctttaaaactatgccccatgttctatatcccttttgcagtctaagtacctccctccttcatccacctttaatatgtttccttcccatctagaacccaaagagattagacttcaaaagtgaatgatctttgttctgatagggcccttttaataccctagcccagctatcttggatcatccaccctgagcctctggcagtggctcataaacttcagaggtaacctcgaggtcacagcagagcttagtggcactgccccacatagtgcccatggtagcgtataggatcaccaggcatttgaggcacacagcataatggaatctgacagacaat

SEQ ID NO: 45210 - DNA, 1273 bp, Homo sapiens
cccagagaggtgaagcaattttcttaaagctgcacagccagagagtggcaaagccagaactggaattcaagcctcctgacttccagccccaggctccctgccactgcctccctatttacacaggctttcataatcattagggcacagaattagttcagcactaagctttcaaaatccacatggtccctcccataggtcctcttgaggacaaaatcactcagggataaaaatgtattaagtcttttgaaatggcagaggagggtgttccctcacataagaaatcctgaggacaccagagttgaaatactgatttgatcagcggatcatctgggccccatctcttgtgcaatttttgtcttgtttggtattcagatggtggaagtgtcaggcttctgagccaatgctctctgacaagtgcattttacatgcctctgcagccctgaccgaggagtggcaggcctgaatcagttctcaccagaggttcggagaaataggttgctctgatccccaatcaaatctattaggagttgtcccaccaaacaagcctgtgaattccaaacagtggctacgttctcactgcccttcccacctaggtcactggcctggctggacgacagattctggagccccagattgtcagtgctgggcagaggctcagacatgttttgacgaaactccatacctctcagctgcaggaactaaggcccaggaagaggaagggacttgtccgaggtcacactgtgggctcgaaaagtgagagttttgttcctttggcccacaatctcctttgatcctaaagtggtagcctgagaagttcagataacagaacatgtgacaaagaagccagagctccaggacagtgaggagagagaagaggcaccaagcagccccttagtgactgagcttctaggagcacctggcacccagaagtccctgtcccctgacagtgcaggtatcctagtgcctagagccagatgcttacataacacgaaaccacacctacatcaaacacacacacaccaaaaccagaagtgaccttttctcctcttcacgcctcccagcatctgaagctggatctcctgcccagatatgtcagctggagaatgaacagcttaatttgtgattggagacatgtaagttagatgcaaggaaagacagtcccaagttttggagctgagtgacgttactaaggaatttccttctttagagagtagtttaatttcaatgttgggtatggttatccgagaacatatagttccagaattgaataatc

SEQ ID NO: 45211 - DNA, 1179 bp, Homo sapiens
gcaggcaggttaaataatctcatgaaatccctgtttcctcatcgctaaaatggagctaacaatggtgcactcctgatagtactgtggagggattgaccaagctcatgtgtgaagaatgctcagccctgtgactgcctcacaatgtatgcccaataaactgcagctgtcgctgatgctgagaacacaggagagccagagagctgagagcaccagcttgggaatcaagtggacctggattcaaatgattaaaatgctcactttgccttctaatggccgcgtgaccttggcaaaagttatttagctgtcaacttttccttgcttgtaaaataggaattaaaatagcacctacttcataggtgtgtttgaggaatacatgagataatacacatagcattgccctatgaatgttagttaacatcattactatttgcacacattgagtaatattataaataaggattatgtggggtctaattttgttccagttcaaggttttagaaaaaaataaatagaggtatctggtttggtcagatttactagacattgtactgtttgtaaaaaatttaaaagaaaaaaaaaaaccggacctgtctcatgggtcaatagaaagtcaatttccttttggctgaggccagcgattctgtgcagtttattctggtgctggctggcggtttggttaggttcaaggccatgaccatgagtaagtgattcactcttgccaaaaactgcaatcatggtcatattctaaatatttatactaaaagaaaccaaacctgctccacctttaggggtcacaggcaccactccctcacatactggagttcattcattcatccaactcaggcttattaaccattcacctcatgccagacaccaggcactggtcatgctggtggctaatgggacagaaacctgctagcagctttggccaattttggagaaacaaccgaatcagggccctcaatgatggtagctgcacctgggctgtgcaggctcctacagagaatgcaggccatctgtttggtgcatatcacaatgtggtctgttccagctgggaaaggcacttggggatcatctcaggcaacacacaccctttacagccactgagatctcacagctgagctaagatcctgctattctgactcctagatcagcacctctccctccctcctagatgcc

SEQ ID NO: 45212 - DNA, 2107 bp, Homo sapiens
tctgggtagtataggcaatgacaatgtgtcaacaaatgagtgtggctgcattccagtaaaactttatttttttaatttttcactttttacttttgagaaggagtctcactctgtcacccaggccggagtgcagtggcatgatctcagctcactgcaacctccatctcccgggttcaagcgattctcctgcctcagcctcccgagtagctgggactacaggcatgctcccttcccactttcccctgtttgtcaccccacttctcaaccgctccctgatttttgtatttttagtagagatggggtttcaccatgatggtcaggctagtctcgaactcctgacctcgtgatccacccgcctcggcctcccaaagtgctgggattacaggcatgagccaccatgcccggccataaaactttatttatagaaacaggtggagggccacatttggcccacggacagcagtttgccaaccctggttctacatgacaagttacgtaagacaacaacctaagccaagggactcaaactctagtgcccatggggctggagaggtaaagaagtaaagcaggctgggtggggactgtgacatgtggagaacatatgactcatggaaaggaggcagttgcaaaaaccaatgtaataagaccctccagtattttaggaaaaccagaaatgcaaatattaagggcatcttctcatttttaaatattggcacgcattcaaaattttaaacctggtgcagacctaattgaaaaaaaaaatctgggggccagcacagtttagcggcagccagtgtgtgtcctctggcccagatcacccttcctgagcaatgtgctatgacaacggagtacacatgacacatttgagtggcatgatccaggaaacttagcccaacgccagtctgacctattgctaatggaatgcataactgccgccgtcctgcccagtggccgggcatgtgggagaccattcgcatgcatgactgcaatgagctgcacgtgcacagctactccaagtctggaccgtaattctctccctgcctcactagtcttctgctttctataagcagtgttggcataatcagtgccctgtgacatcagatgccatgtaatattcatcatacggaccctcctgacatacttcagagaagcaatgagatcatatgaaagggacttaacaagccatgaaaccacacagacatcaaatggattggtttctggcttccccagccccaagcataaattcaaatcttccaataatgagtatattctttagagagatccaaaaaaccccagaagcatgacaaacaggacagacacaaagcagaaggactctcaaccagatttcctcctggtacaaaggcccttaagctgtgtccaacgctgccctgcggaagcccaggcgccactgaaaggccccgggctgcagacagctcagcttgggacattctgtccttggctgtatttcagcctgtgttctcacctgttcactgacttctttgcctctccctccagttcctgtaaatctacagcatcctcagtatttgccttgagcttctctctcacttggttcagctctataccttcctgccttctgccctatttgcctaggtcctccacttcaaaggttgcactgacctgccttttctgatgtctctggacatgctccaccttcagaccctcagctccaccgagaccaccagcatcaggctccagcccatcctgtgcaaggcctccccttttttaaggagctagtttgatgtctgctcatcttaccaagggccctacacccacatccataacttgctagtgaagacatcaacctaggtgccacctatttgggtcgcaaagattccctctcacctcatctctgaagatcactgaaaaccactcttttgattccctcagctatatattgggggtggagaaagggagggatgagagaaagaaagagagagagaaaaaaacaatgcaaacttcctaccacaaatgatgttcaccccatgtccactgaatcctattctgttcaaattgggtgctgagccagcagttttctaatggctcctcaagtcttgtgatttttttcaggtttttcagggacccaggt

SEQ ID NO: 45213 - DNA, 1550 bp, Homo sapiens
aacagctccatcggatctgttttgtataccatagtcctgcatgaaactattgtttgaaaaacttattccaccactaaaaaattaaaatttctgtgttagccactgtgaccaggagcagatggagcaaggcaagctcccttactgaagaagcccataggataaacttgaggtaagcaatatttttggcatagggcaatttggaaagtattgggctaaatttttgtttataatgaaaagtaacttattgagtctcacattaggtgtgtctgttcccacaatttaagttatctactttgttgaatagaagaataacatcaaggaagtattactttttatatgcttaagtatgaatgtctgtttccattttcccagtggtgatatggggggaaatttctaatctttccttctgaatttagacaatgaagcatttctcagaggtgtcatgagggcctgctcatcacttgcttagtgcatagacccttgggggcatctccagaggattgccaacagggcaaaacctcttaaagcagtgcccaagctcctgttttcttcacttcattgttcaaattcatatttctcccatgtggtttgtagatacctcctaggggttggtaagtcccaatgagtcttatggacaagtgagcagactaggctagcagtggccaaacaatacggagcctgcagggagagttgtgttctgtcagctgagctcaaagtctaaaagccctcgcacaccctcagctgacagttcaggcagtgacagctcattcgggaaggagatttgcagttgtgaacactgaccagctctaaaagaatagaaaagtaattaatcatatcattttagagctgtgcattctcagactctcagaatcagagcctcttagaacctcaggcccgggagaaagcagagaggctccaatattgcataatggttaagttcaccagctttgagtcagatagacctgaacttgagaccactcaaggactctacctaaaaggaaatttactagaggacatgggacaactcgcaataaggaagataaggtgtaaaacaaactcaaagcaggcagcagaagttgcagcaaactggcccacgaaccagggctgtaatcaattcatcctgagcatttcatcagctctcacacataggttcaggattccaagtcctgggcaaaagattccaatcttttcccttgtctccccagggaggtttgaagaaagtttcaggcatcataatgggaggggaaaacatcttggtttaccatgccaacaaaaccataaacactaagggtgaggctcccaaaggaaagccaggggctgtggggaggtgagaatggctgcctgggagcataaacaacagagatctactatcctgcacctgccacagtgttgctcagaggacagacagaaatgctccacaccacggccttagcatactttgggacacaaaaaaagggcctccataaacatgagtgccttcatttacaactcatgctcctgcatggagctagatcccctctagagcacacctgttgaagcaattgccacta

SEQ ID NO: 45214 - DNA, 1665 bp, Homo sapiens
ctgaattcagatgtcccagactggtcaaataatggtattctacttccctgtcacaaatggccatcatgtccagagcttttgtccaaagtgctagggaataagacactcttttttctgttccagtcaaacacaggggagagggaagataagatgtaaacttctggtcaccaccctgaaactgcatgaagcttaggaatgaacagggaaagcacatccaagagatggtgacatctttgaggtactatcaacctgctcctggaaccagtgtggtttttaagtcacttgaaccaatacatttttttaaaattacttaagccagtttgagtttcaccttctgtttctcaaagtgaaaagaacctgcatacaacttcttgtacatgaatattgatatcacttcccagatttgggacgttttcagctattatttctttagataggctttgtgtccctttatctctctcttctctttctgaaattgcattatgtaaatattagttctcttgatggtttcccatagatcccatagacttcttttattcttttttctttttgttccttcgactggataatttcaagtgtcctgtctttgagttcacttattctttcttctgcttaattgaacctactgttgaagctttctattgaatttttcagtttattcattatacattataaatatatacaattattatttatcaattaaaaatacattttaaaaggaacaaatgccatataaataccaactccacttgacttatagtgacttcctgaagaactatattgggaaaaaccctggggccttgtctgggctcatgactcatgaggaaggtatgcaggaagagggaaaaggtgaaaattgagcattccttgactaagtcgaaacccctgactcagtcttctgcctcactctggactaggcaatgcttcatatatctccaaggttggtctttcaggttggcatataggaaggaatttgtcagcatgtatccctgaagggtaaatgtccacatttgcttagatgtttagtgggtattccaaccctcaaagagctgtgcttggtgctgtaaacaaatttgttcccagtatctgacctaagagaacttatactcagaaggaggcatctgcttcctgcttcaccttgaaggttatgtactccactcacttctttgacctcaaataatttgtaatctgcaaatagtcaaagtgagcaatgatgccaaaaagcataatgggttatagaggtaccatttacaaagtgtataaaacaggacaggaagtgaatcctagggatggaagcaatggaagattactcccattatttttaatctggttttcatggttccaccaacctgggcaagctaatctggttaactgagactcttcttgatagaacttttattggttctgactccacttgacatcctcagaaaacaaacactgaataagaatgagctacttttctggaaaaaaaaaaaactattcactcaaagcacttaaaatcaaaacacacgcaaaaatatattactactcatttgagggtaccctgttatgaaggtataatttatatataataaaattcattattttttagttacagagttctatgagttttggcaaatgcattcaatgccatcactactacaatcaagatatagaacagctcca

SEQ ID NO: 45215 - DNA, 818 bp, Homo sapiens
tgcatgtgcatatttgcagcaattgagaaagatctgtccaaacagaagttcaagtcagaagacacagaagtttcaactgattataaagctcaatggaagccaaggacagatgtggctgctggggagaggaagaatcaaattaagtatagtaacatccctctgtactcttcacccaccggccaatatcaaaagcctcatgcagttgtgggaactgctctttcagagaaacagaaacaaatctggccagaggagagtgagtggtcagtgggaaaagggaggggatctgtaacctgagtcagatggggaatggccagtggcatggtttccagggctgtgtgagccttcttcaaatacacgatatgtaactgttctggaatgtgtgtgcccctgactgtctcccaggaatgttgttgaaaggactatgcacgggagattagactgaatagcctcaaccgcaacgtccctcccagcttggggcttttacagcttgtggtgggggcaaaaccacatctattctccatggtagtagattagataactttactaattagacaactggaagcttctccttcctggagaatactctctagagtagacagccttttgacaaccaaccacatctctaagagaaaatgtgtgccaattagtagacaaccttgatgactagaagatgcaatggcggctcaactcaccactcccatctcaccctttcatacaaccaatcatctggtcagcccaagaagctagaaattaagggcagatggtctgataataaaagctaagctgatgggcatcagatgcagggaattatggctggt

SEQ ID NO: 45216 - DNA, 765 bp, Homo sapiens
ttagcaaacacttccaggacaggctaggaggctgtgctggccactctagttttttttgtttgtttgtttgtttgtttgtttgcccaacatccaatccccatctcctgagtccttagggagcccctctctccctccactgtggtccttgggacattgctaatcacagtgccctgcactccaggcacagaggtggtcccttactgaggctcagccaatcatgaaacatcattgccctgggcacagtgcttcagggatgtgtacatgacccaaacttggcctacatctgccactccctgggactttccactgtgtctcaataaggaaaatagtccctctgaagtggcaggttcagaggtggacttgaacctgccagtagctagaaggggaaaaggccaagaaacaaagcaaagtagaaacatacagagtcaaggaatacaatgagaggtggggaaatccctgatgatgattgagaaacaggatccagagctatctgcagttaaatttgtagctcagccttcacattctttgagccagtaagttgccttttttgcttaaggaagtttgaactgagtttttccctttacaatccgtggagttcttggttgacatgatcagatcacacactttgtccctgaaccacttactgggagctatggggcagaggcaagatggctagagggtgcttcactacccccggccctccctacatggtaaagatgagaaacagatgcttctttgggtgagactcaaaaaggctgcctggtt

SEQ ID NO: 45217 - DNA, 1281 bp, Homo sapiens
aatgtgtcctgacctctccatggctactgctattccctccacctaaaacctacccttctccacttttcaagatattacttatccttcaagggcctcctcaaatgctaccaccttgataaagtcttccctgacagatcacccccatcctttgctgaaagcattgtctcctttccctacaaacctccccctacagaagcctgccacttcttccatgaacacttcctgcctttgcttgctgtggctttgagctttgtgagaatgcaaatccctagaggggaatttagttgaagaaatctgtccattacatcaagacccacttaataaattcctcctaagcaatctgtgccaggaaaaaaattgctccaacagatacatgtgtttatgttcttttgtcagacagtgagaacctcatacagctttcccctttttactcagctaccaggaagcttagtactaaattacagtaaccacccccgggtgcatagaaacacccgtttatctgtgtctgtagttggtctttgttcttgtattttttttaatgttctgtaggagaaggtgatttatacatgctaaataaatatagcattacagcatgttctctttgttgaactggtcattctgcaaagggacaatgaccttatgtgtacaggggtttcctctgacacctaaaatatttcccaatcttccattcaatatcacttatattagtggtaaagcaaaagtggatatttatttcctcccaattgtacaaataggaatctcagagtttaaaactataaactattcaaattaaaaatcctaatctagatcaatttacagaacaatggaataaaaatttccaaaagtttactcctccataaaagcaatgaaaacaggcaaaaattatccaaataaaatgtttcagaactctggatattaaccaaaggtttgcaaggagtgtttatttaggaaaacggcggaatcttgttacgaaagtgagcttcattgcttttcaacttgccttagagacatcctgcttgtccctagctctgtggtacacttaaaaaccaacagcctcacaataatggtagctggaaaaaccagcaacctagcaaccactgaaggagacaatgagcttgaaataccccaaagttccatccccagagaactgttactgtttgatctgtttggaagttccctggaagcctctgctcacagggcttgttttcctttaacctcactcagagctcactcagcgcagaacagccttttccctgaggcatatgtcaaaaataattagta

SEQ ID NO: 45218 - DNA, 722 bp, Homo sapiens
tggaatctttgacttcctgtccattggtcctcagcagtggccttcctctccattctcacccttttctaagtgccaccgtgggcttctcgctggtctcctgcctccagattccccctgatgatgcatgcctcccccaaagccaggtttcatttcctagagaaaaggtccagtcatataatatgtcacccttgctcagagacatgcagtagctccccattctctgccaggttaaggaaagggccctcacacaggcattcccaggtttccagagcatggacccacctttgctgcaccagtgaccttctggtaacttcctccaaactacatgagtcgttcttcaagcactgactcactttcctacctatgacctcttttcccatcaacatctgttgaaatattttacattgtgcaaagcttaattcacatgtccccttcttcatgaagttctcttgatatccttttcttccttacaagtcccgatagttctccatacctctccaggagctcagtgagtggtcttccttgtttatagttatttggactcccacatttctacatagaaaaaaaataaccttctgtctcctcctctccccacgaagggcagggcttacagggagcttctgccccttggtctgctctcttcattggctatttcccacaagagaaagaatttaagtctctgttcagatcgttagacatttctggggccacattttcccagt

SEQ ID NO: 45219 - DNA, 592 bp, Homo sapiens
taccttttctatgtttagacaaataaataccattgtgttacaattgcctacagtattcaggaaagtaacatgttgtataggattgtagcttaggagcattaggcaatattatactctaggtatgcagtaggctataccacctaggtttgcgaaagtacactctatgatgttcacacaacaagaaaatcatctaatgactcgtttctcaagaatgaatccagagttaagcaatgcatgactatagttcaaagtagttcatagttaaaacagatacaaatcaaataaggaaattgaacaccaagagaaaaaaaacaacagatgcaactgatcagtgaaccagcactgcaagaatgagaaattaaaaaactatgaatgaaagagatagaataagcatgttaaaaggtagacttcatagtaagtgttcttatcacaactttttttaaaaagggagaaaaaacacagactaaactgcaaagaaatgactattaaactgacagcaaaattctaataaaattagaaacaaaaagaaaatggaattatacagacagcacaagtaaatggtattgggcaacaatttgtataaacttttaaa

SEQ ID NO: 45220 - DNA, 1376 bp, Homo sapiens
catccagaagtccaggtatgtggtgtttaatacacaactggaaggtactggtcccttacttgtttcactccctatcctattttaggccacatccacatcagccagcaagtcaggaaatgatcataggaccacactttgaaaacacacatgggccagtgaaaccgagtgcatttgcaaatcactgggacacattaacacaacacagattctcagaccttgctcaaccagtgaatcagaatccctgaaggtaggatcactggaaattttattcatatgtcctaggtgattctgattagctgaaatattggcaaacactacctcaaagctccctttcacaaggatgagggataaggcatagaatttaggggtcctcaatgccggagtttcctttcttaatcctctgaagcttctttaaactttcactgccaagccagcagagggtagcatctgcagggcatttggactacagagaacataatctgcagtaacctttttgattcctcacgtctatgatgataacaaataacctgtaatcgtacagaaagtccctgtccgaagtcatggattcattgcatccttacaccatgtctgcaaagtaggtgttggtccaccttcgtgtacgggaggaatgtgttgtctgagagcagtcaagtgacatctctaaagccttatttataataattggcagtgatagggtttctcacacattccaggaggggaatgaacagaggaagaattacacatagtagcttcatattttaaaacttacgagataacacacacacacacacacacacacacacacacacacacaccacagcacaacctttactcccatacctcacttccaccttcggcaaccctgcctaataagaaagtccaggatgcttccaacctacacagaaccacattcttatagaggttatgcaaacaagtgaagcaaacttgtcatccacacacttacatgcacagtcagcaaaagtgagggaaccgtttaaataccacaggctagttctcaattcttgaagtgcatgttaacaccgtaggctactacatttcaaacctcaaagtacaaacaagctgcctgagaatcttattaaaatgcagattctgattctgcaggactggggcagggcctgagtttctgcattttttagcgagctcccatgtgacataatggcagctggtccatgggccatactttgagttctaagtccagagcctatgtcaccatctagcctctgctatttctctccctggatgcaggcatgagatgagaacagtggaatactgacctttccatttcttgccttttattaagtgagtatctctccccatggggggtaattctagagtttaaagacacatattgttca

SEQ ID NO: 45221 - DNA, 5511 bp, Homo sapiens
gcaatatctggagacattctggttgtcacaactgactactagcttctagtgggtagaggccagagatgctgctaaacatcccgcaatgcacaggacaaaacccataacaatgatgtatcctgctcacaaggtcaatgatgccattgctgagcaatcctactgtcttgtagtcacccataatcatcaatatctttggcaacttactgaatgctttttaaagatacttcaacaaatctaggtaagaaaaatattatagacagccattcaaaacagaagccactgaggtcttgctttccattgggcaggaaagtttagtggtcaaggggcccagtgactgggtttgagtgccagttctccgactgacaagctggatggaattggacatgtttctctaggtctctcagattttatttcctcaagcatcaaatgactacaagcccaacaagagcagggaccatctctggggcagcaaagtatatacattctcctggcacctaataagcacttgtgtatatatcaatgaaacaaatggtgcctgacttacaacataagttttgcaatctgatggtgagtactactttttaaatcttgattagagacttgaattttagggattactgttactagctgtgccttatcctggcagagcaggacttgtgctccaggatatatataggatcttatactatacacacagcagtatatagcagtgggaaagattgcaagctctagtataatctggtttcaaatcttagccccactactacatgagctgagacatttgacttaccctctctacacctcagtttcttcatttgaaaaatgggggttataacaattcttatctcatggggctcttggaagaaattaaaattaaataagataatgtatgcaaagccctttgcacagtgcctggcacacagcacacgctcagtaaaagaagtctttattatgcttttggcctccagcctccaaatcaagggcacctgattagttacctctcaaaagagaggtagagacacagtgctgaaaccagaacctcaccccagagaccaagctgatccaactcctttctgctggatggaaagtcaggagctcaccctcctcaccaggggcttgggaataaatattccatgctcttctgcatgcctgctttgtcatatttggaatacagccccaatgatgagatgcctagcatgttcattctgctacaagaccaaaggacactaataaaggtgtcaaagctgacaattgtttggaaagcaaagaaagaagtgaggaaaggaaactgcagcctttgattcaataatgaattttgcataaagggctccatattacagtgcaccagagaccatcctgccacacacttcacgttctattttttatgagaaagaggaaaatgaggggaaattttcaaacagatattaggagagtattcaagaaagtaagttcacacatatatcttgatttaagcaggtggacccaagccatttatattttacagcatagtaaaagcttagagtggaaaagaagcatctagtccaatcccttcatcttccagataagcaaattgaaacacctggggattaagtaacaagttgcgcaccgtcagccttgtagtggctgacttaggaagaagagccatggggcttgtctttttgtctaatccctcctgactcttggactgtaaggctagaaggaaacttggagttgttcttctccaggggcacacttctctctgggcttgtgaaattcattcatttactcaagtaatagttactgagcacttattatgtgccagatgccattcttggtacttgagcacacaacaagctctggacagagaacagaacaggtgcctgctcctttttcattttcattccagtaggcgatgtcaattaacaagtgcacaaataaagtgtacagcacaacttcagatagcgttctgtgctctgagggaaataaaatagagcattgtgacagagaggtaccgagggagaaaggacaactgggaaagcctctccaagaggcaacattcactagagctgagacctgaatgatgagaaggagccagtcacatggaattcagaaggaaggggtttcaggtcagaaggaacagcacccgtgaacaccctaggcaagcgtgggatgtggtgtgtacagaaaagaagcccgtgtctggaacagagtgggcgaggggttgatgctagaaggggaggtcagatcagtgggcagaggcaggacgctgaggtggcaggcacttgccctggagcccctggaaggtagaaacaggactgagataagaactggaggctccaggctcacaagttttatggttctgtgccagccatggtgtgcaggctcttccgtcctggagaccttatgctgagtcaccaggtcagttatgggaggtgccacactggcccctggacacgttgtcctcacactcaaaacctggcaagggacaagctctcgaaggccaaaggagtccccaggagcagagagaccagacagtattgagatggagagtggccctctcccttccctttagccaccatgactcatacaagcttagtcagtcatgaatcagccctacaagcccagaagaagggctcagtaaggcctaaggctaattttaaaatcattattattaatttttaattatacaagaactcatgaatacattttcctggttaaaaaataaatacataaactaaaacatggtccctatagctaatgtccccatagactcctctctaatcctgtcatcttgtcatcaccccccaacttctatcccactattactagtagttcagtgaatagccttccagacaatttttttttttgtgagacagagactcactctgtcgccgaccatttcttattccataaaaggcatccctcaccagacaacaagtcttgaatagtccaggttactacataaatatgcaccccatttttcaaattgctgtgtaatattcctcagtatgatatgccacagcttatctccctgtgaactgtagtttagactgttcccaatctttttgtattacaaaaaaaagttgaaataaaatttccttttggtatatttttgtgagtatgtctctacagtagatgaaagggtttcctcttagacgtaattcacaaatggaaactgaattggtcatgggaatttctaaacactgagtggctgtcgagagccgggagacttgtctttattattactgccattgtggactcactgcatgattttacccaattcctaacttctttgggactctgtacaaggagaaacttagttttgatgaacgctaagaactcttacagttcttgcctcctacaactctatgatttggggtatcaaacctgtggggttctctcccaagtcgaggtttgattcccattccaaggttatagggcacttgcaggagggcattgctgtgggttgcaacacatcaagatcacagtgttccactccaggcagtagaacgtactgtacagaggtcaatggggaaatgactagcacacacatagccactgacttctgcctttccttttccatgccctttctggatattaggggatatgatgtcaccttgtataaatgctgtataaatgcctgaacctgaacccataatttataatgagatgtaaccacaacctactctgcacagactttagtttacaaagcacacagtttctcatgacattccttgaacaatcctgagatatattccatgaagggataattataacatataacaatgtgcagtgaatattattattcattacagcttagtagattgaaacaaagaatgaattgattgcccaaggtcacctagctaggaagtgagggcaaactagagcccagatgttctgattcccagttcttttctcttgcacagggcaacaatggacttcactgttgtgtggctgtgaacccatttgtaattattaataactagaagagacatgcatcctcagcagattctaaagcatttactggaagaccatattcagagacagaatttaggtctcaaagagccaaggaaataaagagggaagaggaccaaacattggggaagggggcatgggagttaattagctgaactccaaactgaaataaataagtccatgttgtctgaaaggcttttactccatggattaatgaaagatgctgttagggatgatttagctagactggtcatggaagggaaggttttcctagagcagaggcaactaaggtaatatctagagcataacaaggttccagctgtgtaaagaatcaaaagagcaaaccaggtataggaagcagtgagtacaaggttcccaagatgaacaaattcacgggaaggtcagcgaatttcctctgctcaggaaaccaaagggggatagggtaggggcatgggatagagtgagccttctcaatgcttgacctgggtagtcagtgctagaggagctctgaggacagagtcaagaagatggaacttaaaggaatcttgaggaaataaccagctttattcaagggaaacagaggaggtgggcactacaagcaggagaactgaagctgaagagaaaatgtgggtcgataatgagtaacccacaaaacctggcaatggacaagctttcaatggtcaagggagctcccaggagcagagtgaagcccctctatgcctaatctgtaaaatggaacgtaggatagaatgttccctgacatcttttttagatggttctaccaataaaataaaaaacagcccagagaaggttagccaagggaatggcagcactgagtccagttttcagatctcccaaattcctatccagagctgcctccacctcagctccttccttctgctggaagaatgaccatcaggaaggaggtttgggctgtggccacatgtgagtgtgaggcctcagaagaatcctatggtggggccatctgcatggagcccccctggagcccatgctgtagcctccggcactctgatctcaaagccagttcctttgtttccccaagaaacttcccaaagatgttgggagccactttgattttggttttgttttccttaacatttccccacaaaacaatgtgaggaacaagaggaaaagcatggcccagtcacaaagctatttcaaccagaaaaacaggtctaaatcctatcaattctacctaggtttcagagatccccaagagaggaaagggggacagaagctcagagagcttcatacaaagcaccactccctgtgggaagtctgttctgtgttcagggcctggggctcagcacaaaccagtggtgtcccttggggaacaaaagtccctaccccaaccgagaatgtggtcagatctgccaaacttcaaacttggttcaaccgctctatgcttagaaccaagaacactagagcgaaaggaactgaagaaattatccagtctaatccttcaacagcatttgccatcacatatacaataccctaaagaacatactgtatctattttctgtaattttcttttta

SEQ ID NO: 45222 - DNA, 4503 bp, Homo sapiens
tctacaatacacacgtataagacataattacaaaaaaaaaaaaaaaaacaacaacaacttgggggaagagttagttgaccatatgaaaactagggtggacctgtgaggccacatacctgctgttctcctcagacggggaagtgtttcagggtggggcgcctaggcagtctactcttagggctgtgtaatattaaacccagaaaatgtctgggttgctctgtcaacaaatatttattggtagccactatatgccgggccctgtgctaggtattgggggcctgtaggtgaaccctacggacagacccattctttcacggagctaacattctcgtggggaaaagaggtaataaacaattctaatgatgaatcagcgatagaggataaagggaatctgtgagggaagaggggacataaacgctgggaggctggaagagccccttacgtgttatccacttgtccagacgccatattcatagttgagaaagatgaggcagagacggtagtgaccggcttgagcctagactgcgccaagcttgccagagcagagccgggtggaaactgtcttcctgcaaagccaggttttccttcacggcccctcctaatgatgtttcttttcctatcattgtcgagcccttagaaccccaggatcgagggagggaaaacaagcgctcaagcactccctcgttggtcccaggacacaaggcctcgtccatctcacaaggcctcgtccatctcccatcacaccctagggcccaggcagaagcccggcggggcggggcctcggacacgcgccggtgcgtccagcaggtggcagcagcgagcggccgcgccccctgcgctgccaacccgcgagcccgcatcatggatgtcgagctcccctatttcgcattgctagccctggaattcgagaccccagacgaggaccaggattcatgaaatcagtcgcaggggccggggcaggggcctctggctcccgacactggccgagaggtgggttccggggcgggtcgctgctccttgaagccgggcggggacgcgctgcccccgccctgcctccctgtggtccacaccccctttgggctccggagccgctgggcaggaatagtccggggtgcgcgcgagcaggcgctgccaaccccacttctgcccgggattccaatctgaggagcaggaggaccggggcgccggtgtcctgccgcctccttctccttgctctcacctgcgcctattagtccacgcgccttcaaggccaggggctacagcccagacagagaggggacagcagagggagagagagcacctgaggatacagagctggcactggactgccttttcaccccccaggtgatgagtgaggttcgaagaacggaagatttaaaaagcagccggggcctccgtattgaatgaaagacccagtgcaaagacatcaccatgaacactagcagtaagtggatcctcctctcctttgccatgggaacaggggtgggggcgggaggtgagggagcctgcgctcgggctgcctggaaagaggaaggaagcctggcatctctggacacatgacccccaggctcttttttggtgctttccgtgctccttggcagagggatagcttcatgactctggcttttcgtgataattttgccaatattttatcagcggcgccggccgcctctcctgggaaggctgctcgtctccttctagcactgcctgggaaggcctaggaagcagtgtgtggccattgtctgactgtgggggctctgaggagaactccctgcacacatctggaaaaccatggagggccctgcctgtcccagaggtgggaagagcagggaggctggcctgtgggcaggcgggagggtaggtgggtgtgggcaggcagtgggctgggaagccgcagtttgataaacaaataatcgccaagccacctttgggtctggagattgtgaaagatccagctcccgagtgcctgcagcccggtgggcccagggctggtttctctatgtacctgcaggctggttagctatccttgagaacaagaagacaggaacagccctttggccaagggctctaacatgccagaggcaacaactgcttgcagagccaggaccagatattttgctgccaggtagggcctcagctactgagaatgcagtccgaaattcaagaaggcacagtctgtttctcttcaatgtagcgctgtgacctgggagggcatatcttggttccagactcactctcctgccctcttgtcagcttggcctgtctaggttattccagcatcgcatagggctgttgaaccagagaacccctatgaacagtcacttccctgggtctatgactttgttatcagtcccctctctgcatctcagactgctcatctgtatgatgagaggggttgaattagaaagccttctaatcggccaggcaccgtgttccatgcctgtaatcccagcactttgggaggcagaggcaggtggatcacgaggtcaggagttcgagaccagcctgaccaacatgatgaaaccccgtctctactaaaaacacaaaaattagccaggtgtggtggtgtgggcctgtaatcccagctactcaagaggctgaggcaggagaattgcttgaacctgggaggcagaggttgcagtgagccgagatcacaccactgcactccagcctgggcgacagagtgagactctgtctcaaaaaataataataataataataaaagaaagccttctaatctaagaatctacactttttttcttaaaaagctagagctgagcaacaaggccagaactatcaagaccttattgaagctgtatccagccaaaacctactatttcctcacacaccccaccccacccccacctcctagcatggaagagaaaaaaaaaagcaaaagctactgagatgaaaataaaatatatttatttactacgtatttgtatgattcatctctctgctgtcttcctttgtgtattgcatatctatgctaagctagcgagtgtggctggactccctctgcctcttacagccaaagaattttgccttttgattttgacaggctggaatggtgttttggcttcataccaggctcaggaaaagaggaaaatcctgtagcctctatcagctagtgggtcacatgtttgcatttgcatgttttcaggcaaataaagatgtgagttgcctgtcacttctcactatctctaggaaaaaaaaatgtatttatgagagtcctttcccactaagtgacagaaaagaaagatggctcatctatttttcaaggaactaagaaaagaaacaggcaactgactctgcccttttctctctctggaatgctaaggaactcttgtcctattagtaacactgagtattcctgaaagaaggaaacagactatccttcttttaagaaaaagaaagaaagaaaagaaaaaagaatcaatagagttggatactgcagaatatgaggactggcaaaaatgccactactttttataagcagggagagtgtgtgaattttgcagtaatggaaaatgaacagaggagaatggctcagcagccttggaagccctccgggttccccccaggaggaagtgcttctctaaacagacacctgggggacacagcaagcacagagctttgagggcttaactccatcatcatggaggtacctcccaaacccacgagtctgcaaatgcagagagtagacatcagacctcacaagaaaaggagtaacagagccatagggtgatatggatagggcattggcaggaggtccttgggtcacctgactaagcaaaaaagctcccctttgagatgtgaaattcttaacttgatcctcatgcctgatattgtccctaatagaaactcttgcttagtttttctttcacttctatttatttagtccttattctccaccagccaccatgctaagcactcccctgattgagctcaccagactgtcccacccaacctgtgagatgggtgtttttactcattttatgggtgaaaatttgaagctgtgttcagaaacgttgtagttaatgctcagtggcttcttcaagtcatgcagttaattgttgggttatgaaaggtacttggatgtgtaacacatttgacactgagtacaactcctaatcaatgattcaaatgtcaacactgaaatagaggcaaagcatgagattacaatcatccctttgtacacatggggattggtaaaactgtgcatactaagtcctgcagtcagccctgtggaacctgcttatacaaagagtcagccctcagtgtaggcaggtttcaaattctgcaaatactgtatttttttaaatttcaacttttattttagattcagaaggtacatgtgcaggttttgttacatgggtatattgcatgatgctgagctttgagatacacttgattccatgacccaggtactgagcatagtacccaatagttagtttttcaactcttgctctcctccctcccttccccctctagtagtgccca

SEQ ID NO: 45223 - DNA, 8776 bp, Homo sapiens
ctgtaaggcccgatgtggcctgctcctggccttgctgaccagccccatcttgtctacagtgcacagttctcagtgtccttgtcacatgtgccttctcccattccctctaagggtttgctcctgctgactttacatgcatggttccttctgccgagaaagccctttccccactagcaccagcccctctgcccagccccacacttcacacttcaccaaggctggcctcctcaccctccagagcatcaagtgcaccaagatcaatggtaccacatactgctcctactcattttataggcttcctcctgcctctagcccctttgttggtctttaccatggatttgtatgctaacaaattacttttttagagtagactttgttctgttgaagagagtattgaagggtcaaataactcccacaaagatgtcatgggataagtagagaccatgctgggacagcaagaacctgagctttggggtatggattctcgagttcaaactcaagatctatcatgtactctctctgtggtcttggacagaatagatcatgtctctgagctaaattttaccatgtataaaatatgagcaataaatgccaaggtgcagggttcttctaaggattcagcgaaataacattagaaactcacaggcattgggtctcagtgaatggagttgagtctgaagttgagttgactgttgagtaaagcaaagttctggaaagatggtgtcattaaaactaaatcctctgattaaaaattagtctgttcttctggtattacagtaggtgatggattttctacataggaaactcatagctcccgggaagcctacaggaagcttattaacctggcattgtatatggcatgggttgaaaaagggaagacaggaagttaggatcccaattgtcctagttcagaaaacgtctcgggccaaaatttggatggttataaaactagaaataaggggaaaaatcttttagaaaataaagactgcatggcctagccactgattgttttataaggcaaagaggaaaaggaggattctattaggtagggtcttggcagagaacagattggcagtttgagaggagttaaatggaaggactcttcacaagtgtgtgagaaggacattaagaaacaaacaaagagaagcaagcatgacccagtaccaggagcctagtaactgtggctcatgacccactgctaccacaactgcccctagctggacccagagacccagctggctatggggtgaaggctgcctgacaggaactgtggctgtggccccaggaaggcagccagcctagttccaaggaaagaactaggaggataaatatcctgatcctcctcttctctctccctcagatctcctatgggtacctcccattggtcaaatccaatcaggagccagagggcaaggaaggcatttgataggttcataatggtcagcagcttcccagggcacagtccagagtagggaagcaggcagaacggatctggagaggtgagggagttcagaatagaagacacccagcacacggggcatgatgaccttcctctgctaatgccattgcccagatcaagaaatctaaggatccctgaagacaggatcctgacacacaagaacgcagtaggatgccctctctagaaattctacatctgcaaaacagataaagtagaagtgattatttactccacaaggatagagattgttttaaaacagtacttcccaaatgaatgaagcagttgttgacagatgattacctgaggctaagaaggggttagaggaataacgtaaggaacaattttaaaatcacccaaaatgactataacacatctcagaaaaatcacaacgtgatttcaagagcacttggattgcgtaaaggaagtgatatcaattctgaactccagctttcctatctggcaaaagctttatcttgctgagatagcatctgctgtggtgaacggtcaacaactggctattacccaactttaggcagaaaccattgtaaaagtacagaaaacaaccagaagtatctgaacaccttcgactttctgggtattttgccagataaattcttcctttgcagttcttaagggcacagactgaagttaggttgctggactcaaattctagccctgcttgtactttctgtgtatccttaggcaagtcacttaccttctctgtgcctcacttcctcatctctaatgataattacaaggaggcaaataatagtgcctctgtcagagaagagatataaagaataaataagttagttgtgaattccttaaaacagtgcatggcacataacaaaggtttctgaaataaatagtatatattagtttgctagggctactgcaccaaagtgctacaaaccgggtggtttaaacaacagaaatgtattgttttatagctctggtggctaaaagtccaaaacgaaggtgttagcagggttccttctgaaagctgcgagacaaatgtctactcgaggcctctcctttgcttggagatggctgcctttctccctgagtcttttcacatcacctttatccatgtgtttctctgtgtccagattcccccttccacagggacacccgtcacattggattaggacccatctaatgatttcattttaacttgtttatccctgtaaagactctattgccaaatacggttatattctgaggtactgaggggtagggcctcaaatatgagtttgtggggacacaattcaatccataatagagtgtttgttaaggaaatgactcctcaaggagattttcttgtgttttggtttcccctgaatgtcagccactgtccacactagcgtgagatgctaacagttggttactaaatgcaagtcactaagtttatctatctagtcttgatgtttaaaccctcattttgctatccctgacccatggaggtagaccctctcttcctaagaatctgaagggaagtgctcttacataggaggtccccacatgggaagaccccagtaatttagtatgtccacagccagtctgtttgccacactttccaccccacctggtcatttcttacaactgtggtgtttcaatagtgtaagggaagttagtcatgacattcgtttccaatcttcctagttcctgggcctgtccaacacagggaataagaattggattgttcatttgtttattcatcaggtatttactggacaccagctctgcactaagcataatgctggagatacaacagtaaatagaaccaatgtggcctttaaaatcatgggtcacacagctgggcaaaatgtgcctcctggtggccaatgtaaagggacacgtcttatttgccctacaccaggtttttagtgaatttgaattatttgccaacaatgggaaattgggaaatcagaagtgggatttctggctctcttaaaaacaaaatgaagtcggaggattttgcagccctgacccaatttttcttcctaacagcaatcaataggattgcctgctttggatggggtatatacttagtttctggcttgccacaattatcacttcctattaaattacacagtgacagcttaatatttttatgtcaccttgccactgcagtccagtagatgatccataaaacatcaaatatgtagaagtgattcttcacacagagatgtggaagctgcagcacatctgttaatgattatgggagaaaatcctgtctgaagttagcaattgattaacattgccatgatattaatgtcctcatgaagtgagcaaaaccctgccacatgtccttattcccccaactgacccattcccagaagggtgatgtcatatcctgttggatacagttaggcaaataacagggcaaacaatatcctgccctgacctcctggaggtcagttttgttttcagagaacctagtaaaagagagtaggacacagaacaaaggagggcaattctggataactgatcccagatctgggtaccttttctagcccaaaagagggcgtctgaggaggctgaactgttccagagaatgttctgacatacgggacatgcctggtccagttgagaacatctagtcaacagcatgagctctgtatgggttgggtgagtttgattacccacccagctaagggatgactgctgaaaggccacaacaatgattgcatgtggctactcacaacctttcctctgtcattatagagtcctcctgcttgagaaagtagatcatgccaacataatttcttctgtttagggcagattcttccttattcctcaggaagaaatcaaggtagcaaataattcacagaaagcaaagcacagtgtctggcacatagtaggtactcaaaagataattgatgagttaacgcattcatgaaaagcccactctctctaataagccccaggataaagatagataaagatctctttcctaagctctagggtcatctttctgatcatctgctaagatggctactagaatattcccaaggcacttcaaaatttaataaatttactctcttaagaaaacaaaagcaaaaagcctaccttagctcttacagtcctggttgatctatagaacctctatctacccagtcataagtcagtgattagaaagcagtcttctgagacacttccctttcctccactctcctgtgttccatctgtcaccacatctggtcatttctacctcccaaacatgacttgaactcttcccctcctcaatgaccatcactccctaatgtctcctacaccaggcatggcagccattggaggaagaggttaggggagcaggagttggtctcaagttcagaaagaggcaactgagcagtacggcctacaggaaaaaatgtgatttcaggccatatggacaggaggtgagagtcccactctgcagaccctgatcaggctctgtttgaaacattatattcagggaagacagtgatcagcccgtatattcccagaaatgagtgaccggaacagtggaaggacttgaaacatgctggggagaggatgttgaaggaacagtaggaagacgccaggcagctccacatgttggttttgtgtctgcctgagagtatggatggtccctcagtgatttcagattaggtttcacctggctccctaaacatctcttaggccttttttctaagggtgtcaccagacagacaaggagaacatacaggctccacatgccgccctgctgttcccaggggctgtggtggctgtttgtgtgcctgtgctacagccccaccttctctcgcagcagaatgctactctctagtgcctctatcatttccaaagcttcgtcctcacatctgcttaattttgtgcaaagcacagatctttctccatgggctgttactcttgccctcaccaggccagcagggccgatgaagcaactgctttgcaatagtctaatgacacagctgatctattttaagcacctgaagcacactctatcaagtgccaatcttcccgctgcaagtcacgctcagcttgcagcagcaggggcagcccaaggtctattcctatgttttgagatatggggaaacagcccagggatcccagccctgcccgtctggtgatagtctaaagcaaccataaaattagatatttttcacagtcagcatgagttgttctcgaaagagagttgcctgtgatgttagcattatatggtgcaggaacctcaggtgattataaatccccctttcaactggcagagacagagcctgggcctgttacatgtagggagaaggaacttgagaggcagcatttcaggaactgaagctcaatccccatcagaaattccttagactcagactaatgttttctcctcctcctcctaatccagagactcttttccaactgcagcctgagtgcaaatgttttacatctattattttatttaatccttacaacaatcttacatgggccttccttgaattctgtgtctagggaatatccccatgttatatttgctctcactattcttcacagagcttaccatagtcagtgattattttgttcattagctcattttctttgtttctttctctcatcctcctttgactataagccacatgatgattgtgtgacaaaccctgtctgttttgttcactgctgagtcctgcacactcaacatggtgtttgatgcagagtgatgatcacttataaaagcatttcttggacacatgaatgagcccacttacgcttcacaagagtcctagaaagaggacactgacattgttctcattttacaaagaaggaaattgaagcccagagaagagatatttggctccaaatcacaaagttaagaaaagtgatggagccttgagtgaatatgtggatggattcatttaatgaggaatacttcaatatcctcattttacataaaaggaaaatgagattcaaaggtaaattgcctggataaagtcacatgagctaggaagcagaggagcagatgtttaaactgtgttggtctgaccctgaggcctcctttccctcctccctgctcctcctttttaccatctttttgtatttttactgtgatggagatctccaggggaaacatggattgggatggctgatcttcccgttggatgccccagcactattcactcattcactcgggcagtgaaacaaatcttcacgctgtgagacagtgacattccatattctaggcaccatgaaatcaatgatgcacaggacagagaactggacctcagactgcttccatccagcatcttggaggggcagacagaagcatgcatgactgtgatgtgagataaaccatggcgggtgctgagagggaaggaaagagtacagaggaagacaggccaaattcctctggaaggcctgggaatgcttgttggagaaggttccattcaatctggtccttggggcagggaacaaacttatgttgtgtagggttgaaggaaaagaaagagcagtctagatgggcttactcattcctaggcaggcattccacacaccctaatgcacaattcctgagtcctgggcctttgtctgggtactgggatggagaccgaaataaaaagacagaaagccctcatcgggaactgttaggaagtccagtttgtatacgctagagaatatgagtatgtggacactgagaaaacgctgggagttggtgaggatcagctctttgagagggtcagatgccacgctaaacagtatttgttacaatctacagccaatgaggagtcaggagaggtttggagcccagtagtgacctgcccagagctgtgcattatttaggaagatctccccagcaacacatacctcatgcatcagagggcctggaggcagtgagaggcagacctagtgcagcaatgcagttgtgagtggatgcgagggagagtgtggggatgcagggagaatgagctcccagttgttctgcagccaagctgtgcatttctgcaactatgcccatgggtgggcttgctgtatattctaatacctgggactgtgaaaactggtactttgaaaactaggttattgaccaaactgagaaggctagatcgtatatttgataagaagttgagctatagaatcagactgcctgggtccaaattccagcttgacccttattagctgtgccgccttcagagagttgctttttaccagacccccaaacgtcaggttcctcttaagatggggatgataggtgaactttaagtgagtgaatatatgtgagatgcttagcacagtgcctggcacatggaaaatactcagtaatgattaatagtgataagtaatggaacacatttgaatgtactattttgggaaaaccccttttaaagatacaaaataaccaacacatgctattgttatgatgtagtcaccacttggtcattccactaggaaagaagagtggtatatatattggtaacacaggactttttaagctaacatttaaggagcacttattacatgtaagaccctatgcaaacattttgcctgtattatctctttcagttcttggcatgagtcaggtgtgaaatgaatgttggagagggcaattctgattaagcagggaacatgtcacattagtccagggactggcaaacctttcctgtaaagggatttgcaagccacacagtctctgtggcatgaaagcagccatagacaatgtgtaaagaaatgggtagagctgtgtaccaatcgaaatgtatttagaagaataaaggtgaagggtgatttggcccgtgagccggtttgctgacccctatactaaatgacctcgaaggtcttttgcaactttgagattctagtctgagattctagtccaaaatgatgacaaagaaatgttcaatccttctaatttagtttatctctgtaatcacaaggggtgttacttcaaataagatagagaaggtcattgggaatagacacagagaggaccagaaagcgttccattctttgtgttgccttcatagtcagcacacctcattaactcacactctgatattatatgagtcttctcaagtggccattaaatgacaagctgcacaggctgccctgggatctgcagagtacacagttcttcagaggcagagaatgatactcagaccagagactttcacatttgggaaggaacatacaggacaatattccatgccaacacttcagtatgcggagcaaatcctccccctttgctcccgattcacatttcctactcacagcccacatgccttgtagcctaatatgatagccagggtgtctgctcagcatgttttatccttcctccttctgattctttataagaat

SEQ ID NO: 45224 - DNA, 4734 bp, Homo sapiens
gctgtcagcttgattcaaaataatccaaagctggaaacaacccaaatgtttatatatagacaaatggataaacaatctgtgattatatttacacaatggcatactattcagcaataaaaaggaacaaactattgacacatgccaaaacatgaatgaatctcagaaacatgctgagtaaaagaaatcacacataaatgagggcatactgtatgattccatttatatggaattcaagaaggcaaaactaatctatgtggacagaaattataacagagtttgcctttgactgggggaggggtgattgattgcaaaaggttgcagcaaattatctagagtgatagaaatataccttatcttgattaaactgttgtgggctatacatttgtcaaaacttattgtatttaaaatctatatgtttcattaattgcaaatcatgcccaatttaaacatatatgcgtgtatccccttaaacagagtatgtgtgtatatacctattcccttagatagaataggcttgcaaacagaagaactaacttgagatctcagctctcctgctaactctgtgacctctgaggccagtatccttatcagttctatggctccatcctatcagccttgcttacctcaaagagctgtttcaactatgtaacacctgtaaaaatttttggtaaacctttaagcgtcgtacagctcaagaacctcctctccaacttattttgtgcaagcatctccctggccctgatgttctagctgcactggcctccctaaactcaccatgtgctttctagcctctggacccttccttgcaaatgctgtttctccatctcatttgtacttatccctggttttccacaaacagccctctcccatccttgtagtctcagctgaaatgttttacctttagattacctgtccccaccccttatttatttccttcattctacttgtcacactttgtaaatatctgtttacttgtcacagacccttcccacagaatgataaactcccaaagcatagcaaacattagcaaacaagactgttttattcactggagtatccccagttcttagcacatagaaattacccagtaaggctaggaacagtggctcacacttgtaatctcagcactttggaaggccaacgtgggtggatcgcttgaggtcaggagttcgagaccagcctggccaacatggtaaaaccccgtctctactaaaaaaaattacaaaaattagccaggcatgttggtgcacgcctgtaatcacagctactcaagaggctgacacagggaatcacttaaactggggaggtggaggttgcactgagccaagattgcacatctgcactctagtctgggcgacagagtgagtgagactccgtctcaaaaaaaaaaaaaaagaaggaaattactcagtaaatattgatgaataaataattgtgccaacaaacatgaactttggtttataaactttgtaacctacttgtgctgatttgggactttctgcttggagccaggtcttccctagggcatggtgggtgccaaaaaatgaccccaggttaaagttggtgtcactgtagtgtgctcactcaggaaaagctttttgtgtcaagggactcaggaaaggcttaggacatcctgtgctttggaagacagagacactttctagttatggctatacttgatggcccatctgttgggctgtaagctgggggttctgtgtgcacctccaggctgggaagaatctgaagtacacacaggctaactgtctaacatgggggaattgtcctccatctccagggccctcctcatcccaggcccagcagtgggcccaagagcgagtagaatgaatgcccgtgttcatatcatcttattcagctcctttcccatctctcggccagccatggggcttcttagccctaatcccctccctctatctcttcccaataatcagaccaccttctttcttgggttttccgggtgtggatgtggctgccctcacccaggccatttctgtcctttgagttagtcccaggtccggagcctgtcctctagcccagggcacctgggcatcacccacagctcatctgcccgcgggagctctctgaaaccttctgtttacagtggaaagtgtttgctgacctggattgttttgggtctgtgacatcagtgctatgggaaatgctccttagccagtagcaaagtccacttgagggtacacacttagagaatgatccgggaaagacttagggactccgagctaggtgagaagtccacccttccctccacctacttcctccatggccaaaattctgccttccctctctgcctggctgtctctcttgaaatctgtattcttttcagcagataatgtcaataagccctttatgtgagtaggatttggagcttctctgtttctcatctgaaaatctgccctgtgccagtgagtttgggcctctggcccacacgttaattattgtaccaggattcctggagtcgactggggacagagtgcctctttggttagaagaggggtattctggcagtatttcttttttgaggcattaatctagcttagagaggctgagcaagtgaaaatcgttgtgtgttcctttgatattttttcctttcctgtttgaatgccacacttagctggggtttgggaatcaaatgttaatgaatctcttggggtttcttgaatttaattgtaatagtcattttttctgccattagtaccaaggaaaaaagccaatattttagggcacagaatggtagaaaggggtctactttgtgtgtgtgtgtgtatgcgtgggctgtgtgtgtgtgtgtatgtgtatgtgtgtgtgtgtgcgcctatagagaaaagaaagcttactgaactaggagtcagaacacctgtgttgaagtttgggcacattccccaattccccaagcctcagtttgctcatctataaaatagccggagtgatccttgcctcacctgattcgtggttggtgatgatcaaatgaggcaatgaatgagaaagcctttgcgttagcctctgttttgctggttattaaacagatgccttcctcccttgactgttctttgagaataaagccagaaaagatttgaattgctttttttattacttttggttgctggctgtgtttctttcaatcattaaaatttaatacaactcgacacagaaattgagcacaagacaaacacagctttattggggttataggtaaatggggcaaggtaaaaagactcagttcattgtgggtctagtgtcctcatatacaattgtcttaatttcaaaatatttcatcccactgttaggccatgcatcccttcatgtgtttcagtatctcattccaaaagcatagtctctacaactaaatgatgatcaaaagagacacagaatagtgaccataggatagaggctttgcttcttctctttgtgtctggaagggcgtgagcaatccagaccagaaagaaagaaacctttcatcatgcccgtcagagcaggtgactcattttggccgacagacccacaatttcacctttcagttccttttacaactcccagatgaatggtgctgtcaccaggattcatcagtatctagattgggaagaacatcctgtgtgcccctccgtaggcctcatttttttgccagtcccctcactcaatgcttttgacacttttcagctgctgcttagacagtttctcctgatggctaacctgaccagggcagtggggcatgagcaggcaggacttctccctgctgaaagccacctgcctcaaaatgtgttttctaggacgcgtaacccagctgaacaggaagcatctctggcgtgtctgttttggagtgggaatctcccagtgtggagagggagcaggatgcattggaaaagaaaggaggccagtgaggctgctttctcctgccggaggggagcagggtctgcgacaggctgggcaggccaacaggggccagaacacacagggccttgtggaccatggccaggagtctggctttatcccaagggtggagtgaagtcattgaatggttttaagttgccactggaggtggtgggagtccgggttaagcatcatcagattgcattttgaatgtatccccctggctactgtgtgtagaatgagtgaggaaaggagaccactccttacaacatgttgggatcctctaagcagcagatgatggggctgggacttgggaagatagggcagggcaccttctactccagggccattgcatggtcctgattccctgacagcttttatatcctttatgctatttaaaataattatttacagtctatcttagttagctagagctgcataacaaaataccacacacggggtggcttaaacaataggaatttattttctcacagttctgggttctagaagtccaagatcaaggtatgggcaaggttggtttcttctgagtcctctctccttggcacataggtgggcatcttccccctgtgagttcccgtggctgtccctctgtgcttgcctgtgtcccatcccctcttataaggacaccagtcatattggattagagcctatcctaatgacctcagtttgacttaattttctctttaaaaaccctattgccaaataaagtcatattctgaggtactgagggtagggacttcatcatgtgaatttggggggtgagagagacagggacaggaggacccaattcagccaacatggagtccctcctca

SEQ ID NO: 45225 - DNA, 1418 bp, Homo sapiens
agtgagccgagatcgcgccactgcactccagcctgggcaacagagcgagactccgtctcaaaaaaaaaaaaaaaaaaaaaaaagaagtaggaaccatggtgatctgcaaggatgtaaaaacaaacaccgggccatccaaataaagtgtgtctgggagccacatccaatgcaagcaacccctggtctagggaatttccctgaacgatgaccagggtgtcataggtttgcattccatgcgtggtttgcaacagaaacagtataacctaaaggccatttcatcatttcatttcaagaaagtcttcatagctttaaaaaaaaaaaaaagtttggaaacctctagactaggtattttctatattccctccactctgatacttccctgccatgttgaggaaagccgggttcacagttaagattccttggatttccccgcaatacatcagtgcatgatggcctgccagcatctcaggaagcaaatgttgtgtacatattaaaacctctggctcaaagaccaggggactgagtcactcatagcacaaagacaattgctggctttctaaagttcctctatttccaacatagtttccaggtccccaaacgaaacccaaatagtatttttcagataagctggagagatgctggaaagggcaccgcaggcctccagtgcaaggcaaccccattctccctgctggggtcgaggcagtccctcctctttccttcaggatacactgggcagaaggaggccttgatggaacaccctctggaaagagaggagatgagaagaaattgagccccttctagacctactgatgcctgtctgaaccctaactctaaaacttacatgtggtgtaacttcaggctaattaattatcctctctgtgcttcaaattctcacatataaaatggagatcatacagtatctgtctcatgaagtcatgagcattaaatgagaggatgcttaggaagcgcatagcacaatgcctggcacatagtgattgctccattaatgttagttgttttagctatttttacaggctcctctgtgttactgactgggggctttgtaaagatcacaaggaactgactcagcagtgacaagagagtatgtggtgattggcagaagcccattccaaagtggaaaaaatgcccagactggtagacaccctagggatgtttccccttctctatcaaatcttctttattcctcagatactttttataccaccgtgcattaaaacccatgaccaagtgtagccggatggtatttttgaaatattaactgggatttcctttacccaccactcttgtgcctttccctctattcagtgagcaaggcctcagactgggatgggcagaaaacagggacaaaatgggtggcttcctagcttttgaattttaaaatcctgtccctttagaag

SEQ ID NO: 45226 - DNA, 1548 bp, Homo sapiens
agatcaccctcaggggcccttctaactcttggattttgaaatttcataaaatccagtctcattcaaaaagttgaaaatcactaaaactgtatgacagagtcttgcactttctgttctagatgtgtcctcagttaaccacccagccccttcatcttacaaatgagctccagagagctgggataactttttcaaaatctcccagcacttgagtgctagaacaagaccacagacaaaggtccaataacctacaaaacatcacattgttcactgacgcattctggggctgtgtgcaagtcctccttctgggccttatatttacattgagcatttattccggatttgctcaaagcagttttaacgttcaatattgcgtttcactcagcctcagatccatctgtcatgctggtccagcttgccttccatccctgtgctccccactgtatttccaggaacccctgagaggcttatcaacctttacatcctttctaccaaaagcttcctccttcagctccttgggggcaatggaggactgattgttccaagttttcctatggtggcctggatttctccactgggagaggtggctctgggggtggagttggcaaaggagacaaaggagagaaaaaaaaaagggaaaaaaccggagctgtttccaatgaggttgtaggccatgacctaattgattccgcagccatgaagtcaattgttccaccacctgcacggcccagaacagcctgtgctctggtttgcctgctcgtgagaccagacattgtttgatgtgatgaattttcataatgcctgatggaagatgaacccttcccagacttctgccaccaccaccatctccaccacactcctgcctcttcgtaggggtggggtcgggggccacaagcaatgctccacactgagtttaaaatgtttaggcgtatagtaagcgctaaaggaagcttttcttctcatagacttacagcatgtcagttctaaaagaaaagctcagcctcttcattctgcgtacaagtgaacagaggccccagagaagtgagggtaaagttcactgttgtccagagactcagtggcagtgatgagaccagaggttgggtggtctgactatcagaccactgtgtctcccactgtcctgagctgttccctcccctcatgcagtgacttctgaagctgccttctcctcactcagcctcaccccttaagcctccagtccccaaaggtgaacaaacatttatgaaatatttctggcattcacctggcagtctctcctatttttaacctggctgcttttgcaaaacaacttcccctgttaaaggtgagatagtatttgctggggtgttttcactcagttccaggttgactcttcagacttacagtcttgctaactatcttattggttttcccatcattgatcacccttgagaaagctgacttgtactaaccaactcctcagaaaactgatgtagaaagcccgaatacctgttcatcaatgtggatgagaggtgtgaccttgagttggattgtttcatggtggcctggccagca

SEQ ID NO: 45227 - DNA, 4149 bp, Homo sapiens
caccatcatcatcactaacatcaccaacattatcattatcatcactactatcatcatcaccacaatcatcaccaccactatcttcaccatcactaccatcatcatgaacaataccatcagtgccaccaccatcatcaccaccaacaccactgccaccaccaatacaatcactaccatcatccccaccaccactacctccatcactactaccaccataaccaccatcattgctaacactgattgactgttactgttgccagatactgcaaaaacctcattgagagcaatcagatgcagtagcagcagtaccactgctaccaccatcatcaccatcaccttctccaccatcgtcaccatcatcatgaccaacaccattgacaccaccaccacaatcaccaacactgtgtctccaacacgatcactaccatcatcactaccatcaccaccctcatcaccattatgaacaacaccaccatcaccatcaataccattgtcaccaccaacacaatcaccaccaccttcgccaacgctaccataatcaccactattaccactatcgccagcaccagcagcatcaacaccatcaccaccattattattaccaccatcatcactgtcaccatcatcaccaccaacactgtcaacaccaacaatatcagcatcaccaccactaacatagattattactattgtcaagcacctcactaagtgttttatacagatatttcatttaatcattacaacaaccctatgagggagataagagtaattattttatagatgagaaaactgagactcagtgagcataaatgacttgcccaaagtcacccagataatgagtaatggaactagaatgtgagaccagccagtctggccttagatcctattcccttaacactctgtaccagagacatgacttgcaacttgggaagtgtctagtcttcctggattagttgcctaaaacaaggtacggagcttgctatgactcacaaaacccactcatttctgctgatttaaatagaatgaatgacacagtctaaaaaggataaaaatggctgtctagcgtctttaggaggcctcagtttataactgagggatctgagagggacaggtggtagcatcatacattctgccagctgaagattgtaattttggaatagagaggaacatatggaggagtggacagctggctctgcagacaccaacttggaacagggtgtggttttcctgattctatttattacaccagacccacgggctcctgggtggcatgcctgaggctccactggtggtcaagagtgaaaggaggaagaagagggcgaaaaggtcctaataaataagaagctgatataatggaggagcagcagtataatataaaaagaaaagccacatggagaagatgtcccagaattctcacggggaatcagcaggcttccctacaacaggactatcgctcctggcttcagaacagggattgggtaatgcacagaatgtgggttaaaaacaggagaatgtaaaataataatgacaacaaccacgtattggattcatatgggccaagcattgtgctaaggcctaatgggcctgattttaattaaccttcacaccagtgttttaaggaagatattcagatgagcaagtctgggcttagagagcatacaactcataagaaaaggagctgggattctctcctgggccaatttcccactgctcactccaactctcagcccagcctctaaccactgcgctgtactctctcctacagcttaactcaaggggttaaatttatctcagatgtaccactgaaagtcgaagagataggattcatttctagagtatggccatgaaaggatacagctatgcaataagttttgttgaagaaacagagaattgtgttgtttgccaattacatgtctttctccatggaatccacaagtgaatttgatcactggatgatcatgtcaagcaagaaaaagtgtaaggaataaagaagagagaaactatagttgtctttaattctttaaaagaactgtcgtatgggaaaagaggtggattattcttgatgcgtaagaatgggagcagtcacgggagtcaagtctcagctccatataaagaagacagtcatgacaatcatacctgtccaagggcagagtggacttcctcaccaccccttcctcaggaggggttaaactgcccactactggaggtgattaagcagaggagggtgcccacttgtcgagaatgctgtaggttactgcattgggtgggatgtttgaccaaatactctgtgaactccaaacccctatggaatttttaggccctgctggggaggcccacagagatacaagttcagtattagtgacctagaaagcttgaccaggtgtctacagtccttgggttcctctatactgagcttgggcaagtcatttcagacccctgtctatctgtaaaagagaagggggtacctgacctctctaaactattgcattctggagtctaattattgggcagggggtgcaagtagacttatagacttaccccaggagaatagaaaggaagagagataaatcccgaaactctttattctctcagcccccatctgaaggcctggggcttgaagcattttgcaagtagagacctttctgcccccaacttgtactaagggatgttagaaaggcacgcaacagccaagaggcggagtactgtgggaactgactcatacaaacacttcatcaaggccccagaccctccccacagccggctggacccaccacccttcctagatttgcagacacatcatcttttcttctaggacaggctcccagctggatgtgggggctgtccagccagaatcccctaactttacatgcagtttctgctctcctcactactcccaagtgtgcatttgtcttatggagccaacagggaagtttgtcctctggtcaactttgccccatgaccctttcctccgccaaagtgggtcatccggttggctaggcctgaattcccagcagtttccaagtgccttggacgttggctccatttccggaccctcctcagacattcattgagcaacaagctgatgctaggcttgtcccacattctcttggccccaactcacattccagggtgaccgtgtcagggagtgagggcacctttctggtttgggacagtctcatcagaccctgtaatccttgccacttgggaaggcacatgttcgatgtgtgaagcacaatggggaaggggtgggtgtggtaattctgtttgttgcctgggtaccatcaggcccattcattcatacacatttggcaaatatgctttgagttactgctatgggctgagcactgtgctaggcaaaggaataggtttaaccacaaaatataaacacagcccttgccaatgtgtatatagcctaagggtttgaaaaactgtatacttagcccatccccaggagcagtgcttcttaaacttttactctgcacggaggtcttgttaaaattcaagaggtctgggtggggtctgcaatgctgcacactgccagcttccaggtgatgctgacgctgcagatggcaaggtcacggacagcagcagagcttagttagcaatttgaggagggctggaagcagtgcagggtccactttcagtgaacaatgtggtcttgatgacaagcagggaggtctttctttctctcctacaccaagaccccttgtcaagaggccaggactccagtggctttttctctcccctgggagagcctctgggaagcttccagtgtcaggtgggagcaactatgggaacactggcattcagggaggggtttccttgacgtgggcctgagatagcgggggttaaagggcccagggtgctttgctcagcagtgtcctcttgtcttgcagactgtgccgggtgcaaggaggagatcaagcacggccagtcactcctggctctggacaagcagtggcacgtcagctgcttcaagtgccagacctgcagcgtcatcctcaccggggagtatatcagcaagtgggtccccctgctcctgccccagctgcctgggcctctgcattctgtgaggcctgccccattgagcccatgcctacatctccagcatcatctcccttcctttccgtctgctgctgcattctggcc

SEQ ID NO: 45228 - DNA, 3279 bp, Homo sapiens
gtggcttccccaacattaaatcagccccaaatgttacaggtgtggagtgtgctataaccaatcagagagataagactgactgctgactctgctaacgattaaaaatggccttaatacctggctgacagatagttttggagattaacatctctatctctgagtcagctgatacagaaatagctaatccttcacttccataaccttcatagtaggttttaactgcagagcctggaattgtgggtgacaatctcagaggacaggaggaagtgactcatggaaccaggagttgaacaagcagaaaatgttgtactcttacaaaaagctagagctctgccttataaaattggtttctttatcacataacattccaagaaaataaatttagagtgttatctggtatttagccctgtggttctcaaattatgagtcataaaatcacctggggagcttgttaaatcacagattcccaggtcccacctccagggagttggcgtcagtggcttctgcaggggggcccaggaatctgaattttaccagactgcaagacaggtgatccacaggtcacagtttgacacaccccaatatagtgaatatgtttgtagactcagtctggagttgtggctgtctaatcagagtctagattgtactacttgtccaaatctctgggcccaagttagagaagccaactgcctaagatagaatgccatgtttcttttgtttatttattcactcaatgagtatttattgagaatctgcagttcctgcagatatatctgtaggtataacagacatgaatcctctcctcatagaatttacattcttatcaggataaatgggtggggcaaataattatcttctcggtacagtaaaacctgttaagatggaaacagaatctctaaggatttgggggctggtaaacatcccttagtgtaagtactgtgtgctgagtctccttcctaatatcactgctgagcatttatatacccaatgtgtacttaaacacttttagggacaagggcttactgtcagttgaataaggccattcagttcttaggtgttaaatgttccttgcctgaaccttctgcccttagtcctagttctacaaaacaaatgaatgcctcttcctacagagagtcattaaaatctgtaaaatcagctttcaccattctgttaagtctcttcttcagggtaaagacccagccttagaattgcatttgagtccccttcctaggatagtcaccatcctctcatgggtgcattatacctagtatctttttgaaaaaaaatacaaaggtagggtccaatgagtcattcacatgcatttctttgttaaacacacatgggccaggcactgtttttggctctggggataaagtccactgaagagaataaccatcttcttcaccatgatgttatccttctgttaatgtcacattgttgagctattggcctagggaataagctcagaagaccgttatttcacagggatcttcatgaacaaatcatcttttcttgcattctttatgtaagtttattgctagctaccaactaactttttttagcctcttttatttacagatatactaccaactcctaaattctgatttttttcatttctaattatattttttttcttgtttgatcctcctctccttgtttcttatgtaaatatgctttccggtatgcagagtgctgaagttaatggccatttttggctcagttttatttcagagtgaaatgccaatgttatggggttagaaagcaaaagagaccctctagtctgaccccctcgcttgacacattatttccttgtatgaggacttctgccctcttgatctttcctatgtctctttaacttaagttcatgacctcctcagacctctgtgtccatctcatccatttcctacagtgacctgtaacatgtgtttcctgccacagccacagtcataaacaattcctgatagattcggaagcaactcagagaggaaccggaaacgctctctctaataactccctaaagtaagaatcccaacacacagcttggtagtggacacaccctgtgattgctggatcaagccacagactcagagtccctctactgggctctgagaaccattgcattttactttagaaagaattaaacccagttgaataataaggaatacccaagtatgtcggcagacaaaaatcaaagattcttgttccacaaaagacaaaactgcccgtaaaattagaaacttggagatgaaaataatcttcaaggccacccaaatcccaccttattgttcttcagatgaggaaactgggacccagagagaggatgtgttaggggctgagcagagacaaaaaacacaggcctcctcacttcaggcctctcttctctttttcactccgatttattgacctttcaccaccatctcatcccttagctagtattccggtcctgggggttccaggcaacaaagcataatataaagtatatcctagagacaaagtcagacaaacaaatgccatctggatgctcaggaatccagccattgctggcttctttccttttagggctggttacaaggggaatggctccagagggataatatgttcctatttttccttctaatccaggacacctgtcccttctttggggaatgtgtcatatttggggctgcttctcaacatgtgagcagccacctgttgctcatgcctttccaaattggcctttcgggtttggggctggccaactggacccccacccacaataaaatgtgggcgttagcagtatactaaatttgaagagtctggagtctctgaggaattagcaggtcaaggcaatgctctcaagcggaatatacaccatgacacctcctcccccttaaatgtgatagctctggtagacagtcataagtctttaagagaaaagaaagctggagttcaccatgctctgtcactcttttttatccacactgtcatttattcattcaacaaatatttattgaccacctgctatgtgtcactgactgccaatcatgcactcacctcttcaccccacaaacatgtacggatctcttctaagagcaaagtcccgtgctggggactgtgggagatgtagcaatgaataaagctcagctcccgcccagaagaagctcttgatttagtgggaaatgaaaaatccataagctactgtgccttaaggctgtatgtgtggaaagagacacaaagaactatggatcacaaaggacagagaagtcacccccaactggcaggtaagaaagtttgcaagag

SEQ ID NO: 45229 - DNA, 473 bp, Homo sapiens
atgcaaaggccctggattgagcaagagcttggcttattggaggaacaaaaagcaccaatgaggctggagtggggcatatgcaggggagagtgagattagaagcggtgggagggcaggcaggggccagccatgcacagagtctaaaaggactcctctcatccatccaggctttgtagagggtgtttggcttgtgctgtggttgtcaacatgctgggtgtaggaagaattgttccaagcgttgccactcaaaatgttcctaaccaggaacattggcatcacccaggaacttctgtgaaatgcagaacctcaggccccaccccaacctgcccaatcagcatctgtattttcataagatccccaggtgattcatacacatggtgaagtgtaagaagcgttgctctcacccatcttcctttcatgaatagacataacattttgagtcagactgtctgaaattctagaagggggccttt

SEQ ID NO: 45230 - DNA, 1234 bp, Homo sapiens
tttatcaccctgttctgcatgttttcacgtgttactcatttttctattctttttctgaattctcccagatcctcgttatgttttcacgttttagtacacaaggaacctcaaaagttgaaagtgtcccaagcccttgcccacctttcagcaagcctctctttctccctttcccaggtgcttttctttctgaagatctttgttattatttaactcctctttcgcaacaccactgacattgcaccggcatcgccgcgggcccactgtctggcttagaaggtgctcaagaaagacccgcggcgaatggagaagacaagcccaaagccaggaaatgggtggcggctgcagggaagggggttttgattccctaggataaaaacgcgctccaacagtctccgcattccggcatggagccggctgaggggtgcggtggtaagaccccatcgctagcggagtgcaagcaaagccgcacacctcctgggtccgggctggggcaggccgcgcgggcgcgggaacgaacgcgtgcggacggggaaaagggtcctccaagcccaagtgggagcgccgcggagggcgagcgagcggcagggcgcggcggggcgtgtgcggcaccacgggacagcgggctgcggcccagggggcgaggcgtgctcgggtctattccgggagcggctctgaggggcgggcgcgggcgcgggcggggcgggggctgccggcgagcatcctgtctgggggaggggaccgcagagagcgccggccgctgggctggcctgagagcgcagcgcgccggccgctaccagccgcgccggagcccctgcgccctgcggcccgctccccggggaccgggccggcgccatggaccgaggccagggtaagaggggccgcgacgcccgcacttgttgcggcgccgggcgggaaagggagactggacgatctgaagccggagaggaggagggagagaggcgggcggtggggcgggggctgaggaacgctcggaggggactgggagacgcggcgcttatgcaaaggtgccttcggctgccgggacaacccggtgcgtgtcaacgcccgtgtcctggggccaactcgcctctcgtgtgtgaaatcagagttttcataggctaacgatttgtaacttcataaaagatccccctctagtttccggaggacagcgagctcctcccacctcattccactctaaaggggaaaacaaggtgtacaggttcaactcccgaaa

SEQ ID NO: 45231 - DNA, 1693 bp, Homo sapiens
cgcctgtaatcccagctactgaggaggctgaggcaggagaatcacttgaacctgggaggcagaggttgcagtgagccgagatcgtgccactgcactccagcctgggtgacagagtgagactccatctcaaaaaaaataattttgaacacctacattagggcactgctcaatgggaatgaatagacaatatctctgccttaaaagagcttatattttagtgagaggaaatgagaaaatacacactatttaaaaaaacaattcagtcgataagaagggcattagagaaaaagactgggaggagtgatgggcaatggttcaggctgcgatgttttaaaccgctcacgtgatctagcccttcctaaccaccagtcctgttgccctcccgcctcagtatatttcagtcccttacatgcaatactcttctctctttattaggcttctgcagatgtttccctctgcctgaaccctttcttcagctcagctcaaatacccccttcctctgggaaaactttccacaaggctagatttctattctaggcttccgcgacacctgcccctcaccttcaaacaccgctcatattctgactttacatcccgcttgtatctgtttatcgctcataatatcaagtaagctccatgcgggcacagctatgatctgctttctttgctgccgaccctgcgcccagcacggagactgtagttactactaggacctcgcctacccgcggaacacactgagagccggaagtgttgccttagctccggacgaccggatggggaacggcgcggcccatcgggcaaccggaagcatagcgttcctgtccggaagtcctgagagggaaacgcccgcaaaggctggtttttaagcgggagcatctcttcactcgcagcaagtgcgcgtgcgctgcctctcagcccaaattggaaacatggccgtacggtcgctgtgggcgggccggctgcgggtgcagcgcctactggcctggagtgccgcgtgggagagcaagtaagcattgcaggcggggagtcgggagcgtgaggactctgaggggctagcgagccagccggggtggttgtgggctggaaggcgagagctatctgagcgtaggccaggggaccaagcttctcggcctctacgaccgtgcactcacggccccattttacagacggggaaactgaggccatcagccgtgcctctttcttaggccgaggaaggtaaggagatccgaggtcatgcatggcctggaaggtgagaagtctcttaagcccccaagggagggatgtaccactctcccggcctcttctcccagcctgtggtacctgtgggtaaatttgggttctctcccctcactccgtgtgacctaaggccagtcctttctccgttatccgggcactgttgtacctgtcagtaaaaggaggccgctgaacttgtttctccaaacggccattgcatcagccttcggaagacaagttccatcggcagcttttattggtcgcttacgaggccgactgcagaattatgggtggttctttttattattacccatttagtagttaaggaaagtgaggtttagaaaagttgagtaacttccaaacttaaatatttgggaagtggtggaacccgggctggaaaccagtcagggcgttggaatcggcgctcttatttaatgagcgatgttaattaattttctca

SEQ ID NO: 45232 - DNA, 509 bp, Homo sapiens
aacaaacaaaaaaaagagttcaggtaagcgatagtaaagggcaaattcaaggaaacagtgagatggacttgatagaggagtcaagggtggctcccaggtgtcctgctcgtccatgcatagaaggaagggcaggtttagagaggcaagatagtagattcatttgtagacatagtgagtcaactgggataattagctagccatttcaaagcatggatttggaattcaagttgcacaagagcctgaggtgaaagtttatatgtcaaataactagagcacacagtgtaaccaaagtgacaagccaccttaagagtgggctgtattctagagccagctgttaaacagacccaaataagttcttgagtcatcttccatgttcttttgggaagcaaaagtcttttgggaagcaaaagaagagatggcaagttcttgagcaacagacaagcctaagaaaacactgcagttttaaagtctgcatgagtagggagcagtggctcacgcctgaaatccca

SEQ ID NO: 45233 - DNA, 1390 bp, Homo sapiens
acaggtgtgagtcatcatgcctggtcctctcttctcttccttattcctatgccaccaacacagagatattgccccccaaaagtcaaacagctgttggtcatttatgggaaagttgcaatgctaaaccctcagcagatgggcaggttatttcttgctatgtttatgcatttcctagcaacaggggactgcatggcttgttttcctatgtgacaagccctgaaaaccaggcaaggagccagtggagagtcatctgagtttacagcctgaggttctgccttcctggaagatctagcctagatacctgagggtacaaacagccagagactgcttctgtacacactcaactttctctaaaatagtacatacaatttgtgagcaagaacattagaaggaactacatacctatcctcttccccacatctttaaacttcctttgcaaatagatgggggctgagtagttctggccaataaactacgtaacagtggtatgtgtgtgtgtcacttcccagctcagccagttcattgctggtgtgcctctctgctgcgtcagtctggaaggcctcaagttccagatggtgttgtcagaagattgaaggcaggttacttggctcacattagggagaaagacattttgcataaagccattattcaagagtttgtcattaagtaccatgactaataaacaatacagctttctccttgacttcttcataagacatgactaactttctggatgtcctcctttgtgactactcccattcttctccagtatttaatcattctttagcttcatatccctcagagttctgtgttcagccctcacttccacatcaataccctcaggctggaagaattcacatagctctgcaacttcacctatcactcctggaataagaactctcaaacttgcatgtctggctttaggcacttctcttcttaccccacacctgggaaatgtgtggcttcctagattcatgatatgtgattttgaagtcctgctaagatacataaaacagatttctctcctaattttacattttctcttaatccagctggggttgagaggcaggccctgattgtagggttttccagtttctcaccacagctaatttcaagctaccatgtcaccaaatgtacagttgggaagaaatgagcagtttttataagctaagacatgccttcagctctccactgtctggggcaagtcctgtggtatttgacttcattccatactcacgactagcagcagattgacagcctggtgattactccccctttatagatgaggatactgaaacaaataataggtcttgcaccagatcccttcccagttcattctgccacccattcagtctcattctcgtttgccagtggctcttcaaactttatt

SEQ ID NO: 45234 - DNA, 3413 bp, Homo sapiens
tttgacagaacaatgtctatctcgtcatcttttatcctcgttactgctatttgcactcaccaatattccacaccaacaaaggccccaatttctctgatgtgaagatttactgacaaactcaacaggttaaaattacttatcaaagtgtggctaagtgattaagatttttttaaatacaactgatatgagtaaattttaacatagttggtgctgctcaaactgcctttgccactacctatacaaatttagtcccgactgaaacgtgccaaatatgaccattcacgaaaagaaagagtaattaacacttttaaaagaactacgaaggattttacatagtgtaattcaacaatttcgtgtcacatctgctgcagagatcacaaacactgtcactatgccatctccttcctcgaacctccacaccgcctcctgcagctttattcttggcttttcaaaggtttaatccactcggggctgctaaaggaggaatcaaggaagcataatttgtgaactcaagctgagaaaagggcaggaatatggggttgagtcacgtcgttccgccattttctaagcggaggaggaagacatgttggaacaaaaacacaacaaaagagcagccatttcccaagccagctccaatagcaactcgaactgacactgccgggtcgcttcggcaccttcaaatccacttcactggacaaacctaagtacatcagaagtgccgccgtaaaaaaggcagcagccaacccttccgcgtagggatcaaagatgacctgcacgcataactgcaaatgaaagcctcgggaagagtgagaatgacggaagcgaaatggagcagtgtaatacaatgaaataagttggcaaactgaaatttactcagtaattgagatgactgacttacaggaaaccaccagctatagggaacccaggtaactaaaacaccaagacccggattcagctggtctcattacctgcctctacccacttccccattccgtgcttccctcagcggatcgcctatatgcaccgggttcttaccgtatgtgggggatgccaaccccaccttgaagaatcttatagagcttgctctcgtacagcaactggggatgcctggccttctgagattctagcttcactgccacttcctgcaggggaaagaggggatgatggcatcaacatccctacggattcaatgtcacttaggaaaggagggagacattagcaaaactccaagtcgcgactacaagaagaagtgaaaagctggaaagagaaagctctcggtaattataaaacgaggcaaccagcctcaaaggcctcttcagggggtagtgacgaaatccgtacgtcctctaaagtgcaggaaaatgattcatccagaaaaaagaggcaacctctgaacgtagtgagaggtttttaaggaactaggcgatcggaaactgttctaattggaacaagaggcccagtagaattaagaattaaaaaaaaaaaaacatgggaatcactgaaagaggattttgccgtttccaccttaaaagacggttaaaaaaaaaaaaagctcgactaagggacatttatgggacgtgtttaacaaggtgggaaactagttcccccaacctttctatcgggttcttgacccttttagggagacagcggacgaggttcgtaagccaggaaaactagctccctggactccctggcgagtgcgtgcgatgaggagaggcccgagcactttgggggtgcacggtggtggtggggggaatgagtaaaagcgcagcgttatcgtgaaccccaccccagatgattacctcgccgttggtgatgttgatcgccaaatagatgtccccgaaggagccagacccgatcttccgtaccagtttatatttccctccgacaatgaattcagccttggagccgctgctactcgccatcctgagagacgaagatggaggctggggccaagccccgacacctctgggaagaggacggaggcctcggggctcctacactaggcaaggctacggaggagggcggcaggaaacggaacacggaggcctttaccggggttcggggcccagaatcagcagaggggaacctgatcaccgccgctcagtcaggtttctttttgccaggccgcagtttgtgaagggcttctcggcggttaccaggctgggccacttgtttctcggcggccgccgctgcctcgcttgcgcggcgacgtcgcgggctggaaaaggggcgcggtgagctagggcggcgataccgctgccaccactgccgccggctccggcccagagggacccctgtcactccgcggacgacgccatcttgttactccagctccagccaacacaaaatgcccccagtccccgggagccgcttcttcacggcgcagagcactctgggaaagggatctcgggcgctcgctccgaaggatcggcagcgagagggcggaaccggatccgtgagagtcgcggcccacgctccgagcgtcaccctgtcaccgcccagctgcgcatgagcgctgcaactcctgctgactgcgcaggcgtgccgcggcctgtcctcacccccgtcccgggctctcttccacttccggtcggcggcggctcagcaggtgttacctgttactcgcctcggacccgccgggtctctggaaggctgagtggccccccggccttgatattgggaggagtcaccttcatgtttcgtggcagatgaaagcttaaggcctccttaggagttgggtattgacctgtgctctttgaggcggtttttaacctttgatctttcttctggccgttcccccggaccggcctattccaacccagtttctgtttggaaagaggctgtcgcctctggtggagaggaagagaaaagcagccagcgtcgaggaatctctcagggctctcggttgtagcagagcctagctaattacccttcataattagaattgtcctatctactacggagtgttatagaccctctttccacaggaggggaagaaagaaagaagccggaatccccctgccatcctatgtctttgcattattgcctcactaccacatatgatcttcagaagaaaacctggtatgttgctcataatgaagattaaggatagatggaatcaacagaaaattaatttaacaagagtgaaaaaactgttatgtcccctcaaccccaccaaaaaaaaaaaaaaaaaaaaaaaaaagaatcgtatgttggtcttgttgaaaacctcagtattaacctgaacagagtagaggtaactattacaaaatttaattgacaacatttaaaactacacggtaatttttttcttttttacaaaaaatcgatcagagaatcaaattttgaccacgttttgttttacaaaatttgacctgggaaaattgggcttagtaataataatgttcacg

SEQ ID NO: 45235 - DNA, 539 bp, Homo sapiens
gtggcctaaatgccggctcctgttttctggatgacgagcccgcggagaaggtggcttaatgagaggccgcgggagggtgggtgccggcacgtcgctaaactccgcctgcaatccttcgggttggctgccagccagggcacggttccgagccggccggggctgactccgggagcagcgaacagaaaacaacctggctccagaaagacaattaacaaaggctggagaccagccaccccctcgcggcgcacgcacgcaggcagctgcgtgggcatagccgcgcccgccagcgccctcggtgggcacagccacccggagcggcgcgggtgccgggagctgggcgacgcgcccctcctgccccggctgcgctgttgcccgggcggccgacctccgtgcgtgagcgccggcaggcaccttgcgcgcgcgggtgagtccgctgggcgtttggggcctggtcaagcaggatggggctggagaggggtgcaggaaacagctgctgggaggatcagaaaagggaggtgggacagaaaggcaggatgcga

SEQ ID NO: 45236 - DNA, 1357 bp, Homo sapiens
gccatgggcctcacgctgttgggctgtcatgagactagtggtctggatggagccccaggcctctcccctggggcagggctggaattggggacacagatccagctagaagagggccgagtcaggtgaaggatcacgggagttgggagggcatggtgattctggggcacactccccagggatgtgggggaggcagcaggtgtccatcaggcagttggagctgccgtgggacacgggaatgggcatctcctagtgtccaggcaggtcagaggtcagagccaggtcagactgtgggcagcagggtttcaatctttggttggggttcaagcactaagctctggggaaggagagatcaggccgatgaaagatacagagatcatagcaggaggcagcattgagaactgggcacagggttagagtatgactgtcagtgcaagggactttgtattgggctctggtggctgccctagagctgcttaaaaccctcccatatgaggacagcatggttttagggagccatgtggggccagacttgggagagtgtcttgggatgaagaggtggggtggtagccagaaggccagacttcccatgcaaaataccctcgttcaaatcctgtccccacacttaccagctgtgtggccgccttcaaacaagttgcttcatctctctgacgcctcactttcctcactttcctccttgtgggcaaaccaggaaagagtcctgccgatggggttgttgggatgtggacacaggatacatcacgggagactttggcactctgtcaggcacataaaagtgcttaataacaacttgatccttggccacacaagccagttttgatccctcccccgcccttccccgtatttcttccaagtgttgcaggcagcgaccccacactcacacccgctgtgccttcagctttctccctaatgcccatggctctgacccttcaccgccgggaattctgaaaaataccccatggctgcctgagttctttcaaaactgaaagcaagtagatgtcttaagaggccaaaggttgttcccctgggaacgtaactgtaaccatgtcctcaaatactctctggcgatcagtcggccatcttgagttactgcaggctccaggcgcctccccggtctgctgatggtgcggttgcagctgattggccggcgtgtgggagtgcaccttccccctacttttttgttttttaattttttaatcatctttctaaatgcttttattttcatttttcatcctccctgctccccgaaaaagtcatgggtcagaacagcaaccataaaatacaaatgcaaacacagaccaggcacagtggttcacacctaaagtctcagcactttgag

SEQ ID NO: 45237 - DNA, 2494 bp, Homo sapiens
agtactaaggtgaacatccttgggcacagttctctgtgcatgtatgtgagtttctgtctatctgtcactaggtgtggaattgaactgctctgccttgctggatgttgaagttatttccaagtttttgcttggcatcaatgtgctcccctggggtgcctccctttggatgttcctaagtcatctgaaaagcttcccttgggagactttcctctgagctacctttcttttaagatcaccatccacacagtcagaaactgtgtgtcctgaccctttccttttattccctcaccacttctaacctattgccaaagcctatggattcccactctaaaatatggctttaacccatccttcctccatttccttcctgctacttctgttatcttggctcgggaacccccctcccctagactccttttccaactcctaacttgtccctcaacccccccagtctccagccccccaactttctccactgaaggacttattacaccctaccaagttgcatggtgacatggtgacatgcagtgctcccatgaacattgtagagatcagagctgtgagttacatgacagcaaagattgcatcatagtcaccatttgtggacctgtagcatggtacctggtacccaacagaatctaaaaatatctgttgaatcaaagtccgaataaacatcatgctgtcattttcctatcttttggatgactcaggataaattcgccaaaggagcattattgatgacttaggataatgaacataaagttcatagtcctgtgtaaactgaatttgatccacacaaaactttaggtcagttgagaccagcatgggcaacagagtgagaccctgtctctacaaaaatataaataagttagctggacatggtggcgtgcctatcgttcttactacttgggaggctaagcagggaggatcacttaagcccaggagcttggagctgcagtgaactatgatcacactaccgcactccagtctgtgacagaacgagaccttgtctctaaataaaaatatataatttaaaaaactctaggtcaggtgtgagagataggatgacccttagcaagaagtggttttcccaagatcccaaagccagtaagagacaaagtataaagagcaacaggtactcaggtattctttccacctgcttgtcctatttcataggtgtcctaaatttagtttagaaataactaaatataaactatgttgccttttaatgtcgggtgactgtctctttaaatcttgctgttttaacacaaatatacttcattctaatgtgtatatatatataatatgtatatatatttaaataataacctgatagaatttgtatctctctagaaaagaaagaactctcatctcggggcctttgtttatccatctattaaatgggcataaggagggtccttctaggatcttttgctctgtgagtagataaggaaaaagcacacttttctatccctatctaattttgttgctcccatgctctgtgcagtcatttatggggctgaggaggatgaaggaggaggatttatggggctcttgcaaaactgggaaacagtaatagctgacattatagctgccagtgccccttacctgctgatttgaaagccctttaatcacttgtagcttatgaaacagaaagtgatctgctagctatttcccccaaatgcgttggtgagttcataggttaaccctacaggaaggagacagcattgctaaacacaagaagagccttacttacttcatgggctttcaagtgtcaagggccccaatccttgactctgagaccctcaaatgataccatctagctgatgttgttctaaagggtcagccctgaggagaagttcatcctatggaagtcacctgagcactccacataccatctgaagccctggcttccagttctggctctgccactaaagggctgtgtgacctcagccacattcctccacatttacagtgaagctggtggaaaacacgtttccactgcccctccacagttctaaagttctatcattcaatgggaggtggagatggttctcagcatcaacaatacaaagcagggagatttttagttcctcttggcctgagtccctgcctcctggacagaagctgggaaatagatgagcatctggctccctggcctgggtcacagaatcacagaatcgtgggtggctggcaggaagcctctgcgtttgccaagacccacgtcctacctccctccctcattcaacacaaatttactaagcagttgcgttgagtagaatgtgggcagagatggcggctgttgtgttcaccaatttatccatggcatctagcgcagtggctggcacatagtagctgctcactacatatctgctgaatgatgtctcatctcctacagtaggggagcctattaagcacagattcctgggcccaccccagacctactgaattggaatctctggcgttagtgtccaagtgactgtcatgccctcca

SEQ ID NO: 45238 - DNA, 4018 bp, Homo sapiens
ggatatgaagagtgacttacaggcgcccgccaccatgcctggctaattttttttgtattttcagtagagacggggtttcaccatgttggccaggctggtctcaaactcctgacctcaggtgatccacccgcctcggcctcccaaagtgctgggattacaggcgtgagccactgcgcccggccttcgaacgaggtcctattccttctcgagcctcagtttccccagctgtgcagaagaagcaggttgtctcgcaggacccgcccagcgctaacgcaacgtgattcgctctggcaggagccgggggctgcccgcattgctgcgcaggcatcgggctgctggctggggcaccgccacctggctgcctgcgctttaccccttgctgagggctgcgtgagctggtcgcggcgccagacacggcgcaggaaagtgggtgagcgacccccggctcccgcgggcgccgcgcggccccgcccccgcagctagcggccctgcggcagccgggggctcgagctccgccctccgcctcccgccggcctcactccctcctccctcctcccttgctcgctcgctggctccctccccccgggccggctcggcgttgactccgccgcacgctgcagccgcggctggaagatggcggggaacgactgcggcgcgctgctggacgaagagctctcctccttcttcctcaactatctcgctgacacgcaggtacggccggctggggctgcgggcccggggccaggggtgctgagctgcgggggccgcagctgcagccgcggaggccgggaggcagcggtgggagccctggggtaactgggggttccaggctgcagagccccccttccaggcgccctgcgatgcgctccgttaccggggcagggagccggaggtctcccggcgcgtgccggagcgctgggggcgctacggccgctggggagggtctagccttggccgcttggagtctgccaccccgcgggcaaaactggggggtaccgcgcttcctttgggaggtggaggcgcgccacggtgtggggtaccctcaggctggcgctgggtgctggaggcgcgccgtcagcgcccggcacttgctgccgtactttcacgtggacttgtggccccggcacgggtgcatgcccgggtctccggagtcccctagtcctccaggctgtagtccccagagtgctgttgctggccccccgcggctttctacccgcgcccgcagcgcggagtttcctgccagttgccggctaaaggcataagggtctgcggggcacgtggacatgcgggcggagacagcgtcttcctggtttcgctatcgggcggagccccctggggggaaaagccaggctggatgggggcggaaggactgtctgggggcgcctgggtccccctgcggtgcgcggccccggtgcgcgctccacgatgcagggggaagggaaggcgaggcggagtcccaggcactggctgagcccgggagccccactggcgacacgcgcgtgacaggagagggtgctctggtgtgccggggcgcgggggagcgaggaagctggtggcttggagactgggagaggggtgctgctgggacaagcagccaccaaaaatgtcagcacgaggcgtgcgcggcccccaccccttcccccattttccccacccaatgcctgttgcaagcataaagtttggctccagagttagggctttttctctgggcgcccggctgcgggtcattgggaagctgaggatgcggcggaacctcggaggagccccgggtgctggcacacgcctgggcacggagaggggcggccgggcggaaccgggcgcggctcgcgggggctggtttggtacctggagtgggagcgccggtgccggcccgttttgcataacagtggaagggagggggaaggcggagattgggggagggaggtgggaggagagagagggaaactttgcttcttgttataatctgcctgtctttgggcggcagcagctgtcatgggaccgggtgggcggggagaggcttgcaagctgactccttgcggtgaaacgcgacttggaagggacgccgcagccgagacgttcagctccgggcagcgacttcgggctggcggctgggacggcgtggcgtggcagggtgtcgccgagaggaagcccgccacgcgggaggcaggccgcccctggcccgctgcagacgccgctgcgtaggggagccgcggggccgcgtggtcggtggcgggcgcgctcgggtgggttcgcggcagaggccggaggggctagtggcgtgtgattgcgcttctcgagatcgaggggaatgtgtgatgagcgggttgcgcgcgcgggtgtgtgtgtgtgtgtgtgtgtgtgtgtgtgtgcacacgccgcgcgcgccgggcgcgtacctttacctctgacgaaactgcggtggagctcccgccgtcgtcgccgggctccgtcacacgccccgcgccggtgtctgcgccgaaggcaggtcccagcctcagtacccccagagccgacagcttggggctagcgggcactgagtgcgggaggaggggcagagtcactcctgggaagattctgtccccagatctcgaaattgccctggggcgtctccgaatctcttggctgaaaagcggatgagagaggcctgaaatagccggagactcgttcagggacccatgtcaagaactgtccgctttggactgtaccccggattttaactcgatcttcagtgtttggctcagcaataattaattattttgccctttagccgcccagcgagcctagctagcagaaatatttcaactaaggaaactagaaaattgaatactcaggtgtttgcaggagcagtgcagtgaaagttaatctgggacatttgctttttttatttaaccacatgacaggccgaggatcttctggtgatctttgccggcccaacttgggaaatgtaattgataggatgagctttgagccgcccctagaaggctcggagagcccagccggaagaggacctgggcgggcccagtgtgctcctccttattttacagctggagaaagaggctgcgaggagtgagcggcttgtatgggaccatgcagccagagggtgacagagccacccagggctcctgactccaggtcctgtgtgttacctagaaatagcactggacttggagtcagaaggcctgagtggagtcaccttccccactctctggctgggtgaccccggagcaagccatttgaactctccgagcctcatttcctccatctgtcaaatggggctggtggtgccgcaagagaatccaatggcctggtggtgggggtgagcagtgtttgcatgtgagatgttctggttgttcctgcaaccccctctcctcccccaaactttccctgaccctcccctccttcatctccctttgggagctttggggaaagtggattaaatggtaattcattgtctttgtcccaaaagattgttgttgtctttggtggctaatccagggttagattagagggaggacttctgtttaggagacttaacttttacccattggggccaaagtacggaaatttagcagaacaaggattgcgaaagtttcttggaaagctttgaggcatggatcccaaaggactgtgggtggcttcacctttgttcaggctatgcccctggcccagagtaccctcactcacccgtcctgcatggccttctcctctactaggctctcccagcccagcttgccctgctttctctcctttggttttctgcatctgtgtgatacaaccaagcactttgtgtgagtctggtgtccagtaagattctagcactagggttgtaccttttatcattgtgcctgcaaggcacctgtcagtatgctgagctgtgttcctttgcttagctcttggctaggcacatggattacagacaggggtgcagctgggtcctgccaagcagaagctcccaggctagcaggggagacagctgggcagcgagtgtgggagagaggaatgcagagggctgcagctg

SEQ ID NO: 45239 - DNA, 1159 bp, Homo sapiens
tgctttgtttttttctaagagttttagagtttgagctctttcatttttatctttgatccatttggagttaatgtttatatatggtgtaaggtaagagtccaacttcattccttcgcataactgaatgtgtcttgaatgagtgagtagttggctaagtccttaagctgtacaggctgccgagctcacctaaccctcctaacagtgtcaggagaaaaatacttttagcaccattcttcacgtgagcctgatgctcagagggtgagtgtggggcttggggacatagctcctttgctgaccaagccacacagaggtccccagggcccagcaggcaggcatgaccagggccccgccccaaaatatcatgccccagtgccctagtggcctcatgccactttctccttggggttgggcaacagctcctccctgccctgtgggtgtggacaccaggtacctgcccagcagcgcctggggcctccagcctactccagcactgctctttgtcccagtggctgaaggagtggcagcctggcttgtactttctggtccagccccaacaggaatgtggcaatctcctcccactgtgcctgcatccacacctccctggtggggtgggggtggaccatgggcaggcaccatagcaggcaaaactagaggacagtgatggtgtcttgggtggaagctgctttgccagaggcccatctcctgagaggctagagcaggcccaggttggtgaatcaggttccagggagagcagggtggggttgaggagtgggtgaggagccaagcaggagagggaggtggaggtttagaatccaccctaagaggagaagaaagccctcctttgctcagctggcctgccagaagattttcaatgatatggttgtgaaacaaccagaggaggggcagtaccagccggttccaggtgatgagcacagcccagggtctgagggcaagtgggaggcacacgagaacagtgaagaacagagctctgagtcagcctgagtccagggtctgtcagttagctgctgacttagggcatggtacttattctgcctgggccttagtttcctcacctgtgaaatggggtgaagagatatagatatagatatagatatagatatagatatatctatatatatatatctcagtgggtagttga

SEQ ID NO: 45240 - DNA, 1894 bp, Homo sapiens
ggtgcccagggcagagtgtcaagacaacttttgcagcagaaagggtattgaaggatgagcaggagctggccaacatgatgggaggggcctcctagccagggaccaggctgtcgtgatggctagcatatcatgtggctgatgactgagcaatgagtggctaggtgagaggcttgaggggaggctctgagctgactggaggactccccatgggggtgaggaacagacagcatgaacgaaatgtctggaagaatccaaagatggaacaccaagattctcgtccgagaaactagctggaggctgctctgcagaaggggaaaggccttggggaggtttcagaaggagagtgactttgagggtgactagttcttccctgggcctcacaggcagcatgggatgaatggtatcaccctgtggactgcaccgctcctccccaggccctaggagtgagtgggggacatgcagggatttgtgttaaggattgacacaaaggctggggtacagcttctcatatgtagtcctgactcaagtccctggctcaatacagcaggaatcggtggggccaggcaccacagaaccactaggtacagccctcaataaatttaatgatgcagatgatacttagtgccatcataatgattattactcctatttaccgttatacctgttagtgtgtcactgcgaaattcacacagcattttcacatccacagttcacatccttgtgaggattttcatttctgttttgctgatgaagaacccaaggcccagggatgtgaagtgacttacccgctgaggtcactgttgtaggaactggacgggaatgtgagacttgtggcccttcagatctgcctggttgagaagagagatgttttttgaatggagcccctccgctactgctgtctgagttccctgccttatcttgaattctttttggagcaatgatctccagtcttttcggaattgccacatctcgccattgtatgattttgcaacagttgcaactgtgaaacgcccccagaaaactgtaatctccattgatctctatgtaatttagagttagggaagaggaaaatcttgttttttgcatctgtgctggaaagaagagtgtcatggtgagaatattgtacctggagtctggagggagccctgggctgttcctctttgctgtgtgaccttggacaggtctcgccccctctctggccctgagtttcctaatctctgccatcctgtgactcattatctttctaaacgtgagctgttttaaagtgtcacaagtctgggattgtgaatcatgggggctgttttgctttggtaaattctgcttggagctgaaccaccaggtactggatagagagggagactagttcctggagacagatggacagatggagctaggaaacagtctcatcgcagatggttaatgtactttccctgcacccagtgggtaatgtcagtgtaggttcttaactccccaggttatggcccctttcctggtgacaggtgcaatgctgacttctctttgaactgtaagttggaagaaatttgtcatgggatcatgtgccttaaacgagtgggtttggaaggaggagaaggtggaggaggaactccaggcaagagaatccctgatttccaacctccccagtgaatcacggaacattggataagtcattcatgggggtggaaagattgggtgagaattgggaacttcaggccagattttttttttttaaaggagcaagtcattcaaaatcctctactgacagatgatatctacaataatttcttccccttttccacagcattattttatccaccttgaatcattttttaaaatctataaaacaaactttcttttagctgtcttctctgttttagttaaaatatatatatatata

SEQ ID NO: 45241 - DNA, 1494 bp, Homo sapiens
aaagtcagcgttcagaacagtccaccattgcctccaaagtagccccatcagctaaacctacaactgatttgaatagagtccgcaccacaaaaaaatcatattttgtctgaaaaaattaatccagcatttgcatttctagtctctaacacgcccttgtttttttgttttgtttagttctgtttttataatacaagaatgttcccctttccagttaaatgacttgactttattatggcaaatcttgggggtaaaatggagttctgaaaagaggcaccatgcctcctgtgtatgcctctgagtatgtcttgccactccaggtatgtgatcagagatagagaagcatggcctcagcttagttgattcccgtgctgcctgtgagcagccagtccactgagcaaacgagaaggctgaggcctagggccatggggtggcctgattataatcacatagctccagccaatggagttctagttcacgttcttcccctgttgcaaccttggtatggctcagatgaccagcagactttggtccaattccgactacccctaacttagctgagtgattttgagcacattgcttaccatccctgggactcagtttcctcatctgtagagtggactggacagtctgtctacctgcctttatgtggttgttggacagtataaacaagatgtccataatgtgcttggcacaaaagagaggctcagcaaagggcagtgattcttatgggccaaatattaccaagctctcagaggtccctagcccccaagcaggggctgggtgctgaggaaggcagagacctccttgctgcctgagaggtgagataggacatttgctaagctcccaccaagagccaagtgtgacctggtggtccaaactcagccacagtggagacctcactagatggactgtgaagggtggagaatgggggacagattcctcacctctcatccctgtctgtctgtcccttcctcagaatcccagaacaagaagtggtggctttatttcacacacctctatatttaataagcaggaccatgacgaggtttggtgacctcagggcccaaatggactgtctgctggcataagtggtgcttgagtcatttcccagggatgagcactgggcaggcttccaggagctgaatttaccctctgattctctgctctcctcttctcctccccacccctaagctccattttagagtttccagcttctttggcttcaggaggcatggaccaagatagaaagtaaaatagttattcattcaccagggctctcatgcccttccctgagcaaaggcttaggctcgattgaagggagaccctggaagcccgagacactgaaccaggccctgaggctcctgctgatatgtatgtgcactggggacacaggctcagtgacctaaatgcccagagagagactggaggaaggagaagctggggcattcagggcaggctccatcagggaggtggcatatgaatgggcttttttgt

SEQ ID NO: 45242 - DNA, 779 bp, Homo sapiens
tttcccttccttcccactgccttcaagttccccaaagcagcgtgaagcacccaccatgccaggcacagaatatgttcagtcccacattatggctcctgccgagagggggtcctgcttcatttcagactggaatcgaagcacctaggtttgaatcccagccctgccatttagtacttgtatgtcccttaggcatacatcctgaacctctctaagcctcggcttcctgatctataaagaggggttaataatagtgcctatgtcaaaggctattaggaggattacagcagataatacacataaagcacttagaacagtgcctggcacatagagttgctcagtaaatgtgaactaatacttctggtacaaccattagtggtaacaagcattctagtgccatttcttcacggggcctttggagaagaaccaaagcttaaagaggcaaagcgcgacccctgctggtcaaaggttgtttccctcccatgccttagattaccttcattccctacatgcttattgagtgcctctgtttcagccattgtgcaaggcacacaggaaacagacttgctgtctagactccctgcataccgacagagatctggaagggccctgagggaccgggcacagtggcttatacctgtaatcccaacactttgggaggctgagtgggaggatcccttgaagccaggagtttgagaccagcctgggcaacataggaagatccatctctatgatttttttttttttttaaattagcccggtatggtggcacgtgcctgtag

SEQ ID NO: 45243 - DNA, 395 bp, Homo sapiens
acttatttctccttgctactctgccatgtaaccaccaaacgtgatgttcttaggacaggcctctgcttaaagaccactgctatcagggtgtgcattgcagcagggcagaacatctagtttgggagtttaaagatgcaagttccagacccagttctctattgacatcaccacctgcaaacatgagcagggcccatgcgtcaggagcccagattgatctactgtggaggccaccaggatgtggctgccctgtacactatgttctctgtgatcctgggcatctcctggagggaagccagggaactgtgccaggaacttggcccagccccgtcttctcactggccttcaatttcctcatgtgtctaaaaagagagattacagtagatgagtggtttacc

SEQ ID NO: 45244 - DNA, 1881 bp, Homo sapiens
aaattaatacatactcaatagtggccagttcgaggcagataattaaatcaagatgacctgaaaggatgtgactggctgtggctagtttacacagggtggtcagggacggcctcgccatggagagggctggtgttttggctgagacctgagagaccagaagaaatctgatggccagaaccaatgtttaggtccctaaagagaacaagcgtggcgagcaaagggggccagtatgggtggagatcagcgagggaggggggcagagatgagtgcccgaagcacacagtaccttggcatagggagggtttgattttacctacaaatgccattaaacccactaaggattttaacaaaaactacaattacattttaatttacattttatgttttatagagacaaggttcggctatactgcccaggttgatctcgaacccctgggttcaagcgatcctccctactcggtcccccaaagtgctgggattacaagcgtgagccgctgcgcccggccttttaatttacattttagccttccggttactggaatctttgatggggaatgagttatagtgaggcaagagcctctaacattctaggagctcttttcccgttcggggcctcaatttcccgttctacaaaggcgggtgggagggaacggggtcccaagtagtactggataaagaggtggccgatcgcaaacgctgagcacttcaaaactctgggcagagcgcttccgcgcctctcctgctatttcaccctggccacaggctagccgccgaggccggtcatccgctctctccgcggaggagtcaacgccacggaagcagcggcggaacctctctaagaatccttccagcttgtgctcttctgtccagggcagccaatcgcgaggaggagagtagtcagagggcggcaccctccccggtctgggccgagttattggctggtggtagcgtcgctcgcccggcagtaccacgtgacggcctcggccgcgggcgtttacactggctctgcctccggcatctcttcgccggtgcgtcctcgccgcgcccgtaggtcccggcagccgggccccgcctccttcggagtccgagcgatgggcggggaaagggacaggcaggtatagctctgtcggcgccgcggtgtccacctcagtcaggccacggtggaagacgcgtgccgcggcgcctggttgcctgcagcggcccggacccgagaggtgagaagagggaagcggaccagggaagagggagggagcggtgctggccgccaagcggtcagcgggcccctcccagagtcattctgcctgggtccccgcgcggtagaatcccagatcaggggtcgccgccgtggagcggggcgtgcgtcaggttatttcccgggtggtccggggccgggcgagtggcactgcaccctggtgatccgggcctgcccgtctggctggcggctgcccacccgccctccatcccgcgtatctcgccgtatctcgccgggtgccacgcactccgctgcttttccagtcctcgttgatccgtctcgaacctagatatctggaatagggatcgaggagataggagccaccaccacctcggacagatggggaaactgaggccggcacaggcgagacggcttggttatcttggttattaaaaatcacacacccgattaagtacaaaatcaggacctgttctttcggactcacacactaagttggtattatttcactggatggatggaaacactgagaagacagagagggcccagagccttgcctaaaaatacacagcaagtcttttgcagagctaggacttgtacccagctctccaaactcatagactatcagcctgggctccttccttgcacagattggggatcacagtgagtta

SEQ ID NO: 45245 - DNA, 2386 bp, Homo sapiens
agctggttctgggaactactaatattgagaggagacatagaaagagaatgaagcaagagccaaatcagacaagtcttggtcaagctaagacgtctgaattttattttaagtgaatgagacactggagggttttaagcagggagtgacttgatcagacttacagtgcaaaatgatcaatctgactgcttcgtggagaatggattgtagaggggatgtggggagaactacatcagtccaggcaggagatgatggtggctagaaggttggtgatggcggtagatgcagagaagtaggcagactggaatacagtgagggttgtgcgggaacttgtacaaatgtggacaacttgtgacactggagagaaaggacaatccaatccaatccctatttgatttacggaagctctccatacggtcattcagctcagcttgagtcactccaggaactcactaccatcactattcgtgggccagtgggagagacggattgagggcagatcactggagtgatgaaggcgctacttgatgcggcactacgtatgaacccgatcctgaatgagagggaaagactgagacaggctgaggtcaggccttgaacgtcgtgctgaggagagggtggtattgtaggcttcccagcgcccgacgtggctctgaaaggtgaggcggggcctagatccctcacgctcagcacagccccgcccctgttacctgaacgccccacagcagtgcccgggggctgagcggccggggcgtcccaccgccggcagccacagcttcctcctccgcccgggacctctggccggaagcagtccgttcgccttactagacccgctccaagcctttgagcagttcgtgtgggtccgctcccaagctagggctgggctgttgcgcttgcgccaggggtcgcatgcagtcacgcgctgccgaccgcttccggtgcgccgcgagggccgccgggacgggtctccctggcgatccgtggtgtgccgctactgccggtgcagccgccaaaccggtgcctcggtgacgaccgtgtccctgccgtcttcctcgagctccccggggcttgacccccggggccctcggcaggcatcggtgaggagcctgcggagcgaacctgtgctcctattcttgcccttcaggaccccatatcgcgactccgaggaggggaagcgagaggggctgtcgcgactccgcgccgtgtgtcgccgggcggggccgcggggccggggctccttcagcccccgggatgcgcgcgcgagccctcgcctccacttccttgttgctgctgtcacgactggagccgcctctcgccgacagcggggagcgcgagtgcgccagccatccccctcgtccagccgccgggccaagcgcctccgggaatgtgagcggcgcagcttgcacgctcctccgggtaagtcccgccttcgagggccgcgccgagccgctgggcgacctcgagttggatgctgcggctctctgagcctctactgagtcttccacaaagtagggccactgagccttagtgtcctccttccgcaatccgtatgggacattcggatgtcccagacgtcttagcttgaccaagactttgtctggtttggctcttgcttcattcatgacccagaatgagggaaaggagctagcccagagtcaaactgtggcccatggctgagccctcaaaggcaatctcgtgagattccaaggaggatctgatgggacagagaaagtgtctcgcatatttcaggtattgaccttaactctgttttacagatgaaataacggagacttagggtaagtagattgcttaaggtcagaggtccccgtgctggtgcgactggtgtagtctgtactagaacccggattttctgtcctctagagcccttcgtttttaaccttaaattgtcctgcctttttttgcattgctatactgctgcctcgagtctgataacaaacttgtactcaggcttagaacagggtaataaaacaaacaaaaccgtagggtgttgtcttcctgccctcagcccaaggtggctgtaatgagtgtttcctaacccgttttgcgcagggtgcttagtaccctatatgccattcattacagatgctctcctgcagttactgcccttctccacaaggctttcagccgcccagaagtcaattcagggcaaaaaagcgcagtccccacgtagccttgatttgaactactgcttcccttatcctttactggcctattgcttacccagccaagttgtagactgtgttctcttcctgggttgcactatggcagttagaatgtaggtttttgttttgtttttctttgttagtttagtttttgtttttaataggaagaggaatcatttagagatgacagagaactaggaagaacc

SEQ ID NO: 45246 - DNA, 4542 bp, Homo sapiens
tgctgggtcagtcgctcagcccctgcagagctgaagacatgttaacgggcaggagtgaggggtggggtgtgctgagaagcccagcagggacctggaagctcccagccaatgaggggtccaagccgagtgccacagatccaccagaccgaggataggaggccaggggtgtgggccagaaggtgggatggggtctggagggccaatcaaaggatttgagctgatggttctggacaagcaggggcccactgacgctttctgagctgaagggctggcagctggaggcctccacagagcccactggaaatcctgaaaactaaagctgaagggcagggcagtgtgcctggtgcttcacgccctgccaccagcacacatcacccctgccagctccagggttccactccgcagccccccgggtcccctaccttatctcccatctacccacctttgagggccagagctggcatcgcacccggaagccgcatggtgtcctgcagagttaaacaggagtcagggcccagggcaggtggaggcagcgacaggggctatctcaccacctggctcctgcagaatgagccccagcttgggccacccagccttcatgtccgaggggctgaagtcaaaagccaccacgtcccaagcctgaaagggcactcatgaccacaggctgtctcctctccatcccggacttagccttggggtcctggcctttgctttggctctgcttgtgactctcacgtggcctcggctgcgtccccagactctctctgtgccttagtttccctgtctgtacagtgagggaggggaagttgggctggatggtatccagtagcctaccagctctgacagcctgtcctccgggtgacagttccaataccaggctcttatctgccaggacaaatatttgggaaagtgtgatgaaagggatgggaggaggaggggggaggccagaacccagagaactcccgcagctccacaagcacaacaggaaatggaggaggctgtgggctgtgggaagggaagccggggagccggggctgtggaatgtgggaggtgggcctggacacctttactcagcccagagcatacagggaggcccaggggacagcggctaggggctgggcccaggagaggtcccatcgagcagccaggcctcacaggtccttggagaccagtgaagccaggctccccccacccccacccccagggtgcagatggggaaactgaggctctgagaaggtgagaagtttacccaagattccacagcagagcctgtctgagagggagacagagagaaagagacctggaatgatagaagtagaaagagacaaagacacagagacagagaggaggtgcccagagagacagcaccagaggcactaagagacagaagcaaggacaaagacagagacagaagcaaggacaaagacagagacagaagcaaggacaaagacagagacagaagcaaggacaaagacagagacagactgaatggggtggcccttgctctcctctatcttggaagacacacctcaggtcccaagagaccaccaggagccaagtatgccaagagtctgcctgcagcattggcaggaaggacgccagaggacaggggtcgcagagcatgagctttgggaggtgacggcatgatgaggcaacaaggagcctcctctggctgtggggctgcccagcctggcctgcctctgaaggccatgcccagcttgcccctacctccccatctcaccccttttagttttcagtttaggtctgcagaccgggttcaggccccagcatgccacctcttgtgccatcgctctccctgtggcctaagtccccagctctggaagtggatgatggtgagtacctcacctaccagggctgcattcacatgtcaggggtgggacataggcaaggctcctcccgcctatggacccccaatcttagctcttcccaacaccccaagaaacagtctgagcaaatcagctcttctcctccctcctccctttcagactgcctgcctgaaggtctcctcgtttcttcctctcccctctctgaactgctcctgactcaaagcccagcccttctgacgccccctccagcctctgctccccaccattcctctgccccagcccctccagctggatgccaggcctccttggtcaggagggagcagcgccaaggcggagccagcagcccccacagaggcccatctgcccctccgtcggtgcccctctggctgcccccttcctgctagagatctcagccaaagaaaatcattagcagaggctgggggagggggtcacttcagcttccctgcccctcctctcccagtctccctggctggccacactgtttattattctaaaggaggaatttggccggctggccaggagaagggaggtcactgcagcggggctggcctggctctggaaggctgggctggctatgtgggctgggccttcatggcatgcagcccccgaccctcctcccatgtggcactccatcctctccccttcaggctctcttctgctgggcctggggctgggggtggcttagagactctgagctaggaggtatgctttttgaatgggcagcagaggcccagagaaggacagaagcatgccccagtcacacagcaaaaaggcagattcaagctgtggggagaggacaggcaggcagtgtggatgccgtagggaggttgtaggcaccccagggatctcggactggctttactatgaatagagcaatcagctcccctcataagcaccctgggacccactgtgagactgagcgagtctccagcctctctgaactctgcgtccccatccatatagagaggttggcaggtgtcatctcaaagagctgtccctatggtgaagctctgcctttctgacaggccaaagagaagattctagtcaccacgaatcttaccggggtgttttgaggaggtgggggctagtaagcaggagggggctacattcctgaggctagagtcacataagaatccaccagccatctcattccacgaaaggaatttccatgactattcagccacagacttgctgtgcgggctttgacaagttgtttccctctctgggcctcagtttccccatctatacaattaagagttagaccaaggctgggcatggtggctcatgcctgtaatcccagcactttgggaggccgagccaggcggatcacgaggttgagagatcgagaccaacctagccaacatggtgaaaccccgtctctactaaaaatacaaaaattagctggacatggtggcaagtgcctgtagtcccagctactcaggaggccgaggcaggagaatcgcttgaacccaggaggcggaggttgcagtgagctgagatcacgccactacactccagcctggtgacagagtgagactctgtctcaaaaaaaaaaaaaaaagttagacaacagtgtttcaacagtgtttcaggggactttccgctggtgacgtggaaccccaggaggtggcaaggaaagagtggtagggacaagaggctggagggccagggagggcagagaagggcttagggcacccagacatgacttcccaggccatcctggatgactccctgataccccacattttccaccaaatgtgttaggcctctttgtgcttcccagaggctgttctggttccagccaatcccagggaggcccaggcagctgacttggtggtagtgggcttgcctgtgacaacttcccctctttaggaggactgtactctagggaagggccacctaggacaagctggatgtcacagtcagagagcaggcactccccctatctgctgtactctcctgcccagggaggcctctagagcagagagagggagggcacccctaggtgtcccccttttgcccatgaagagagtgctatgtgccaggaacccctcctgattcctcctattctggccaggttgtaggctcagaggcccaaagtggagatcatgcccagctcctcacgtgactcagagggaccccttaggggagcagagtgaggaccccaagtccggggcacagagtggaaccccaagttcaggggagaggagtggggggccccaagtctaggggagcggagtaaggaccccaagtccaggggagcagactgggaactccaagtcaaaaggaagcagagtggggaccccaagtcaaaggagcagagtaaggaccccaagtccaggggagaggagtgggtgccccaagtccaggagagcaagcatgcttggggagtcattctcagagccccagacttccctcctcccagcacgtacaattctccactcctttcccaccgccttaatctaaataaatccagcccatcttggccacatccgccagcaacagcttccctccctcagggtcctgaggctcccacgacacaggcaggccagggagggggccctgcattgctgcgggggttgatggggggagcctgcacatggtcagcacatacacacagcacagatgcacagatgcctgcctacgcacttcctcgcacactcctctgaaacac

SEQ ID NO: 45247 - DNA, 2727 bp, Homo sapiens
ccaacgtgcatgtttggttgggtctggggagaaggcagtggggactgaaaaaaacagatggatttgagagttacttagctgagaatcaacaggactgggtgacttaatattgaggggctggagagggaggtatgcacctctgtatctggcttggaatactgggaggcagaagtgtatgtgtgtgtgtgtgtacacgcgcacgtgctgaggggacgatgccattttctgagatgagaatgaggtcaaagagcaggagtgagagctgcaactgagcaggtttaggatagggagggtctgtgggcactgaggggacagtgggatgttcagtctggaggccaggaacaggccgggtagaaacagcagtgagatgagagagagagggccatgctgcagggagaggggggtgctgggggcaggcagtctcaggcctgggatgctctgaataaaccaaatgcctgagggaggaggaggcctggccatggggttatggggtcagagtcttggaatgtcagcacgccagagccctcagggatcatctatctgatctaactgccttcctgtgctccattgtgctcgtggggaaactgaggcttagggaaggaaagcaagagggcccattgttttggcctagacaagatgggctcgggtgatcggtggggctgaagctcacctggctgcgcagctccccgcctccagcccctgctaagatgtgaggctggtggctcaaggccccaggcttcaggctatagctgcccctgccctctccacagcacacctctgtcctgccacacattgacctttgtttcaaagtcacattctctgcacgagcccagccaggcagggattggcgactgagactcagaggaggtaatttgctaagttgttgggagaagtgagccacagactccagtctcctgacccagtccagtcttctgttctccgtaccggggcactttacaggcctgggacagactttggaggggggttggggtgggaagtaagaagacctggctctagtcccggctgtgacacccacttataggatagtggtcccccctatctgcagggaatacattccaaggccccagtagatgcctgaaactttggataaaaccaaaccccatacatactatgttcttttccctgcaaatacatacctattataaagttttatttataaataaggcacagtaagagatgaacaacaataataataaaatagaacaatgataaaaatatactgtaataaaagtcatgtgactgtgttctctctcttaaaatatcttactgtatcgttcactcttcttgtgaagacgtggaatgacacggtgcctacgtgataagaggaagtgaggtgatggcgtaagaattgtgaagtagcgttaggctactactgacctccagacattatcagaaggatcaggtcatctgctccaagtgatcctggaccaccgagccatgatggtgttgatggctggatgtcagtagtggactttgttgatgactaacaggtgggtagcgtatatggacaaagggatgattcactcctgggcgggacagacaggacagtgcaagatttcatcacactactcagaacagcacaaaatttaaagcttgtaagttgtttatttctggaattttccatttaatgtttttggaccacagttgatctggggtaactgaaacttcagaaagtgaaactgcagctaagggtgactactgtacagtcctgaccctctctgagcctcagtttccttatctgtgcaaaagggtgggcaagagtgtcttgggagcactttcagggctgacatgctgtggccctcagggctccactctgggaaggcagctgtgctgagctggaatgctgggctcggggtgggggtgctggggagggacccatgtcatgactcagctcagagaaggctgccagttccaggcctgggagtctgtgggggcaagaggcatctggagccagggatgaagtcctcccgccagcagctaaagagtaggaaagggatagcagcacagcctgggcctggcggcaagtctggtccatgtggctgtccccaagcaggctgagatgtgggtgtgattgggtcatgtgatcagggagccccatcctgggagccagagaagagagcaggatcggagggtgaggagacagttacaggtggaggggagaaactggggaagtggccgaggctcccacccgcccccttcaatcctatgctcgctccacttccagttgttggagaaggctcagtgctccacccctgcaccacgaacctccccaccagcctcgggatcactctaagggctacagaaagagagcagcccggcgcagcccactcggtgttggagccattctctgtgccacgctgcttctaggcccggggtcctctttatgtttctccaggtacctacaaagtcccctgaacaaagcagcagaaatcgactaagatggggcctggcgtgtgctcccgctgctctggaagtccaaactggatggaagaatagcgctggttccctggaaggctgctaagccccctgcaccccctcctccagcacaggctcggctgcctctggctatcccaccgccaatctcctcacctccaatctgtcccctccacctgttctcacaccccagccagagggacctttctgaaatacctatgtgacctctccggccctcctctgctctccatccccctcaggcaaaggctggct

SEQ ID NO: 45248 - DNA, 1143 bp, Homo sapiens
cagatatgttcagttcaggtttttctttcaataatgacattcattgctcaccccatgtgctacgcgtggctgggcctgggaagcacacagtccttgtcccctagactggagaaggggtgcgagatcatgtcttgggaagatgtggagggggaaggttacagagaagggcatctccagggtaggagagcaagatctagagggggagaatgcattcagagtccatgtggtctgggcagctggagcaggagagaagccacaaagcccccctcagggtctgacttcaggggtcctgaattgctctgcagaagtccccagtccagtggggaagactgctatgcacacagatgacactaatataacaggataagggccaatctgagcgtcaggggagccagggcatccaacgagagcagagcacatgcctagcttatcctggaaggcttcctggagtaggtaatgtttgaactgagactgaaaaggactagcgagtatggatcaggccaagaagggaataaaggagaaaaggaacttgagcaatatggactgaaagtataattttttttgaactcgggagtctactacccggggccttctctccccgggggctctggtgccagctgcctgcccctctgtttactgttctgggaggtggccaggccataaaaagtgtgcacagcctgcctgacatcgccctttgctcccatgataacagtgcacaaggtggatcctggcctggcacaggcccctgaagtgcagcaggcacttctctctctcctcctaccagtggcctgggagacagcgggcattcattagtaatggtggacacctgaggcttgggaaagaaccagggttccaagagtagagggggaggggctggtgaaaaggcggctggcccggactgaatagagttttctgatcttcaaaaaaatatgctctgtgaccctagggtaactgcttcccctctttgggcccgcattgccccatctgtaaacttggggaagttgtctaccagaaagaaataactctggtcaagtaagtttgggaaatcctgctgaagccacttctctgatagagtcacagtgggccattagcacatcaaagtctctgacaagccccacagcaaagaaaccccttgaattttct

SEQ ID NO: 45249 - DNA, 768 bp, Homo sapiens
ggtcccggagcctctggctgctgtttgtgcagggaaggggaggtgccttctgggtataaatagcagatggagatgcttctctctggcaggagagttaacccttggggccctgggcacggagagaggcttccctgccttgtgagaaggcatggtggctgtcagagttggaagagtccttagcgatcacctaggccctgctcctcagtgcggtctatgagtcagcaggcttggcatcaactcagagagtgttagaactgcaaaatcctggccccatcccaggcccagtgaatccaagtctaccttttcacaaggtgcccaagatgctggttcagacagaccttccctcagaggatggggggaagtgattcagagagggcagtgctcctgcccaaggtcccacagcaattccctgacagaattagccctcaaagccacacttcctgccctcatgactcagcaccctcataggcagggatcagccccccaattgcacaagggctgaagaaggggggccaggcagcgaggtgttgtttcagagcccatccccacgggttctgctgccctggctctgtcccagcctgccatggcccagcctctccatgcagcctgtgcccggcctgtgggccagggcctgagttggagcttgaccctgtaggcaggcaggtgccaggtcgacggaggagggcagggccacggtgccaggctgaatcggcatgggtgtgggtatggggaatgggccacagcggtcaaggccaagcatgtccccct

SEQ ID NO: 45250 - DNA, 1352 bp, Homo sapiens
ctaggccttttttttcctatgcatttccattcatagacatatatatagattaaaatgcattttattctgtctcctgcttttttctcatttaatatatttcggacattttttatgtcattaaatgtagatttatgccatcattttaatatctgtgagagattaattttgaacaggagattctgcaagactcttttgaggaagtggcatttgaaaacagacccttgaagaatcaggaggctgagacggtggccagagcgttctcagcagagggcagagtatagacaaagtcaagttggtgacaggacactctgtccattagaagcttgcttttgacagatgcaagaatcagggctcagagaggcaaggtaatgtttaccaaggtcatacagtgagtccttgtaaagggcagggctcgaacccaggactcccaactctcaggtctgggctttggcctccagaaaatccagtctcgattcttcacattggtattcgcagctttgcatcacctggttctcacccgctttgattaccttaatcacagatgacatcccatcacaggacatcctctgcatctgctccatgcacaggcagggaggtcaaggcccactgaggggaaggcagtctgagtcattaagcaagatgataatcgctggcatggagagagccctcactgcatgtcaggccatgaactggggcctggtccgcatcctaccacaagaccctctcttctcctccctgggggctgtgcctgtgtgacccctgagtcaccgtctgcctgcctcactgctgtgagtcagcggcattctttgtggctgagagcagcgcagctcaacctcagggcccttcccctgtaccttggtgagcctggcacatcctccagctaggctaggagtaaaagagtcagcggatgagtggccttgggtcatggcctgagagctgacctgtgggggccactgggattcggatgactcagagctgcctccatgctgttcggaagctggacactgactctgtgaagtagtactgggcagaaagtaccagcaactgtctgggctgggaagggatggtaggaggcagtgagaagtttccctgataacctcccttacccctttgagtacaagtcaaccccatctccgggtggctgttggggtgagggttaagagcatgggttttgccacaaggcaaacctagtttggggttggagtcctaagtctgcttcttacagtgtgaccttggcaagtcacttaacctctctgggcctctgaaaaagggaaactgggaaaaccagtgcctgctactgcaaaactaaatgagatcatgtatgtaatgcacttagcacagtataggacact

SEQ ID NO: 45251 - DNA, 1853 bp, Homo sapiens
cataggctgcatctgtccctgacaaggcacacaagatattgaactatagttgcttggttacggacagtcgtctctgtgagctttgagggcaactgccatgtattatgcatcttttgaatccccctagcctagccgggtgctagcccaagttaggtgcttattacagatttgttcagttagcgaatgaatcaatgaataaactggcaattcgtgtctggttcatgggcaccaaaaaccgtgcgaaatggataaatgagcaggtaatggcagtacaaagttcggatctagagaaagatccagattagggagttcagagatgagtaaaacgcagacccagccatcagagaattaacaaggaagataaatctcttcaagaagccagccggaaggattaaaagagagtcgtccaagtcccggccggccccgggggcgggtccctgtctagccccgcatgctccgcgccaatgggcggtattgttgatcacgagtctccgcccccttcgccttgaggggcggggccggccactcccggagaggggactacgtttcccggcgcgccgcgcggccggagcgaaagaggagccggaagtgtggcgcgcgaggtctaagggcgcgagggaagtggcgggcggggactaaggcggggcgtgcaggtagccggccggccgggggtcgcgggtatggccgaggccaggaagcggcgggagctacttcccctgatctaccaccatctgctgcgggctggctatgtgcgtgcggcgcgggaagtgaaggagcagagcggccaggtaagcgttcgtgggccgtgtgcgagggccgcgtgcaagatgtggagatcagcggcccgcggcccgcgccccgtccccaggcgacccggcaggcgcccggagccgggtcccgcagtgctcgacggcgcggccaggggtaccggaggagccgcaatctctgccttcccactgcgacttcagttcccctgggcctcactttcctcatccgggcagtgggttgggccagaaagtgtgctcgcaggggccgaactttgtaattcccgcttcccttacctccacgcccttcctggtagcgggtattttaagtttcctaagtctcccgccacgtggctaggctctgcgcggccccccctggggcaaggaggttgctgcgagtctcgggggtggattgcgaccagcccctcgggggagcgcctggaaaagggaccctacagcctcttagttgagctggaactcaggcctttagcgattgtctgtactgagacggtcagctttggtactcgaactcgtggtacagtcatttcttacttgattaattcaactgttaatccggtactcagggtgcttcctggtgttcgaatggtgagcaccatctctcagccctcctggagcttacactctagtaaggtagacaaatcaaagaatcacaaaagtgactatatgcttagcaccgcaataagtgttaagaatgagagggatgggccgggcacggtagctcacgcctgtaatcccagcacttagggaggccgagactagcggatcacctgaggtcagaagttcgagaccagcctggccaacatggtgaaacaccgtttctactaaaaatacaaaaattagctgggcatgttggcgcacgcctgtaatcctggctactcatgtggctgaggcacaagaattgcttgaacccgggaggcagaggttgcaatgagtcaagatcgtgccactgcactccagcctgggcgataaagcgagactctgcctcaaaaaaaaaagagagatggatggcagattgccctggtcaggaatagctgaggtgtaaatgccttgtggtgggagggaacttgt

SEQ ID NO: 45252 - DNA, 947 bp, Homo sapiens
ctctagggagagaacccatgctctcttctgcttttcagaaggaggcggtgtgatgcaaggaaagttacaaactcctgctcttaaaggaaccccctcatttgacaagagagggagccggagcccagagcaggccaaagacttgctcaaaatcacccaaaaagtcaatgttagagtcagagcctgaatccctctttcctgtgactcctggccggtgcttcttcccagcacatgcgcacggctctgcagtccaggatcggtgtgccctttcctggtgctcacacatacctctccggggccccagggcgccggcccagcatgggcagttgctcattgttggagataaggtcgcgctggtcatccatgactggcttctgatcttcccgacagctcctgcttctcctcctgtgcatctgggaccctgaccccccggctcgcctcttaaagtcggtgctggagaggaatctgattcgtccacagaaggccactccgcccacttggtagatgtggaagtgaaagctacaaaggctggaaataccccactttggtgaagctgccttttgcggggcaggatgtggggcgggggggctccccaggcaggtagaaaggccagcacgatcccattggctgcccagggccctcatcacttgtttctgggcaggcctttggattcataaggctctttgaatgtttcaagaaacaggcaaatgtccactccctagacaggaaagcactttgaaacagaagacacctttgtttgtctccccttctcatccacagatgagtgggtgcagaaaggggctgtgcacccttggtgagctcagacaagtcctcttctctggcctccgttatgtcgtctcaaacacgcaggaggaagtttggacgacgtgcaggggtgaaaacatttcttttctttccctgtttaggttcttagttgacacgctcccctg

SEQ ID NO: 45253 - DNA, 1278 bp, Homo sapiens
ctgggctctagtcctataccttccatatgtgccccaggcaagtatacatcatcccttctctcacttgttcagcagttatttattgaatactttatgccaggcactgttctaggagcttgggatacatggatgaacaaggcagacaagtatccccatccgtatggagtttacattccaggggcaggagacaggtcagtaaattatacttttgttagagagtggtaagtgctatggaggaaaggaaagttgtttctggagatgcagggttgggggcaggttgtagtctttgatagggtgttgggatgggcctcattgacaaggtgagatttgagcataggcctgaaggaggggaggaagttcaccaagcccacaaccgggcagaaatcacagccagagcagaggtcccatggtgggaatgtgtccggcctggttgacgaaccacaaggaggccagcattgctggggtggagcgactgagaggaaaagggagagggagggacagacgggaggtcacgaggtgtgcagccagatcctgcagccacccactggactttggctttatgccgagtgaagccgggagccgtgggaaggctctgagcagaggagtcgcctcctgactcttgctgtgaaagggtggctagggctgctgcgtgggggatctgtacaagatgggcagatcatccccgtgcctcatgggctgctgtgaaggtcacggggggacactggacaaggaaatgcttagaaacaaaaggccctgactgtggttacagggcttccaggagagagagctgagtggctctgctcacaaccgtcttattgaagggtcagtggagctcaggagagggttataatttgcccagggtcatatgttctacaaccaattcaagatcggggacttcccactcttctcccagggcaaataccatctggcaggtggctaagtagtgcagcctttggacctgtgatggctgtagtgcggctgacggggactgagtcctcccttgaaaatccattcactccacaaatatttgttaagtgccggttatgggccaggcactgatctggactagaagctgggacctagagatattgggagacacctggcaagggctaagtcctggtctctggtggggctggtttctggtggggctggtctctggtggggttggtctgtctctggtgggtttggtctgtctctggtggggttggtctcgtctggtggggtttggtctctggtggggctggtctctggtgtggttggtctctggtggggttggtc

SEQ ID NO: 45254 - DNA, 2464 bp, Homo sapiens
gtatcaactgtggccacatggcaaagtaccatgagaagtatcctttccccagaaactaccaacagctcagctcacagcacctacaagatagaagcctagggatctagcagcagatgcctgaaggctgcaccccaaaaggcaagaagaaacccaagaccaacagctacccatgtactggtaccattcctaacacccttcatggggcgagggagctgcttgattcctgcatgaactcctcagcttagaattcaagggacccttaccaacacagccctcaagcctctcatctcctgttttcctgtgctccacctgatcccttcaaaatgttcaaaaatgcaactgatttgactcccacaactatttagaactaaatctttgtcaccaacatcaaatatcaaaggcactaaaatatatccaaaaggcaggctaatggaaaagacccatctcagaaatctgatgggtcctgagactaaataactctaacctattatgaccttcataataattgcaatcatactgtcacaagatctaagggagagagaaactgacaggaggaaggcgggtgagaatgaatgagaaagtggaaggctaggataagactgcttccggcctaaagccccaggccttctgaacctcctggtgttcagaacaatttaacattttcagaagacactaacactaatcgatatcctgcagatggtgaagatagagagtgtctcagcctatggtcacagtaaagacagtggcaaaaccaaacatagaaacaacgtgtcctgactcccagcccagcactctctgcctcctgccaagatgcctctacaccacaaataactaccctagtctgtctcaggtgttcctagatctctcctctgccttccctatataaactttagttaagtgtgtgaccacagtaagtacttcaagtgtaagtcttgggtgtacgaagttaaatgttcctatcttcaaatcagaccaatgagcacgacccagtgcgttaactattgtaaggaacgcgccacaggagagaagcccaaagttctgcctcgagaagcatagaaaggctccagcatatctcaaatacgtaagcatgagtatgtttcggcatgatggccattcagtaaatgccaatttgcagtttctccgttcctaacatcccctaaagtaacgagcagagtggtcatcaggagtatataaacgcagggcaagcgcacagcaaacattggtgctgggccctgagcgcccagaacttgcaacgtgcccgactcagcaacggaaagaatcgcccagatttagaagcatccaacatagtgcgagagttttccctgctttccttctttgaatgatcactacaaacccatgggatcggtgctattgttattcctattttgcaaacgaggaaacaaacgagattaggcgtgggcctgcgatcaccaagaaaaaagtttggcgaggtagaggcgggagcccacgtctgtcccgggttccctcaactacgctgtgcagctcaaacgcggccgtggccgtggccgtattgcggggccgaggccttaaaaggctggacccgcactcacccttacttcacaagctcctccctgaaagcaaaacgggccttctgagaccaggaacgaactcaatcccgagttggccaggatccaggtgggccagccgcgcgtctcttgcccggcacctagctcggttcccacggaaagacccccgtctctcgtcccaagccccacagggtcccctcgccgcaggatgccccccgattgtcgcgcccgggcctcctacctgcacgtcgtctccagactccacaccggaaagagagagtgggagggggcggagcgacgggggtcacttccgtgtcccggaagtatacctctgaggtcacggggcgaggtcgggttccggaagacgccggcattattcctcccaaagagtttaagactcgtcataaggaaagacggtttattacttaagggagagcgaaaagaggtagagggctggttgtcgctgcgagcgggtcggcctaagcgacagtacgaagcggctacacccgcggggtgaggtgggcctgtattccatgatggcggtggtcgtggctagacagacttccgccatcctgactcccgccctggcagccttggagcggcagcgccccttgtgtggagcaggggaataacaacaacaaaacggccttaattaaagctagggtggcgccggcctgtggtcccagttactcaggaggctgaggatcgcttcgtccaagtagttcgaggccagcctaggcaacatagtcggggaaaacacaccgtaatcacttactttggcatattatataatgggcaaaataagaataaattattcaatatgtattttcagaccggtctgggctaaacagtttatatgcattgcttcatttactcctcaagacattatcaaataattttgatttccctcttacaga

SEQ ID NO: 45255 - DNA, 1636 bp, Homo sapiens
agaccatcctggctaacatggtgaaaccccgtctctactaaaaaaataaaaaaattagccaggcgtggtggcggacgcctgtagtcccagctactcaggaggctgaggcaggagaacggcgtcaacccgggaggcggagcttgcagtgagccgagatcgtgccactgcactccagcctgggcgacagagcaagactctgtctcaaaaaaaaaaaaaaaaaaaaaaaaaagaaaagaaaaagaaaactcccagctcacgaaacagcacgtggaaaggtcttgaatcaaaggggacctgggatcattcagggattcgggagaagtctctgtgctgaggggagggggtgggtgggaggtaagatcaaaggttggggcctgggccttgggggcggtgggtgagaggtctccctcgctctgacccaacggaggcagatcctcggtttgatcctgggcccaactctgctcagtgaggaatgtcggggcggggtcccggggtgcggccccacccacggtgcgtggaatacaggggcggggaacgcccgctcttcccgaagtgcccgctagatggcgccagatctccgtgctgcaggggaaggacccgcctcggcggggcaggtacacgtggagggtggagggtggagggtggagggtggagggtggagggtggagggtggagggtgggcggaaggcgcagggtgaggtgtctaagcccagaagatggttgggacgtcctaggatgtggttgtgatgtgacgacggccttgatgtacattctccctttgtgtcccatcacaccccaggagctcagattattattctcattttactcagcgggaagctttaagtaggatgaggtcagggctgcgcccaggtcactcagctggttcagggtggtgaagtggacaaagatggcacccggcctctgtgtgccctgcctgccgcaggccagctcgcagagggcctgcgctcagtccatccaaagggaagggcagtgccagggcagcccaatggctggcagtgccagggcatggatcccgagtcgtttattcattcagcgggtttattgagcacctactgtgtgccaggcactggtgagcgataaagcaacggataacacagacatgggtctccttccccacggaagggacaacctaatggggagacagccaggcgttatacagataagcctgccaacaactttattattagagattgtggtaagggctatgaaggaaatacgcacacctgagaagattccaaggtaggctcactctcgaggtgggcagggctcaggcacagggagggctcaggaggagatatggaagctgagacctgaagcgtgcgaggtgcagccatgaggagggctggaggagcagccttaggggcagagaggacagcagtgcacaggctgccaaaattgggaggagcccgaggaactgcaaggaggcggggctggggccaggagagagaagagtgttagggctgtccctgagggcaggggccagatcctctgggcctgctaggccctgccttgtcaaggagtgtagatttattattatcgttgttgttgttgttgttgttgttgttgttattattattattattattattattattattattattttgaaacagtt

SEQ ID NO: 45256 - DNA, 877 bp, Homo sapiens
atgatgaaaccccgtctctactaaaaatacaaaaattagccaggcgtggcggcaggattagtcgagatcgcgccactgcactccagcctgggcaatagtgcaagactccacaaaaaaaaaaagtattattatacaatctttgcagaattgggtaaacatttgcttttgcccctaaatgtctacatagtcatgaacaggtcactaaatccccctgagcctgtttcctcttctgttcaattgggatgataacaagctaacccatctctaaccggggtggttggggatgaaccaacaggatcactggatcaccgtggagcttctttgtaaattgatgtgcaggtgtgggccgcttgcacattccagacccacccctatctctcccatctcagggcaggctttctccaaatctgcccgcccggaaggaaaagcacccttcagttcttggcagtctctggattcccagccctgagttgctgctctcacactgggaagtcggcctgggagtgaacattaagttcaaggtccctggttaggcaaaaaagaggctgatccagaagttggagtaggggagggggaggatgagctgagtgaggacaaaggagctggagccaaaatccctgttggccttgcttcctgcctcactctgaggcaggaagcaaccagaaagctgcagagaattagtctctgaaaaaggacctgagcaacagtctcgggctgggcagagcccccacttcatctcccacatacgctccccaaggctgatttgcaggagcctctaagaccgctgggaagccctaagcagcaccaacctgagaaagggagtctcaccccataggagtccttggccgagaaagcgggaagccgggaaggggaggct

SEQ ID NO: 45257 - DNA, 1232 bp, Homo sapiens
ctagatcatgacatcgctgactgaattttagcactaactctcacagcctggaagaacttgagaagaatcctggtcccttgcccacccaaggcagggatcctcctagcccaccgtaagcagcggtggtccagcctctgcctacccctctcctttgctgggtagagaactcccccctgacaaggccactgggtgttttgaatggttagggagagtttcccgatgctgggtggtgcctgcttccctcagcttctcccatgctctcagtgggttcccacaccacctgtgggggctcacaggacaagcctgagtcttccttcccagcaaaggcaagagtgctgggtcctgcctctccccttacccgagccactgtcctacaggctacaggccctcccttgacaccagtctctgcaggtgggcttcagggacccacaccaggactctcagctcctggcaggcctctctgcttccccatccctcagcaaagctgttcctgggaccccagtagtgcaggggtcctgccagcctctcccgattggtagattaccttttctttccatctgggtgactggcccctacatcctggtctctcagtcctgcctgttcccagccctggggagaggtgggatgagtgactacaggtgctggggtgagggggggcacaggaatctcaggtcgatttcaggagccccaggtctgcctgaaaaatgcttttttttttcaactttaagagactgaggaggaagaaggaagaggctttctcattgacagagtcacgaattccaaggcagtgctgaggggcagtgagtcacccagaggtctccacacagagcagaaaggctggaatcagtcaggcggggtcctggcggagtaaaactagagctgggacttgaaggaaaggggtgctgggactgtgatgaggttggggggaggcattcttggcagaaggaatgctggacacatgacccagtcccagcctgcctggatagaggggtcagagggtgacaggatggccacgtaggtcagtgactgagggcagcctggaggttagccttgggtgtgtgtgtgtgtgtgtgtgtgtgtgtgtgtgtgtgtgtgtgtgagagagagagagagagagagagagagaaagagagagagacagagacagacagagagagagaatgagaatatcccagtgagctataggggagcattaggtaaaagtaacagtaacaactatagtttggctggat

SEQ ID NO: 45258 - DNA, 5091 bp, Homo sapiens
accgcgcccggcccagttggataatcttgagcctctaaaggtccttaggaatccaccaatccactgtttcccagactcaggatctccagggccgggtgatctgcatccttacaagctccttaagggattcactcatccaaccccaccctgctcattttacaggctggctcatgggtggcagaaagccctccactgggagcaggccgatccgagtgccagcctaggctctcattaacctgccaaatcatctcatctctctgagcctcattgttcccatctgtttaacgggaacaaccactgtcatcctgcctaatttgcagagtccttgggatagctagaataacaggggttggggggcaggctcagcgggagaagagatttgcacaaggtcatttacctcttcatctgcttgttttgtgccaggagagaggattctgctgggaacaacttgttgggaaagatgacattctagtaaacaatgaaaccagtaaatgaaccacataatcacgataaaggggttttcgagagtcagggcaaaggtgtgtgttgggggagggagggtctgcccaggaggggtcattctggcagagcactggtggtcggggagctgtcccaggaggtcctggagagctgtcacaagcccaggggtggaagagcctggaggccctctcgagcccagccagagcgttcccagggccctcggagccgccgcgggcgcgggtctttgtctcccacattctctctgccgcctctcccgacccccagcgctgtttcgtctctgaccccgaataacttgttggtttccccccgggctttgtttcccgggggtcaccgcctcggggacgccgggcagccgccccggccctcgtgggtcctgcatctgacaccccctccggcccccgccccctacccgctcggagataggggtcaaaggcagcccgcgtcacgtggtcgccgagcagcaccgaatcggccgggagggccgagggagaatccgggtggaagtcgagaaatccagccccgatagcagcgctcggtcccgccccggcccccgccccggggcgctcaccgcacgcccgccggccgccccggcctccggagctcttctctggccggcacccacgcggcatcacgggatcgaaccccgctcccagcggccgcgattcggggaggtaggcgctgggccgaggaggtaaggggagacgggcttgggggctctcggcgcacgggtacgcccctctgggctagggggcgaggcagcgcgccccaaccttcagtctccagggagacccctccccgctgcgggacgagggggaggctgcgagctgccccggcgcagcgccgggccgggactgggggctgggcaccgggagggagcgggagggggaggagagcgggcgggaggaggcggcggcggcggcgtggagcgggggtgggagcggcgggaggcggccgcgaaggggttaaccctggcccgggccggagcccggaggcgcacgcacggcccgggggacccaggcgtcccgctcctcgccgggagcgccccttcccccgagtggcgccccagccgtggcaggtaagaggccgagagggcccgggcctgccagtcccctgtcgcccagccggtggggcccgagcccggcgtgcaggccgcgcggggcccccagcggccgccggcgcaagtttggtgcgggcgggcgccgggcgggcgggtggagtcggccgggccccgcgcgcgggggtgggaggacaaagggtagggggccgcgcggggccgggggcaggctggggtgcgggcgagggcagcgcggcagctgtaggtcacggataatgtcactcacgaggaatgccccctccccctcccctgctcccgaacaggggaaacttttgtctagcgagggagggggttagaggccgggtcctggcttcgcgaaggctgaggcagccggaccggttttctgcgggctctgagcggcctgctgtctaactcccctcctccctcagggtctcgggagcaagaagttctccctttgcacgcagctctttaacgccctgggacaggggtgaggagggggcgccggtgggacgggtgggctctaggaccggccgggaatctggggactggccacttggctttttgcagattcgagcagcccggtgtgccctgcgaggctaagggaatacagagccccaccccctgaacgcccattgttgccctccccacccaggagagctttcagaatggcctgcgggcagttttgcccccaggtctcttcagagcgacctggctgtttgtcagtttccagcggtgtgaccttgagtgggttccttaccttcccctagcctcagtttcttcacctgtaaaatggggagaatggtatttgctagaatgaggatgagaggagtgtgtggtatttcagtaaatggtgtcatgcttatattcaacaagtacatttcacgtttactgtgtgttagggcgctggactaattcattgctttacatacattctctcatttaattctcccgcattactattaaccacattttacggaggggcaaactgaggcgcagggttgtaaaggtcacacagatagaaagtggtggagcttggattttacctccctctctcagcctgtgtctcagccacagatctctagagtgtcttgctgtgacagctcacagtttatttctccttttttttttttttttttttttacaactttggccctgtacagtttcattttcaattgaaattatggggacatctgtcctcttccccattttccccaccggcaggtaatgctctcttctgcctggtacttgttccaagtgaggtcttgtgccctggctcttgttagcatgggcagctggagcaggagggaggtcagttggagactgggcctggaactccgtaatggtccaagtgctgttgctggctgctgtgtctatggcagtgcggatggtgcagggagaagcctgtctccctggctctgactggagacagctggtggctttgtcaacaggcctctctccctagcacccagggacagccacatctttacttctctttcagaccaggttactttcagatcagcagggggcagaggtagggcaagggtgttcttgtgtaacttggccatggcaggggttctcattgctaactaatagacgggtctggatgcgcagagtccttgaggatagtaatagtgtcaggattgcagaaccctaatggagaatgcatgtgtgtacaggtccctgagcctagctagctcagtattgggcaccctgtaggccctcagtaaatatcccacaagtgaatacgtgaagtggcttagatttctgctggctttcacaccctgggttggcccaatcatttggtgggggtgacatcttatgagtactgatcgggctctgattgaggtccttgagtaattactttaaaaatggaaaacaaattgcaatttaattaacaacatcttaaatctagggctgagagagagtgtggtgggtgggggtagataatgagagaagttcttggggaaggaaagtttgtgcatttcagcctgctccgaggggtgttccagcactgtgtctgggttttgcagggtttgtaggctttttgagggccctggaaatagggggccctcctgggctgatagttcagcttgtaggaataaatgtggaaattccgttgctttgctggacattgaggggactcagaaaagcagggcattgaatggaggagttggaaggctgactcgtcatatggtcagactgtccttgtcattgtggtcagagcaagaggaaaggcctctgggggaatcaacaagtaaagggagggccccagcaagcaagagaacatggatagtgagcctcctgtcgcaaggaggtatgcgacgaacagttttgtaatcacaagttgaggatgtggtcaagaatttaagatcataggctgggggttggcgtctgacaaactcacaaatgggctctggtctaggcagcccagagctctctctgccctaggctttggacctgcttggctgtgctttggccgcccttccatgctttgggaccaaagccaggcctgcaagtctctggaggctgggccgacttctactggcctggaatttggatttgagtatggcttgaaatatctggactgtttggaggacttggacattctttacttgaaatggaacattagggtaatttgtgaaatgtgtatggaaaatgtctgtggctgagggtgacaggggacatgaaatggggtgcagtcctgctggattcaggagaggctgttctgatggaggacagaagacaaggattcaaatgatggctatggggcaggatctgatcagttatagatgggttttggaaggtcagtggaaggaaacgctttctgcttattaatgtcagcaaggcctcctggaggaggaagtgttttcgagggtgcagactgcgggaaatgggacaataggagacaagattaggtcatggggagcctgcagtgccctgctcaggagtttggattttattctgtagcctatagagaggacagagggttgtaagtagctcattgactcgatgcctgttcctgtgccttgtgtcaggcaccatgccaggctctttacagacaccccattgaaatatcacaatactctgcaaagtagctgctgctgctggtcccctatccctgccccattttcagatgaggaaatagaggctcagaggggtggagtcacttatagagctggaatttgaacccaggcctgaactatttctgccttactgtgttgcttctcaggggtcttttgaccaaagatgggagcaagactggcagagttaagaccaggccagagattgcgctcatcatggtcctgcagaaagctgaccacaggctgactcaggcagcggactgacagggaaggagggggaagctgcaggactttgtagctgtcttggcatttggggtcgtcacaggtggttttaaggtttggggaataacccttaaggggcaatattactgctttcaaatccctgaaaggccctctacaggtagggggcatagtcttgtccttcagggttcctga

SEQ ID NO: 45259 - DNA, 1526 bp, Homo sapiens
cctggaatttgagtttctgaactttctgcctaatggcctgagatggcatgtgcagatgaggaaactgaggcctggagagatagagcaatttgcatggtatgtgggaacatctggtttcatctaggaagctggacaggatttcttttctttgttatgcctctgtttttcttcttccttcctgtcatcaagcctaaggtgctcaagttccatgggctcaatctcctccctggtgaccatgttgaaggatgtctaaagattacaccagataaattgggctggctgagaaggtcccgctgggctggcggccctgtggctgtcctcgtaaccagggacccgtaccccagactgcatgggctggagcttttggaggcctcccacccagtctcactttgcctgggaagggggagaggatggcggcagagacaggtgacatgggcttggtcttggggcaggtgactagaagatccagacagagcaaaggttgagagccaggctctggagccaggtggcctgtgttcaggtccctgctgggctgcttcctatgtgtgagaccttgggcaagctgtttagctcttcctctgtacaaaggggatgataattatccccatctgacaggatttagaaagataacacactgtgagcccaatctatgtgaattatcgttattattgtagttgatattattaactaaggagttcatttaatcctcacaacagcaatgagagataggcactattattattcccttttagcagatgtagcaagcaaggcttagagaggtaggtggccagcctggagaagtttagtcccaggggattacagtcagggcccgctgctttctgaggggttgctctggccagaggaggtagacttgtgtgaggtgctggagggcaaatccaatgggtagatgggccaggagaggctgacttcaactcagtgtaatgaggagacttaaaaaaaaaattagagcaagccaagatggaagggattgtgtctgcagggagcgagctccctgtttctggaggtggaagcagaatcctggagctcatgtgatgaagaagtggtggggatggcctcgttcagacctgaggtctggctccacgagggagggcttggatttttatcatcctaggctgtccaagggatcggcctgtctgggcaggtcccagggtggcattaggtggaggtttgctatagtcatcgctgcacggcagccacctctggtttacaccaccagccttgcaagtatgacctgcccaggcagaggccagatgaggagaaatgagtgttgtcatagcagggcctttactcatgctgcatcctctgcctgcattcattccctccccctctccttatgcccgggcaactcctgctaatgcttctgtgagtgtaagcaccatctattcatggaagctcttcctgatccacctgcaggctaagtcagtggttctgaaagttgggttctggatcagtagcgtcagcgttacctgggaacttgttagaagtgcagattatctagctctata

SEQ ID NO: 45260 - DNA, 969 bp, Homo sapiens
cagccccacatgttcgcaggagcttaacgttggccgccagtaagggaggttatgatatgtgttgggatatgctgctttgttccttttgagtgtctgtgatctgagcctaaggaaaaaatagttctggatggatttgactctgtcataggcagatttggggatagggtgggcagagagccccattttgggaagatttgtggccactgcataacattctgtgtgatggacctgacagccttggtgtgcgtgaagagcctcagtgggactgtcaggactgtcccgtccttgggacgggagggtggcaggtgacctgccgtgttccccacacagccccacccccaggctgtctggtatgtttgctcggtaagccctttttttcagagctggtacaaaggtaaactcgcaactcaggccctgttggaagaaggacacattctcaacaagtgaggtctaagttcctgaggttttctgttgggccttccctgccagggaacccagaacagattcacaagttgagaaccagggagtgaaccagtagtgcttaatgctttgtttccttgttgattgacggatgatctgtgagctacttccaagaaagatcactagaggctgcttgtgatactaaaacacatataaaatggatgaaaacaaacacagacagaaaactattgaaaaggaatggagaaagggatgtgcagggcatctggcaaatgttagctgtcttaggtgatcacagaggggctgcggagatgggggatgaggggcccaggctctggagcccagcagctgtgtgctgaagttcccattcacccccttattagctctgtgggctgcagcaagtgactggcctctttggacctcagtttctcatccgtataatggggggaatctaggtcatggtgctgtggtaaggttgaaataatggcatgtaacgcagacatggcatgtctcataaatggaagttaatgt

SEQ ID NO: 45261 - DNA, 1374 bp, Homo sapiens
tactgcagggtagactgtgctctctgtggccctgcgactctgagccagacctccaacagtctctttcccggtggtggtggtcctggactctggggtgactgacaggcggcagcttggctcctggccaggcagcactgtgggggtgatgggggatggggcatgtagcagattccagcagaggaagggatttgcttctggtctcggcctcccagggatgtaatcacgctggagaaactcccgcacagctgggaagcaaatgtggaggattttccttgctgagctggatgtggtgggtggggcaggctgtggtagggtggctggtggagctgggaagctgtggggtgtggctgggtgggggtgatgatgtgactgtgctgggggtgtgactggctgggaggggctggatcagctatggggagtggccctgggtgcatgtggggctacctgttccccaggcctgcagccactgctacgccctcccctgctcaggtccctgcccaagtccaggtacccacccattcacatccttctgaggttgctggcagagctctttctgcactgacctcctctcagcccccaccccatgtgcatgtggcccagatgcctatgatgatgccatttgagcctgtcatgtgcatgtgaatgtggtgtgtgtgttgggggggcagggagcagtgtgtggtccacagagggcattgtcaagagtgacctaggctggaaataaaatgtgggctgggtgagcattcaaggccctgggcaccttcccccattcactgcagccatgtcgtaccagagacataaaaccttgggttccagagacctctagaaacccttgtggaaaggtcatggtcgccactgcattttcagtgcctagtggcatgcttggcacctagtggtgctcagtaaatacaggatgaggaaacaggtcgtttgcttgttccgcactcccagaaagatctcgaacctccttcctggatcccattctcttgctccttccctctggcgtcagcctggcctcccttcctctctctttctcaattcactactaatttgatatgtggccttgggccagttccttcctgagcctcactttccaaatctgttactgagtaatcattttattagcttatattaccatgtgccaggcactgagctcagtgttttacatgcctcatctctctttgtcttggtagctgccctgcaagatagataagtagtataaaccccattttagatttagtgaaactgaggttcagagaggttgagagatttgctcaaaggtcatgaggctggtaaataatggagccaacattcaagccccagctgggagccactgcacccgggaattacctgtaatcccagcactttgggaag

SEQ ID NO: 45262 - DNA, 1947 bp, Homo sapiens
ataatgttgttggtgttatttttattgtaggaacccttgggtttcagggaggaatgaaagaccaaactcaaagtcaggaaggaaacccatttgagtcaagatttggtggtttccatgtgactgtggcaagtcacttcaccttgaagtctttgtctccttatctgtaaattggaaataataacagctgctcattcattcatatcctgagtattcaataaggacctgaccctgggaaaagtgggagcttccacgatgaatcagacttggttcctgcccttgagtggcacccgggcactgggggaggaggaagaaaggacactgttttgtgctgagggctgtgtgtgccgggtgctggtgagggcctgtgcagaggtcagtaagccctggtcctgccccacagatctgcaggctacaggaggtagagccatgtgcaggaatgcccccagtttactctgcacagaccacatgctcaggtgcacccaggggctgggcaggaagccagatgaaggaaagaggttggctgtgagactgtacatagagatgctgatggtgttaactgcaggatacacagcccatttgaggctggcactctaagtgcctcagctgatggtggcaggtgaggatgtgtgcccagtgtcaccagaacttgccctctttagagacaagttagaagttctgacttttatataaaatctcctgatttaaaaatgttgctaacgaatcccaaattaaagaaaaatactgtgcaagccaaagagcacagtctgcattttgtttgggctccagggtcctggttttcagcctctgcaccgtggagtggggatgaggcgggagcctgaggaatgagacttaggagtgggagagggggcagtggttggtgatgacttcagaggggtcatgactttggaacctggatcttgaaagatgagtaagtgtcccaaggggtccggggaggcattccaggcaatgggaatttcatcagcaaaagcctcaatgcttccccgagattggtgactggctgggtgaggctggaatttaggggaaactgctggtgatgtctgcaaggcccagcaggcccagggtggtgggggtcattgaggcctcagccccagctgtccttgaggccttggtggctgcagggggactagaagcccctcagttacttacctcttgagccacgggagttctggagtgcaggcgggtgaggagggccttgggtggagggtggcagcctctgagtgggttgcagaggggctgtgctggaagccccctttgccagccggctgagtggctggcactttgctacaaagcaactggcttccccccacccacccccaccccagggtatttggccttctctgaggacaggggctaccttgctctccctctgccctgggttttgccatggccttatcttcagcttcttggcttctatccaggcagccagccagctcccagtaagggccacagcctccaaagatagggctacttttcagacatgctgtgagaggaggacggcagccctggctgcctggccctctgtgtaataagtgtgtgtggtgcctgcctgcctcagcccttgctctccctctgtgaaatgagctgccctcccctgcctgagtcctggggctgtcagactctcaagagagggatgagcttgaaagtgcttcgtgagctaagctgtgatccacatcgtgagggattgtcataagtatgttaaataagcaacaggggtgcgtgataacagcagctgtgtgccaggcgtggttctgagcatcttatgtatcaactcatttaatgttcacaaccttgggaagtaggtagaatttccattttacatgctaggaaactgaggcactgagaagttaaataacttgcccaagattacatagctactaaatggtggagcttagttttgaatcgaagccacttggctccagtctgcac

SEQ ID NO: 45263 - DNA, 1553 bp, Homo sapiens
caggctggaatgcagtggcacaattatggccactgtagccttgacctcaggggcccaagtgatcctcctgagtagctgggtctacaggcacatgccctgacacctggctcatttttttttttttttgtagagatgggggtcttgctatattgcccaggctggtcttgaactcctggccttaagtgatcctcctgcctcgacctcccagggtcaggggactgcaggtgtgagccactgtgcccaacccagagtggtaaatttgttgcaacagatgaccctgcattgacacatccttatcacccagagtccatagtttactttcgggttcacctctggtagtatgcattctgtgggtttggacaaatgtataatgacatgtatctaccatcgtcgtctcatacacagtagtttcactgccaaaaaaattttctttgctccgctgattcatactctcaacccccaacctctggcaaccgtgtgcatttttttaatgcgcatattttttatgtctgaaaaatgtcagattcccacagggtttcgtggctcccacattcctgagactctgagctgcatcattcacactctgaaagattgttaatctgatagagggtcactgaccacagcactcaagcctgcgaggagtggctggtggctgctctcctccgcttccatgggattgggtggccaacgtgggcagggcgccatcagggcatccccacctcctatccactgtgcttctgtcctggccctaggccaaggggtggggctgggctgcggccacaggctgcccttatcaatggtaaatgggacacctgggtaccctgagtgtaaacaggaccagtcaccccagccttcctggctctgcccaggacacctgctccttcttgccctgctctcagctagaattgcagggagtccctggaaagtgccacacatgctcttatctccaagctgtggtatgtgccatttcctctgtctacccctgcccaacccttactttttcttctggtcagcttaggtacccttcctccaggaagccttccctgtcccctccttccccctgccagaagagttaaggacccctgagctctcccaaacccccatcccatccccgtctgtcacacttatccccctgcattgcagatgcctattttcttggctgcctctggttcctcagggtactggcactgaaatgtagaatatcagaggtgaaggagcccccggagatcacctgccccaacccccttgtaacatgcaggaagcccagagggagccacacagtgcatcatggcagagctgagaccagacctgttgtcccagtcacctcctcatttcacaaacaaaaagcggaaataaaaatcacccagagataatcactgttaatgtttctttttttgcatttagcaccagtttctagcctatgcacaaaaatatttaactaaattatgaccgcacgtacaaactgttttataaatgtttttgactttgacaatacatacggtaattatatttctatgtcagtacatgtccttctccaacatattgtaaatggc

SEQ ID NO: 45264 - DNA, 3633 bp, Homo sapiens
ccaatttgtagataccatatgctaggtactgctttaagtcgtttacaaacgttgttggacttaatcctccaaccccttatgagatgggttcatattatttattgtctgccccattttacaagtagggaaactggggctcagagatattaaagagcttgctccaaatcatgcaaccttggttcggcagccgtacttgcatttgggcattcctaggtcagctcctgtgtgtccacagttagctgaaccctgaagcccgcactctgacgctcctgttctctccactctccacagccttagccccgtgggccccacggagtgagcggcatgcagcacccccgggcctgtccagtgtcctctggcctgctgccctgcacccccagaaggccctgacgccctggggcacttctgctctgcacaggaccacgcgggggtttgccatggtgacataaaggggcgcggaggaaggaaggagcgtgaccagcctgtggactgcgcccctggctgggaggaaggactgggggcccagatcctccactcccagtgccccacaagggcgtcgcttcctaagtctctgtgaatttgttggtcagtggacgattctcgtgtctcctcctgtgtggggccttggggtagccagggcaggccgggcctccggtggccaaggtctcggaggccaggatgcctgccctggcatgcctccggaggctgtgtcggcacgtgtccccgcaggctgtccttttcctgctgttcatcttctgcctgttcagcgttttcatctcggcctactacctatatggctggaagcgaggcctggagccctcggcggatgcccccgagcctgactgcggggacccgccgcctgtggcccccagtcgcctgctgccactcaagcctgtgcaggcagccaccccttcccgcacagacccgttggtgctggtctttgtggagagcctctactcgcaactgggccaggaggtggtggccatcctggagtccagccgcttcaaataccgcacagagattgcgccgggcaagggtgacatgcccacgctcactgacaagggccgtggccgcttcgccctcatcatctatgagaacatcctcaagtatgtcaacctggacgcctggaaccgggagctgctggacaagtactgtgtggcctacggcgtgggcatcattggcttcttcaaggtacacaagaagcagggtccccgagcagttcagagccccctctgcagctcagtgcctgaattctcatttgtgaaataggtgtaatggtagcacccgcctcctggggttgttgggagggttaaatgagtgagtatatgtaaagcactgggagcatgcggtgcccactgcctggcaagtgctttgtaagtattaggggagcgtgccagggggatcgcctgctgtgcgtggggtccagcacacagcaggtgcttgcctaaaggaggccacagagtaagtgtgaagtcagaggagcatgctctgctaggtgccccaaaatctgtcaaggcaatctcccctagggagggcgtgtgcacccatttttcagatgagcaaaccaaggctccgggtgttaagttacttatgtgaggttttgcagcctgtaagtggagaagccgagatttgaacctagacatagacagtttgggctctctatcccatgctcttccctcttggtggtggtggagtatggcgttaatatacctcctgacccagagccattttgcatgaggagaaagaggagaatgaaatcccactggcagatggggagctgctctgggctttatggggcttccagaatgaccgccgggattggggtccttgcaggaagggtgtcccagagaatctgtccttggcggggggaggttgggaatggtgggcgggggatccagaggctgtggtcagagaagtctgacctgcaagatgaaagcagacactagctgggactcttagttggatgctttggaggtggcagggaatttgttccttcattcaacaaatatttactgagcactcacagtgtttgtggtcctgtgctagcggtgatcgaagtggacaaagtccctgctgtcatggagctggcatttcagtgctttgggagtgggtgggtgacaggcagtgagcaaataaacacaggatggggcaggtgtgatcagtacaaaaagaaacaaagcagggaaaggacacagagggtagtgggggtgggagcttgacattattttaggaaagtcgtctttgataaagtgacctgaaataaatgaggggaggagccatgtggctttctgtgcaaagagtcttccaggaagaagggacgttaagtgcacgagtcctaaagcagcctcttgcttggtgtgagccaggagaggaggagcgggagatgggtcagaagtggcctgtgtccgctgctgggtgcccgtttgtgccaggccttcctggtgcacttgcgcactgggccctgtctcctggagggcttctcatggcgtgttctttcacaccctaatacagcaggaagctctgccactgaaaggtattgtgagccaagaatttgaaggcccttagaagtcctgcagtagagcaaccagtgagatttgttctcaactggcttgatcacaaaaccctttcttttacagagcaccctcaggggaacgctggcctggtttatggctttacaatgacatcaagtcagattatctccattgtctggttgtctcttttctcttggactctgtaccctttcctgccatgaacttcgttaagttctattcagagtcccaggcctgaaaagcgtcaagaggctgacgtttattgagtgctcactcagtgccatgcaccgtctacatgcgttgtgcagattcacgcacttcacacgaaggcaggtggctagcagcctgatttaagataggaggaaactgaggcaaaggaggataagcaatgtgtccaagcctacgcctctgatgagtataggtctgggatttgaactcaagcagtccggccccagaggccttagtcttaaccacgatgtgatgagtccaggagcctcacataccacttattcaggagaagtgacatcagaggccacacccagtgcacagagctcccacagtctttggggaccaggcggtgggctgtggccattgggcgtaattggtacaatggagcttgggcgctgtctggccccaattccttgctctgcagaaggtaaacaggaggcctagggaggggtgcgggcatgttcagagtctcatcgtggggccagtggtaattccaggacttggtgctcttcctaccctgttgcctaggacaagactatccttggttttgagcagaggcctgtgattttctgctcaaatgcatgccctctggtggtcaaggcacatctttccactctttctgcaagaccaacttccccgctgtgtgctgggcttgccaagtggggattgtctgtgggctccagggatctgaaaactcattttccagttcccactgatgctggattcccagggcagtgtgagagcagggacttaaaagtccagacaggttcaaatctctctgtcatttagaaacagagtgacttgggtaaaatgctcaactcatctgcaaagtggggctaattacagctgctgcctc

SEQ ID NO: 45265 - DNA, 4203 bp, Homo sapiens
gggctgagtactctttatcttccatgcaccccacccctaacatttacaaaataaaacccaaatagctcccacattgggtctgctttccatttcaggattgtaatatttggggtcagtcaggcctggttcgtctgtcacctcatccaagtactcgcagcgagtttgttgacagcgccagcgtaacttccactggtcatcaggagccttgcaagctaaggcagggtcagaagggtcagagttggcggtgagggtggctcagacactgatgggccctgcctctctcctcccctcccctggagcagatcagcatcttcatgacgcacctgtccaactatgggaatgaccgcctgggcctgtacaccttcaagcacctggtgcgcttcctgcactcctggacgaacctccggctgcagacactgccccctgtgcagttggcgcagaagtacttccagatcttctccgaggagaaggacccgctctggcaggtggggggctgggcagcctgggcaggttgctacagggatggaacgccaccactcacaggcacacactccagatatggactcaaggctcagccatcatgccttcacactctcgctcgaatgtaaactcaggtccccatctacttaccagcatgggtgcgttcactcctttgcacacatgcatgctcatacatgtacatacttccccacgcagacctacatgcatgcagtcatacatagccttggaaaaaacagtgttaaaaaaacgagtgggctggacgcagtggttcacccctataatcccaatactttaggaggccaaggtggctggattgcttgaacccaggagttcaagatcagcctgggcaatatggcgaaaccctgtctctacaaaaaatacaaaaattagccgggcatgatggtgcgcatctatagtcccagctactcgtgaggcagaggtgggaggatcagttgagcctagaggttgaggctgcagtgagctgtgatcacaccactgtactccagcctgggcaacagagtgagaccctgtttcaaaaacaaaaaacaactccaagtgaacacagtgcagacaaagtacagaaagtgaatgcgttgtcttggtcaggctcttagataatctcttgtatctcttctaactccagcaggctctgagtgggaaaagggattgatgggagggtttgggggccagtttttgggaaagtctgctcctacgggcttttaaaaagtggaagcagaagctggaattggtgacagtctcatagttcagaccaggagtccacaaaccgtgactcatgggccaaaaccagcctgagacctgtttttgtaaagaacgttttattggcagacagccacgctcattcttgtatctactgtctatagctgctttcatgctatgacggcagagtcgagtagttgcaatggaaacttccatgccccaaacctaaaatatttactaaacacttaccaaaagattaattaaactttataggaagcgtttcttgaccccctggttcagacgcagcttgtccagttaaattcaacaagtgcttatgagttcctgttacgtgctaaggggcattttgcgagctctttgggggacatgaaactgaccagaagtggagcctgcctgtcagtggctcagtgtctgggggtggggatgtgacaaggacacatgtagcatgtaggtatcatgcccattgggctgtaagggccacatatccatgtgcagtgggagtccactgactgggttctggggcgccccacacatcccttccactgttgttttaggacccctgcgaggacaaacgtcacaaagacatctggtccaaggagaagacgtgtgaccgcttcccaaagctcctcatcatcggcccccagaaaacaggcaggtctctctgctcttgaccgagcttccccaactgcctgctgtctcagccacagaattctgaggactgccttgccctggccccactcccggataatttgctccctctttcccaggaagtaggaatgaagttggggtgaacacaaattgcctgtcagtatggaggggaaagaggtggaggaggggcctggagttctcctatttatcctgaaccatagcctcagggagctctccctgcattatcctgggagtctccaagtccagtcagagaagcccagatcagttgctctgctagtttgagtaatgccaagcaaaactggtacaaagaggactgtgatcaattagctatgtctgccagaggtgcagtagggagaagcagtgacatgattgctaagcatttgtcatccatacaaccctgcaaggcacaaatgggcactcccattttgtagacagaaactcaaggttcagagaagtcaagtgacttcccttaacacattcagttaggcaatggcaattccaggcctgaactctgatctctgtgaccctgaaacatatactcttaattgccaaactctatagcctccttctcttctgggctctctcattatagcatgtaaaccatagacttataccacagaaagtgaatgaactcactgaggaggaggtagggcagggtgcatgagtgagcagagggtattgggaagaagagacataggaacaagatttcttagttctttaagaatttcacattaacagaactgcagggtgacaaactcccttttccctgagctcctaccaagtgccagaggacagaggcccagagctggaaaggaccagctcttctgggatgctgaggggacagcagtcagttaaacatggctaccagagtgcagtggtgaggcagattctgaggccacgtcctcgtttagtgaagagtgctgtgatagattagcgatgtccgtagtaggtacaggagttgcggtgttcacatgcatgccatatatttgccaccctggatttagtaattccttcattgcacagatgaagaagctaagaccagagaaaggcagagaccttcccaggagcccccagtgggtcgtggggagctaggcccagaacccagactctatcttttggctgggggctgggccctgggtctcaggtgtctaccctccccacaggcaccactgccctctacctgttcctgggcatgcaccctgacctaagcagcaactaccccagctctgagacctttgaggagatccagttttttaatggccacaactatcacaaaggcatcgactggtgagttggcctttctgtccacagcgggacgggaaggccatcctggggcctcccaggagtctgctgtggccacagcaggaagcagctggagcttgctcacacacagctgtcattcctgtaaacagggacaaagtgcagtgacccttgaatcatggtgtgacagcgttgtcatagacaggacactcgatgaggaggccctttgcccctttgctctaccgcctgtagtcagacgctgaggtcgaagtccacccctcccttgcttgcagagaaacatcctgagtcttggggaggagaagggtttgcccagggtcccaaggtcggaaatccaaatgttctggctctcctcactgcgtgtggctgactgtgaagcagaggtgttcttgtgggcccttcagggacaggtcgctggtctttgggcgtcacttggggaagtcattaagattgccacttcccaccagagcctgcagaggttacctttgtagaggttcccagcagagggtcctagtagaggttcccttaagggtgtgggggccagagcagagatggttttactctccaccttttcagttggcatctttctctatttgccttttttctttctttttaaaaaatgtttcatgtcaggtaggtaatgtgctgagatcataacaaggttcgaggtgggtacacctcacacgtgtgtgaacacccaatcatcacgtgcatggactgcaaagtttgcctttttaaaccttgtccatgtattaccattatttattatttttatgtcagtgggttccctgggtggagaggttatgggccttctgtctttcttttttttttttttgagatggaatctcgctctgtcacccaggctgcagtgcagtggcgcgatctcggcttactgcaacctctgcttcccgggttcaagtgattctcctgcttcagcctcccaagtagctgggactacaggtgcccgccaccatgcctggctaatttttgtatttttagtagagacgaggttttgccatg

SEQ ID NO: 45266 - DNA, 530 bp, Homo sapiens
cttcccttgacactggacacagtgagaggcagagccaggactcagacccagagctcctgggtccagctgaggatcttctggccaccttgcgggctgctgtccctctcaggccacttcctttgtgtcctccaagtggcatgctgaccctctttccttgcctgcagcaccagcgagcccatgacgacccagtggccctaaagtacaccttccatgaggtgattaccgccggctctgacgcatcctcgaagctgcgtgccctccagaaccgctgcctggtccctggctggtacgccacccacatcgagcgctggctcagtgcctatcacgccaaccaggtagctgctgtccctgacccttgtgagggcagtcacagtactggcttgctgtggttagcggagagcctccaactctttctcaccagccgtggggacagatatgccctccttggagagctagacccttgggtctataaaaagattttattattattattattattttgagacagggtctcactctgttgcccaggc

SEQ ID NO: 45267 - DNA, 2302 bp, Homo sapiens
cagaaatgtgcacagcttctgagggacagaggaggggcatgctggggacacagctgggcagtcctgcttcccaggacccagtatgttcaaagtgaaataccacagtgccacctctgatggcacaagggcagcacctgcagagccctctttgcagttcgtcagctgggagcttggtttgggtcaggtggccctcaccagcaagaacacagctggaggctgcatggacaagagcagatccagaggcatggtgcagaaaggtgactgtgccaactgaggggtcagcctgcaacagggatttttgaatttacatacagctgagattctgttttgaaagaatcacttaattgaaaaccaggtaaaggtgggggtgctctgtggttggagtgggagtgaagctctggactcttcccagctcacctcctccctgtctctcaggctatcttggaaccctaagatttctcaaaacacattgtgaaaacccagcccagttgcttccagaggtcctaaaagtcctgcagttctaataggctgaatgagtagcagcccatcagcccctcctcaccccccacggggatgtccacccagtaaatctggtgccccaggagtggtttgggcttctagaggtggggagttaccttggagaagcctggatcatgcgtgtagggcagtgtgtttcacaataggaaaacgctgggaacaacctagatgtccatccacagggtctcagctaggtaacctccagtgtatccattcactgtaatgatgattcagttgaaagtaatgagctcagtctccaagccctgccagggaaatttctatgacagacttatacaatgtgaccatcatggaaagagaacactacagtttgtatttttcctggggttgtagatagacgtctcatatcaaactgatactaggggaggaaagactgagaaggggaactttcaaaggagacttcagccttggctgaaatatatataagacaaggataatgcatttgcatatcatttgtggaatgaaaaagtcttaatgaaaaatagaaatggacaaagcagaaagggggactccaagcagctagacttacatgacgatgcgatgaaggccaacactgctttacccagcccttaagctcctatggagttaggatctggaggaggcctaggtgccggtgatcaatttcttgcctggctgcatttatcctaagcattcgtgaagaccctgagctgaggatcctgactttcctgtgactgtaggccagtctcagctcctctctggccctgggagcttagcttccccaagctgacagacgggggagctagggttaacatcaccattgctggaacaaattgacaccatgtctcccgatatgatgcaatgggaaggacccagtgcaacacctgggaaattcctaacgaaaacacgggacatgaatccagccaaggggaacagacagacacatccgtattgagggacattttgcaaaataactggcttgaactccaacaatgtcaaggtgatgaaagatacagaaaagctgagaaatggttcaggattaaaggatactaaagagatgtggtaatcaaatgccatgtgtgaccctggaggggtcctggaccatgaaacaattagctataaaggataccatagggacacctagcagaatgtcaggatggaccgtgtggattagataatactattcaaccgatgttcaattttctggttttgattattttactgttatgtaagagtatctaatgaagtacatgtgagatattagttttttgaaattacttttgcaccaacctaatatttaggggtaaaaaggaagaaatggaactgaattttgactcctgttctttctctagtggtactagatggtaggtactcatcagatgcagtccaaaagatgtccaccagggggcactattatcctagcctctcacagtgtagtcagcgcgaatgcctcccgggaagactgggctggtggttaatggtggtggggcaataatattatcaatattaacatcaataaattaaataatataaataaaaagtatttcttatcctgtcaggcagaccctctgcttatcaagtgctatctttaaaattttttctttttgtgacagtgtctcactgtgtcacccaggttggaatgcagtgatctcggctcactgcagcctcaagctcctgggctcaagccattctcccacctcagccttctgagtagctgggattacaggcatgcaccaccacgccaggctaattattttgtattttttgtgaagatggggttttgccatgt

SEQ ID NO: 45268 - DNA, 1187 bp, Homo sapiens
ttctgccattgtcttgctgtgtgactctgagcaagtggcttaacatctcagagctgaagttttctcatctgttaacatgaggatgagagtgttcatatcacaggcatagacacttgagatctcctatgtgagtgcttagcagagcaggcctcttgggcaagtgcacgaaggcagaggagtactgtgggaatctgctagtggccattaggtcgctccttccaggacccccaggaacccctttccccaggaacaggcagggtcggtggggcttgagtgtgcagacggggcttggcggggttctgcgggttggtaataaatgaacaggaaaggagattccattacgcaggaatgtctggggagggggtggggaaggagccggctcttctcccagcaccagccagctctgcggtcttgattgatgtgccttgcaccgcggcagcggcgggcctggtggaaagaggccccttcactcacccttcctggagctaggccagcagccagatgttcctggcctttggggagctggggtgggggcaggggaggccggcagcgggccagagggcagctgcccagacggcgaacctctctacctccttctcctcagcagctgggcccaggtggcgttggctgtactgctgacctttggccgatggctgtctctcctggactttggctctgttcagaattgggggtggggttctcacccaccctgtcctgctgggagaggcacacagctgcctaggaaagggctttcagctccaaaaaggaaagtatcccacctgcccaaggttcttgtgttaccctggccagagccacagggggaggtgtgactggcacctgaaccacccatggaggaggaaaatccaggttgaggcccctgagtgagtggtttgggagagggtctgaaagcagattctggacttctcagagaaagtccctccagcaggtgctaagatgaacccaaggcgcatttcctcatgagtgcctctcaagtacggtgattatagcagagggctgcaggccaccatctctagccctttcggtggttttattattattgttgtcatattttttttaagagacagggtctcaaactcctggcctcaagaaatcctcccacctcaacctcccaaagtgctgggattacaggcataaaccactgcacacagccaatgattttattgtta

SEQ ID NO: 45269 - DNA, 941 bp, Homo sapiens
tgatgagaagggattgaattctaacaggagaggggaactgaggccacctccggagaatgaatagacatgagtggggaaactgcacagaccccaaccgagggaccctgcctggagggagctgggaacagcttgccggcaaaaccttgccagcaaacacaagctcagaagagccggggtcgattttctgtcctgccatcattttgctgcgtgactttggccaaacctcagacctctctgggcctctgcttttgttcctagagaacagatggagggcgagaggggacttgggagctgaactgtaaaggagggaggctcctgcacctgaggcttccaggtctgttgggatctgccggcctgaaggggatttcctggggccagccccattcccagccctgctgacgtcacccctggatgggtgcccagagttggaggggatgcccagagcagcactccagtgggaaaggcaggcgggcactctcccagcccacacaacagccctccctctggggctctggggtctccccagcccatcccccaggcagggaagtggggatccctcctgttgaaagaagaaggcacagccccttggcccaaatccggatttgctgtgtgacctgaggcaagtccctgcccctttctgagccttggctccccatctctgcaatgaggatagcagagatcccaagctcttctggaactcttaacactcagggatctggctggggggttaagggatccgggaaagggaaatggggcagggggctggattccaggggcttgcttcccacaatagcacagaaggtatagcgggtggtgggaagtgctgtgggataaagggagccccgagtcctccaagtggctccaggaaggggcaaagccagcctaaggttttggaaacatatttatttttaagtgtcctgtgtcgctgggggctttttctt

SEQ ID NO: 45270 - DNA, 827 bp, Homo sapiens
gcataagtttactatagaaaccgaaatcatagtatccgtctcagtctcttgtttaaactgggggacagggtgagggggcactgtgaatgtggcgggggggggcagtgtggagcagtctcagagccagggccctgtgtgccagccctctccccatctgctgactgcgtagccttgggcaagtccctccccatctgagcccccattttctggtgtggccaagggagactggactttgtgcagagtggcctctgccctgccacacccctgcctgacctcagccagtctcagccccgtatttatagccatgacttcagtctccccagttcctctgaagctggttccctggcccatgtatttataaacccagcagggcagaaatagatgtgacgtactggggacttggctggttctgtgagcaggctggcttcagtgagtccacttggaacaggcttgagtgccccagcatcctgggtgctgagttccacaggcagtctaaagctggaagagcattttgagaccccaggcccaggcttgtcattgtgcagggaggtcaccaaagcccaagagtggaggcatgtggccacagtcacaggcacggcagagccagagccagaacaaaggactctgtgctgtgtgaaatggcctctccccagaccctcagaaaacctccagtgaccacgccaggccacagacaccggtcaggttccagcttggtcattttcctgctctgggatcatgggcacagactcaccctctgtgagcctctgcttcctcaatctgttaactgagggataacagtaggtgcctgcctcataatgttattgtga

SEQ ID NO: 45271 - DNA, 660 bp, Homo sapiens
tgcttcctcattccccactgggtgaaggaataagcctatattttctctattaatccctacaaacaccctgggaagtggatcgtgttttaagccttgttttgcaggcagtaaaagtgaagctcagaaagataagagacatgtccagggtcaggcagccactgggtgagaattccaacccagacctgatgccaaagccagtgcccttcccccaccacacacacagcagcagaagggatgccagggccccaaggccattgcagaagccaacagttggagccctggggtgtcttggccggccctcagactgtggagcacctgacgctcagccggtcctctggtcctgggggcccctgcttggactcatgcagaggtgaaggggagggagaaggggaggctgacccctcagagggagcagggcttatgtgaggagctagagtctaagggtctgggtacctgcgttccagtgcagcgcctacctctggcttgccatacaactgcaggtaaatccttcccctctgggttcagagttctcctctctgagatgaggacagcgtgttctgtggactctatcagccatttctgccaaggctcaagtattttagagcttgtgtccagatgagggtcatgaatctgggggaaatggaattagaagttggtagg

SEQ ID NO: 45272 - DNA, 1559 bp, Homo sapiens
gcatagggcctgcccaagctccccgactgggttgggagtcctccttcctccttgggagggaaccttgaattggagtgctcctgccaactcctccctcctggcttggcagcgtgaagacaacgccggccaaaaatatttgtgtgggtggcggaaagttaacttttccgcctctctcttctttcctggaaaccgtggccaccgtcaaatacatcaaaacagaagcagggatagagtgaggcgaggcccctgcggggagtcagaggagccctgccccctccccacgcccactccttctgcctccggccatctggctctacggtggggggatgacggaggtgggtatccaagtgcttagaatcaggggatcctgcaatgccacagttggacggatcctccagcatcatctggctcagtctcaccatggtgtcctccgggaatctgactacagagtgcgaaaagcacctgccccagttcacagtcctgtctcttctgagtgctgctggcctttgtgagattctaagattctttgaaactcaaatggcagaaatctggcagcagctggtgagtgagaaagcacctggagatgaatgagggcctggagcctctcctccatgtctctgaatccaccatcatggtcaaggtgtcagagctaggttggaatcccagcctggccacttattagctgtgtgccttaggcaagaagtcacttcacctatctgagcctcaatttcctcacctctgaaatgggataataataaggtaattctctcatagggttgatgtgagaaattacggcaataacctaagtgaatgacccaagatagaagaggtgcttctgttcttccccggggggcagaaggtgggcttctttctcctgatttccctgccactgaggctgctataacaggtgcctggttatctttctgatccggatggttgtttgcctttcccctggttggctctgattttccctggggcttggtaatgcgcttatctctctgcctgcctgccagactctcctggcacagtcccagccagaaaccaagaccttgacccagcctgctgcagtgggaggtgcctgacccctgcttgggggcggaggcgtgaccacagcagctgaggtcagtccaggtcctcaggtcactcatgtccacagactctcacaattttcaggattctcactgctccccattttgcagtaggataagtgagagtaagagagttcacacttgcctgagttcacacagctaagtagcagcggaatccagtctttaagcaagatcccttgattctagggtttcctcccaagtgtaattggccatctgctctgtcttacgcactacctgcccatcctgggcatctcacccatctccaccctttgcctccacaaatgatttctagatatttgtccccagcctggaattctcccctgttctctagacccctatgtggaaccgcccactgctcatctcccctggaaatccaaaacctaactcatctccctgctccactaaacagctgctccttctcatttattcctgatctctattaacaaaatc

SEQ ID NO: 45273 - DNA, 1212 bp, Homo sapiens
aaagaaaaggggacacaaagaaactgtctccctcctagccgaaggagataggaggattttaggacagaccgaccgacctagcgatacagaaaatgataaggaaacggagagacagacaaccaggcagcagagagtgaggcacagcgagaggaaagagaggtgcccccgcctggagatgggaggctgagcgggtggaggagggagtcgcacccccagggctgggcggggcggggcgggaggggcggcgctagggccccggggagcaggcagcaggagcacggctcacccgcccgcccgcccgcccagcgctcccggctcccagcccggggtcccggagcagcccgctaggcggtggcggtggcggcggcgaggagggggcgtcgggcgcggagcctgggcctggcgcggggcgggggtggcggggacctcggggcggggcgcgctgacggacgcggccaggtgtgccgaggcggcggcgcccgggagctcggggaccgtgcgcagcggctggaggtgagtgaggggcgctggcctggcaggggtgcgggcaccgcgcgagcctcgccccttcccacctgcgctattcccggcgccgcccaggaggaggtggcacatctgggctccagtcctcgcacgcggggtgaccttggccaagtcgcttctacactttgggcctcagtttccccatctgtaggtggggggctggaggggtatcgaggctttcgagcagctgaggagcgggaggacgccctgacgccgggaagctaccctcctgggctgcgtgggggctccagcccttgcgcccctccccgcaagcggatcagggcgaggcagccccaggcttacaggtgggcaacagcccagagtctgtctccccaagcccgttctgggaaaagtcggaccgacttgacccaggataacccaggcgggttgggctctgcccagaattgaccaacatgggcgccgtgggggcagcgggaacggccagtgctgggcctcctcactcctccctgcgggcggggcgaccgggctctggggtctggctgtgccggtggggcacacaggatgccagagcagtcacaccctggggaccacccagcccaagccctacctggagaaatccaggcctttccccagcgcctacagggagaggggaaactgtcctgcgctgcccgcctcacaacatctttgcaattgccctccttgccaagg

SEQ ID NO: 45274 - DNA, 6215 bp, Homo sapiens
agaagtgctcagtaagcagcaacttgagtaatgaacatgattgcacccggcccctgaggagtttgcacacggtgaccacctgccacgactgagggattcccagcgccttctttggcagctgtgagcgcgcctgagaccccgtctggggaacccgcaggggttgggggcaggtttgtctgtcccagagccccaggctggtgatgacgcctcctggggataaacctcatctctctgttgtttaccccatgtgcggtgactttgtcattatcgttcctcctgcgttttttctttgagttatttatttttctgtgaggaaggaatgtggggaatttaccacagggcgctgtccttcactttcagctgggctgcacggcgtcctttcctataagaaggaagctgctgagacagatggcaggagaggtggaggcggagggtcccagctggctctgtggcccaaggagttgggggcagttatgtaacccacccggaggcccaggttctggtctccgggcatgagcctggtaatgtacatagctcctgtggaactgtgcctagccctccccattcacccctggcctctgggcaagcccagtgggtgtgttcctctatcaaagtttcctttctattcagctggtcttgatttggggtatgggggtaggtaggggagtggggtgggggttatcttgaacctcctagtctctgctgagctatcatcattgcttagaatgcttccttatctccatctttcaagagctaggacatatgtcacctcctccaggaagacttcctggattgcttcatcctaattcatctttctcttaggttgtatgttctcccctcacttcatgaaacattcttccccttaggtctaacacagtgatttgagatttcatctccttccctcacaaacgtgttgctctctccttccttctcctcccactcccaggaaccaccctctagatctttgatctagaatctagatgaatcttggatttagacaaatctaaaattcatctccagggatgaatggtgaagcaaaatgtgaagggggaggctttggattctggaagtgcttgtcctttagtagtttatttaatcaacacagtgatggtttcaacccctcctgggtgatggcttctgctgagtctggggacatttacagaggacagagaccagtcctggccctaggctggcacagggctaaggggaaggaccacatctttgtggcgggcccagagtgtgtcaggccctgggaagagtggaggggacccgcagatgacctaggccctgccctgaccctggcagaggcactgtttaggggaaaccacctctttccctgccctggcttgccacctttttgtcttttagattatgtgttttctctggaaaggcagggtatgatggttctttctgtactcccaaggcttccagggagctggggctggggagagtgaaacagcaggagggggcttcgtgagcacaggcttagctcaccagggttggactggagaggtggaagcctgggctgtgatcctgtgatcctctctgtgagccctcccttttcagtttgctgtatacctggggctcagcttgcctctctctgggttaccatctcaaagtttctaaaaattgactgattatagattaataattaccccagtagaatgggcaagagagaggctgtggctcctggcctttggcagggccctggtcagccaacagggagcagggcttgtggtctgcaaggatagaagatgggtcaggcttgcgctgactgtggagccctcatcttagcttccccttacccatccatctctgccctccctgatcccgacccactgccagcagagagaaaccagaagtttggccaggcccagcctccttcccctgggtttctgagttttctcaacctgccgtttcctctgagctctgttcctgctctggggcctctgggccaggttgaacaggggaggagcactgatctaggagtctgaatggattgatgagggcttcctacaagaagtggccgttgggctgggcctggatgggtgagtaaggaaggtgaatttgctttgtggggagctcttcagaaggaaggcgtccaggcttgagatcagtcagaccgcaggggccccttgctaagctgtgagacctggggtgagttagctgcttctgtgtgcctcatcttccttatctacaaaatggggataagggaacctcctctatgagttgctgtgaggattaaatgaaaaaaggcatgttaaacccttggcttggcagcatctggtgctcccaaaatgttggctcttgtcattctcatagatttcatgtttattctgcaagtgccaatggaagatgtggtggggacaagggaggaataccgaagtgaagcagtagaggcccctgccctcgaggccgttgcagtctctgggggaaaatagggcccagaccctcattgctacaaagcaaaacactgggagggggcagcatggcccacgtgactggccctgcactgggcattaggccaacctgggcttgaatttcagctcttcctctggctggctgtgtgaccttgagcaagttgctgcacccctctgagccagcgtcttctctaatatggagatgaggatagtgctggcctcatgggttgctgtggaagtaagtgaagtaaggccctgtcctgctacctggcatgtggtgagtataccctgaaagattacttttactagaataaataatacacaaggtggtggttattaagtgatgcagacagaacattggtgaaggctttttggagggggtggtggcattctaggtaggccggaaatctgaaggattagggcatgtagaaaggatgtgagacagaggagggttcccggtagagggggtctgtgcaaacgctgctttgcaggcaggaattcattgggcagctgtgggaactgcaagccactgaactccctccactgttgctgagggcacagagagaaggtgagtgagctcttgggcaggccccgatagcaggggtttgaatgccaggatgaggactctcctcttgatcctccatgtcctggggaggcagcagagggttttgagcaggagagaggcatgagtggagcccggagggaggaagatgaatctggcagcgtggggcgggtagattggcgggggagagactgggggtggagaggccatttaaaaggctgttgcaaaatcggttttcctgataaagagctgggctgagtcatctgtggaggagaaaagtcacatccagctccttcatgttgctgccgatgtgggattttcctggcttcgtcagccaagcaattggctgcctttgccggaggctttgagaaccaaggcttgaaggccggcaggagcatccagggggaagcttggcttcagggaggacctagcagagtgagtaagatgagcacccggaggtgcctttgtggcttggggtatatgacttagggcatgtggcatcccccctctgatcttagtctgtcctctgggcatcaagggagaggtatgtggtgatttctgccagcctgtgagtggtgaggcgggggctgggcctggggctccccaccccatttctgtgtcttctcccatgcccggcagtccttcccaccaaagtctagattgttctcctcccaagaggaggtctggcagtctgccgaccccagtcagattgcgctcgccatgactctggggatggagaattctccagggcatggagcctgtgtcatttcctcctttcagtgggaggaatggggaaggggctggcaaggtagccaggccattactcaggcctctccattttcctgcccccagctgagccagaggttgtgcagtggccagtcattggttccttcctgacctcaccaggggggcagtttacccagcctgtttacccttcctgtcgccaagacccctggactaccacaatgggctgccttgagccaatctctattcctacccctggctctctgtcccaccccgccccacctgaccctggctggacactcccattgacggcatcgtgtgaagaagcatttccttgaattctccctgtcctgaccttctgctctggcctcccttccccggccccacctccctcctgtggatcctccatccacacgggccccagtggtgggcagaacaagcagctgtccacagtgggtggtaggggtgggggaaagggtttgtccctttctacgccaaacaagaactggggtcttctgactcccaacatagtgatcttcccactctactcatctttcatgccttatcagtcctttctaccttagtaagaatgagtttatcaactcttctcctgaaaggaagaagtggaagaaagaaggagttgttctaggcagctgggttttcaggggagaagacattgctgaggggcattgatcacaagatgagggagcagagggctttgcagaccatcatccaagagcactggagcctctcttgtttctcctctttccagagtcctagtctggaaggagaatagttaagagattagactcagagccagacttttctgagtttggattccagctctgccactcataagttgtgtgaccctgggcaggtctctctgagccccagtttcatctgcagaatgagaagaatcacaggacttatgtctgggagctgttgtaagaactgaacaaggtggtgagcataaagtgcacagcactgagcctgggctgcagcaggggctcagtagtgacagcagtcgttgcaaagccccttctcatggctgtgctggggcttctcgcctactcccccacttcaggatttaccctgttggacccaggtctcctgaccccaggcagcttttcattgtgcccgccctccaccccttcctctcttgaaggcctatcttcagggctcctgatccagtgtccagggtgggtctttaaagggctagcaccccaacttggccctgcagaagtttaggtggggaggcggtggggacatcatgacttgcacaagtgcaggccacagccaggccgattgagggttcaatgaggtacctgtcccctgtagcctttggctacctccccacccccacctttgacaccaagagcatgatcttgagcagctgctgcctgggatattgccagagagggcagctccctagtctgaggaattttagatggagttgccccctggtgccctgctacgagggactctagggtgtccccccgcctccccagctttgtttgtgaagggtggcgaaaatcatctggatggctggctggatctggtccaaacctcctgctgaattccttttccatggagtcactgtgggctggagtgcgggctgcaggagcttgccttggagggcagggctctcttacctcctggccttttctgccattcctcttgttccagaacagtagcttgggagcagttctaagctcagagaggtggtggtgatgggatcttagcggcagcccaggttgtgcatggagcctcactgagagtcagctgacctggtcttgggctcacatcctcctctctgacctcttccttggctgggcctcccaggccagcttatttctaaaggcccttcatattctgacatttgaggattttctaaacccatggccttctagagccagtaaggagaaaagcagaaaaatgcaggggcattgagaggtctggagtaatcaaacactgaagtgctttctatgagccttgcaaggtgggaaccggccagccaggagcctggtgctctctgcagtaacgtagagccaggtgtgaacagagctctactccttctggctctgtgatcgtgggcagctcactttacctctctgagccgtagatttctcatcaataaagtgtgcataataatagtttgtgatttgtaggtttgttttggaaattaaataatatgagtaaagtctgtgtataggtgtacagtaagtgaccaatcaatattagctactattgctgcaactgtgtcataagaaacactggcaggactagagatgtttatcctgaccctgtcccaaggggatctgatgtatctgcaaatctctgcagggctgtcaggctggaatgaaagagaaaactttttgttgttgttgttgagatggaatgtcgctctgttgcccaggctgcagtgcagtggcgtgatctcggctcaccgcaacctctgcctccctagttcaagcgattcttttgcctca

SEQ ID NO: 45275 - DNA, 814 bp, Homo sapiens
acggctagcaaatggcagagcttggattcaggccaggaggcctggtttctaagcagagcaggggagacagacacagcatgagctgagcaacctctcagagccctccagtgtggctggcaccccatcccttaggctcctcccaggggagcagcctggctaatagatggctaatagacatctttaatagatagggtgatccaggcaggagaagagtcctactcggggggagtaatatcatgggtgggtgggataggctgtgtgctttcactgtttctaataggttaggggaaaaccaggttcgatggaggagggaagaaggaggttggggccagaaaacctgtggctgccccagtggagctgctgtgacgctgctggtcacagcttctttgctctgtgtgggcctccctgcgggtcccatgtggggtcacccggctctaccctgggctactctctggatctctgtttcccacctataaaacagggtggtgatgaaatacctcctctgtcagaattcttccagctctgagagtccatgaattcagagcctcgctggcaagatgcctggaaagactgtccctggagacagactcagcatgccatggccagtgctaatgagggcaagggaggggagggcagggtcagattcctcaagaactaattagcttcccacagtagggaggagaggggcaatggagggaggaattttcttagccactgatgttgctggtcacaggctgatccatccacctgtctgtcaatgcatttgttcatgcagcatttgttcatttattattcaacaattataaattgagca

SEQ ID NO: 45276 - DNA, 1278 bp, Homo sapiens
gtaatcaacatctattgagcactttcttccaaggaatgtgccgatatatgtaatgttcttttccatcagttatctcatttaaccctcacaacaaccctataaggttaagtactgttatcacaccccattttacagaagcagaaactgaagcccagaggggtgaagtaacttgcccaagctcagttagtaagttaaggcggctctctccaaagcgagtcttcttaacacggaggcagacacaagacagcggggactcttcaggcgttccgggctgagagtttgggcgcctgcgttttattgcaggcactacctgacttggatcggtggcttcccttctcggtgtaatggacaaatcggactccgtcccttcctaaagcccggtgtggaagacctcagcactaatgcctgccccaccctctctgctctctccccaggaccgccgggagagcctgcccacctccccaccctggacgccgggcgcgtcccggccccccagcagcctagacggctgggtgagcccgggcccgtgggagccaggtcgcgggagcagcatgagcagccccccgccgctgccgccgccaccgcccatgtctccctcgtggagcgagcgctcggtgtccccgctgcgacctgagaccgaggcgcggccccccagccgccagctgcaggcgcttctggcgcgaaacatcatcaatgcggcccggcgcaagagcgcctccccgcggtcggcgggcgccgagaacccgcggcccttctccccgccgagggcgccaccgcccccgcccccgcccccgcccccgcccccgcgcatgcgctcgccacagcccgcccgccccggctcggctgctgtgccgggggcagccttcgcgcccatcccgcggagcccgttgcccgccggtccttcgtcctgcaccagtccccggagcccgctgcccgcgcctcccaggcccttcctctaccgccgctcgcccacggactccgacgtgtccctcgactccgaggactccggggctaagtctccaggcatcctgggctacaatatctgtccccgcgggtggaatggcagccttcggctcaagcgtggcagcctccccgccgaggcctcctgcaccacctagagccccacccccgaccccaccccgggagggcagagccagaagaaggctcattagacctgggggacccaaagggtctggcctctttgggcagccccagagatgaggggtcagcagaggagagctctggggttggggatgggttagggacgcaagcttgagt

SEQ ID NO: 45277 - DNA, 2470 bp, Homo sapiens
tttggccaaggcaatccacaaacgtcaaaattccccttcccatcagtacacacaccgatgcacacacactctctctttctctctctctctctctcacacacacacacacacacacacacacacacacacacacacacactagttagtgccttggatgaggcggggcagtgtgtatatggacccctggacttgctaccttcagggttccatactcgtccctcccctcctggctctgctgtctggagtctggcaagcggggtgtgttcagaaggtcctaggcctgtgtcgcatgtccaggcactggcctgaccatccggctccctggcaccaagtcccaggcaggagcagctgttttccatcccttcccagacaagctctatttttatcacaatgacctttagagaggtctcccaggccagctcaaggtgtcccactatcccctctggagggaagaggcaggaaaattctccccgggtccctgtcatgctactttctccatcccagttcagactgtccaggacatcttatctgcagccataagagaattataaggcagtgatttcccttaggcccaggacttgggcctccagctcatctgttccttctgggcccattcatggcaggttctgggctcaaagctgaactggggagagaagagatacagagctaccatgtgactttacctgattgccctcagtttggggttgcttattgggaaagagagagacaaagagttacttgttacgggaaatatgaaaagcatggccaggatgcatagaggagattctagcaggggacaggattggctcagatgacccctgagggctcttccagtcttgaaatgcattccatgatattaggaagtcgggggtgggtggtggtggtgggctagttgggcttgaatttaggggccgatgagcttgggtacgtgagcagggtgttaagttagggtctgcctgtatttctggtccccttggaaatgtccccttcttcagtgtcagacctcagtcccagtgtccatatcgtgcccagaaaagtagacattatcctgccccatcccttccccagtgcactctgacctagctagtgcctggtgcccagtgacctgggggagcctggctgcaggccctcactggttccctaaaccttggtggctgtgattcaggtccccaggggggactcagggaggaatatggctgagttctgtagtttccagagttggctggtagagccttctagaggttcagaatattagcttcaggatcagctgggggtatggaattggctgaggatcaaacgtatgtaggtgaaaggataccaggatgttgctaaaggtgagggacagtttgggtttgggacttaccggggtgatgttagatctggaacccccaagtgaggctggagggagttaaggtcagtatggaagatagggttgggacagggtgctttggaatgaaagagtgaccttagagggctccttgggcctcaggaatgctcctgctgctgtgaagatgagaaggtgctcttactcagttaatgatgagtgactatatttaccaaagcccctacctgctgctgggtcccttgtagcacaggagactggggctaagggcccctcccagggaagggacaccatcaggcctctggctgaggcagtagcatagaggatccatttctacctgcatttcccagaggactagcaggaggcagccttgagaaaccggcagttcccaagccagcgcctggctgttctctcattgtcactgccctctccccaacctctcctctaacccactagagattgcctgtgtcctgcctcttgcctcttgtagaatgcagctctggccctcaataaatgcttcctgcattcttctgcctcctgtgtcattttcagctgtgtctgatgtccttcccttctccccaagcatggagcagtccatgggactctgggtggctgggaatatttgagacatatgggatgggagcttgggaagaagcagccatggggagagatgggaacaacggacaacttgaggccatagaagtacctggactgcagtcctggtcctgtcatggacgagcggggtgaccctgggtgagcccactccttctctaggcctcagcttccccatccgtataatggggagagtgggtctaggtaatgtctcagggtggtattgtccaggccctgaccacagagcactatcaccagagtgggcagggccaagctgggtcagggctctgtgctctgaggctgtttcctcatggcaggtgggggtgccagggcaggaaaggcgccactgtaagaggtcccgtctgagccaggcagccccagtgaggcaaggactcgggccatgaggcatcctctcctggcaggagtgtcctttggccagagaaggggattgtgatcctgctcccaggtgaggctaagcttgccctgggaacacacctcactcttcctctctagaag

SEQ ID NO: 45278 - DNA, 1656 bp, Homo sapiens
attgtatgaaaagacacaaacgctctcaccttctggtcaacagacctatttcctaggtaaatgctcaacaaatactagctatcgttattacccctacattacaggagtgttaccggattcgtaagagaatacacatgacagttctttgcaagtcgtccagcacttcgcgttagtaaaagagcatcattttttctgcttgtctaagagaaacacttcacagtgtgcaagtaccacaacatcgacaggacatgaataactcgtttcacacgcgatcactcaccattcggatatatgggttttctccaagacatgtctggcacagaatggggaagtcctggtgaaaatgggaaatctggttgaggaccaccctccgaagaccctgacacctcagtgacacttggggtggcgagggggcgggaagcgagggtggggaactaggcacggcaggaacccgaagtccatcacgacccgatcgcgggagggggcgctgtctgcacttccggcaggcggcgggagaaaagaaaaccagctctaataggctggagggggcagggatggaaagggtgctggtcccgggaccctggctaagccccctcccttcaagcccgcaggaggatcgccctccgccctcctgctccggccaagctaggccgccgcgctggctcctccccggtattccttcggccgcgccgcaggccctgtcctgccagcttgcaaggtgcgcggcttcgcctcctccttccatcctcctccggcaggcacactcaccgcatcctcccagttctgcctgttgtaggtgttggaacccagagaggtcgccatcttgagagcgtccggaggtagctgtagcttccgaattgggagagaggaccgccacaatcccgtcaagccccgaggctagcgccgcgccggtcggcgtcttatttacgcgtctagggcttcttccggggcggggcctttgcgtcatgacgtcgcccgctcttggaatttctaagcttaacaattggggtcctggtataatgcacctggatgcttccttcgagtttttgcctgcttggaatgaagggccacacgtacagttgattcatttaacaattgggcgaaagaataaaggaagacgtaatgcatcagaggctggggttaaaatagcgttcgctaccactgaggcgcttattatgccaaactctgggcgaacgtcttgcggttccagtgtcttatttattcgcataacctctctgtagggctctctgtagggctgccagattctgattctgtctctctctctctctctctctctctctctctctctctgtcactcacacacacacatgcacacacacacacgcacgaattacagaacgtctaaagttgaatttcagattaacggcgaatcgctttttaattataaatatatatggtacctactcgtcctaaagtaggattcgtggttgacctgaaattcacatcacttaaccaatcgtcctgtattttatctggtaactctaccctgtaggcaagtatgatgatccctcttttatagaaaagaaaacaggtttagagagattaacctaatctctcctgatatagctcctggttgtggagctaaaaagtggtgaagccacaaattcattagtactgtttcatttccagcttctg

SEQ ID NO: 45279 - DNA, 2201 bp, Homo sapiens
tcaaggagatacacataaggaaagtgctaatggagatgagaagaaaaatcgatgccatatttttaatatatacgatttttcttgtattatttaattgcttttcttgactattcctattatgaaaagtatcttcaataaaataagttattaataacacataaaatggcttatagtatgtgttttcatatgcatttattttaacagtcccgggatcttcagtaaaaaacactctgagttaggctgtttagattcaaatccaggtcctccttcccacccccaaattactggctgtgtgacttacagcgaacactctgtatctgtttctttacctgtaaaaaaaattttttaaaaaaagtatccacttaaattggtttgaagattacataaagcacatgacatatagcaagtatcgaataagcagcaactattactactatcagctttttcttcactaagactatggcttattaaacagcgcattttatgtcttactcgccttttaatccctaaagcttactgaataaacaagatgtgccaagcgctgcagaagttttggggttttgttatttggtgactttttactggccggggtcttctttttgaaaaatccaacttcggacgcccacttgtgccagggaaggacagcattgtcctctagctccataaatacactttcagcttcttacatgacatactgtattctgagcgcttttcacataactcacgccgccccaacctcttcccggctgcaggccttggcctgagtcaggaacagggcaaggcagtctgacgagggcccagtttctggacaaaagaggaacagaactttcaggatgggagaactatgaatgagaacgcctgcgcctccctccatcctcgcaataaatcctggaaaggcagtttttcgccccttaagtggcctgaactaagcacccccagacctttctccgtagtccacccaattaccaagccccatcgcagacagacacggtccctaagtcaagtttgtccaatcagaggccgctctagaaccagaagatccgctcagtcccacccgaggctgctcctcctttccaagtgacagattagaagcaaattaaatcgcaggcaaacccgagtgacggaagacataaccaatcagtaaggaaggaaaatagctccagccttccggtggcagtgactagcatgaacgccgcgccccccccaccccacatactcgctatagggcgactctgttacctcgtgagacacacattccagcgaccgcagttcgctacaatagcggcagaagtagagttgcgagagcggggcccgaaccttcttttctccctggactagatagagaacccggtccgactgcagcaaggacgccatcttggggagggaggaggcgatgacgctcccggcgcatcacgtgacccgagagccagcgtcttcctcgctgccttccctacgacttcctacgtagactttgacgttaggtttcccacctcgtccggctctgcgcccgtcgaaaaccagagcgcgcgtgcgcagctgggatccctgttttctccccaactctgggcccgtcccccagcgcttttgtgagcgtccactgcccttactgccattaggtctggactcagtgagctccttttattcttttcttccagaatggaagcctgatcttttgtcttatttacgacggcctcctctgccccacttaacaggcgagcatccaggagacaaatggaaggtctcaaagggacagggctccgtggggactgcaagacaggagtcacaccagcactgtcttctgagtcttgccaatggcctttgggaactttcacatacattatctcatttgaaacgcaggtttttgagtacatagttagcgttaggtctaagtctgtattgtggaccttcaataagtatgaaaaggagggaatgaaatcaatgaatgaacaatgttggtaggcgtctacgtttttctaatgtgtaaactaaggctcaggtctgcctcttgggtgagcagcgactacgtgagactggtattacatgggtgggaaaataatttatcaacagttttaggtaaagaaatgcagatttattagagaaggtatgaaaatacgttgaaaggttgcaatgggcagaccagccagagaggagctgacttcaaggaaacaaaggcttgctggagattttatccgatggttctt

SEQ ID NO: 45280 - DNA, 1439 bp, Homo sapiens
aacactattttaaaccatctggaacttgctgccatatggaagctggcaactaaaaaaattttttttttctttttcacctttaagcagttgcttcttttagaaggcagaacaagaaatagggggagaggggaggattgcaattctggattgtgtggtcagggtaaccctcctgaaaaggtaaggtttgagcaaagatttgaaggaggtagagcgagagcccagtggatatctggggaaagagccttccagaaggagctaaacaaggtctctaaggcgtatgtgaggagcagcaagacctgtgtcattgttagggagtgagcacgggggaggggtttgggggatgatgtcccagagttaatgggggctgggggtgcactcatgtaggatctcaaagggcatttaaaggatgttgaatttttctctgaagggaatgtggaaccattgcaggatttcaagcagagcagtgatgtgatctaacccacattttacaagggtcattcctgacatcgttttggaaatggactgtagagagacaaggatagaatcagggctcagttagcaaattccaatggtgatccaagcaaaagaagatagtgccatagagcacggattctggctgtattttgaagatagagcctatgggatttcctcatgcccatagactgccatgtgggaggggatggcttgaagttaggcaacagggaggccctggttgggccaggggacagtttgtttttcagtttgaccaaattcagccactgggggtttatttcctcagaaattaccaagactatttcttctccctgaggtcaaaataaaaacatccaggaaaggactagacacttttatatttaagaaaaagaaatgaagctaacttgttcagtctcttattttgttccaactcacaaagcacggtgatgacaacacaggaaggcatatttcacaagaggccagaaaaagagccaatcagtcagttgctaaacacattaatcagatcttcagtgctccagctcaggctgaggtgatgctggtgtgggagagcccagcccgtttggaatggggccaaggactctccacagtagcttctccccttgctgtgaaggtaaaatgcgttaatacaagtaaagtgggtagagggcagcacgctgtcagtaatatcagtggtatgtaagtattggttattaggccacggagtatggcccaatcccctcattaacaagtgagaaaacaggttcagagagaggaattcatttgtctaaagttacactggctctccagctttacttctgagcagcactaagttggcttcttaaaaaaattgttttggacaattgggatttccagtgttgcccctcttacaatttattcctgggaagttcttttagactttcagctgtctcatctgagagccttcctgtcctcacagggaagtttaatgg

SEQ ID NO: 45281 - DNA, 1123 bp, Homo sapiens
acccaagagacagtgagccaagattgcgccattgcattccaacctgggtgacagaacgagactctgtctcaaaaaaataaaaaataaataaaaagaagaagaaatgaccaagggagctggccagggaaaaacctacacttaagattcagcaaggcatgttagaccctgataacctgcaattccacagccaggtttctatcccagagaaacaaaatcacacgtgcacaagagagcgtatgaaagttcacagcagcattgtctgtcttggtgaaagcctgggtcagggaggagcaggcaaataaaccattaaacatccacattgtgcaatagttaccaattaagtagatcaaaggtattgacatggacagatcttcagaacatacagtggatgagaaaaacaacatgtagtgcaataataatgtataaaacattacttatgaaaaaagaagaaaagccaaacaatcctgtcacatatatattttaaatgatgtatgtgtaggcatagagaaaattctggaaagctaaatccatgctaattgtgataaaggggaggagttgggacaaacatgaagagcagaaggggttaaatggggttttagcatagttgtcaggttttaattttataagaaaaatgtaatcatctgttacttatgtgaataaaaattctcaaaatatttttaaaaagaaagattcaatgggaagaggaagcaatggaatagacaggaatacattcctagactctaggtaggacactgttactgggaacactgggagaagtttctggaatgcaaggtggaaaaaggatccactgcactcagcaacgctgcagagacagcagccagcaggatgagtcctgtgagctcagctggttgtcaacacctttcacttacagccactagctcctgtgtccttgaaaagtcgccatgtcccaccactgcccttgaatgagatggagactttctgttcttttttgagttgtaaacatccaaaagcatttcatcaatttcttgtatttagacattcccttcctttcccagaaattccacagtgatattctcagtgttctctttccagtccttcaagctgtgtatgaaatctacttcttcccagtccagctccagca

SEQ ID NO: 45282 - DNA, 533 bp, Homo sapiens
taataatgttggctacctcaagaggttgcagagattaattaatctaaggcagcacctggtatagataggatattgagtgaatgctggctgctactctctttatgctaaagcttggcccatggagatcaacttgtctaacacctcgttccataaatgagaaaactgcagcccagagtttggaaggcactagtttcacaagcaaaaactacagccacccacctctcctcttgatgaactccctgtcttctggctggccctgagatcaaatttgccaattatttaggaaattggcagctccagggccccagctcggttctgcaatttctctcgattgcaaaacaagggctactgtttgaagttggcactgaagtgacgcaggctgggcctcacttctgcttccacctaggctcatcagttagagtggctgatcccatctttgagttcagaacctgaaatgtttactaaccaataataaggctggctttcgttgttttaactttttacaatcctttgagtttattaatttgtgttct

SEQ ID NO: 45283 - DNA, 1825 bp, Homo sapiens
tcctaatgccctacccagaatggggttttcaaaatcccaggacacccactctttgtttcttaagcactaaacctatatatagtaaatgtttctggaagtttaacttcagctcttgctgaaattttaaaccctcaatttccagaggaccatcgccaggtgtttttaaaacctcgataggaataagaaatgcttcccagaatggagacttccatcagttctagggagctattagcccccttgccctggctgtaatggagaccgctgtgtctgcctcctttcgcactttggagccaaaagaggaagggaccgcctcccacgtccacagggacctgacttccacctctctgcccagatttgcttatgtcactgtcgccccgggacggggaggtggggagctgagggcaagtcgcgcccgcccctgaaatcccagccgcctagcgattggctgcaagggtctcggcttggccgcggattggtcacacccgagggcttgaaaggtggctgggagcgccggacacctcagacggacggtggccagggatcaggcagcggctcaggcgaccctgagtgtgcccccaccccgccatggcccggctgctgcaggcgtcctgcctgctttccctgctcctggccggcttcgtctcgcagagccggggacaagagaagtcgaaggtgagtgagcctccgggccgggggccgggagaaaaaacctagcccctcggtgtccagcgctcagtgcaatgcaccccttttcccaggctccccgccagatgggcaatccccaggtgcgagagacctcctgaaccccttttgccgccccctccgccgccgggaccccgcccccgaccgtcgtcgtctcgtagttccatctgttggagagccgagacctggtgcttcaggcgggcagaatgactaagggaggaaggtctctctccccgagctcgcactttctccccactgccacctcgagggtcgccttgctacatctatgtcacctccgtgcctgagctgctccccttcagtagggcctaagagggagggcgtcacagaaaaaaatgcccagcgtctgggtgggctgtgcaagttcccagggagagagacaaggagaaaggagagaggcagctgggtggtcctggtcctgaagaactgctgtggggggctcttctaccccaagaatgatacaggcaggtagaaatggccacttggattcagggcattggtagaagaggcagagatctgtgctagaaagagctctggagtgacagtgcagaacactcaggaccctgagtccttacctgctcctggacccccgtttctccatctgcaggggagagtttgggggtgggagtgcatggggcacaatgaagctgagggcctcagaggggatgcttggagaagctgaaaaatccacaagctgttctctgaaatttcctcccctggggcagcctcactacccaggacccactgtcctcattagcctgaggaaacctggtagttggagaaagctggggactgctaattcagaagaagaggtagaattctctagagcctcagtctatttccagcaggtgtgtggcccacacctggagtggggatactgaggccaggagtgggatgacccagcatgcttatctcctttgacagtatgtactggggtgggctctgtagacctctcctctacccagggagtgggagtgggtggggaaggaggcagaagccaggtgtagggatagactcaaagcgagcgatttctgtctccaacttcccaacatgcataactcacatttttgcaagctctgagcttttgtttctaaaatcctctggg

SEQ ID NO: 45284 - DNA, 8721 bp, Homo sapiens
aaggctagtcacatgggcacggaaggttgctacctggacacagaatgtcaacagtgatgacagctaatacattgtgggcactgcctctgtaccaatactgctctaaggcttttcctgtattactcatcagttagttagcagaggatgtccccacgcccgagcacacactgtgcatccatcaggctagctccatgaggaaggtaagaggatgtcagtgctgctacctccctcaagcctcctcacctttgctttcctcttctgctgtctgagggcttctcttgccttctcctcatctttgaatgcttttagctgagagaagaagggagggagaaaagactgtcggcacaggtggtttctggccaggcctggatccagggcctaaccagccacgaggactgaccggctgatgcttccctctgggccaccatgcgtgggccagccccgggaaagggccctgagggcggagcacagcccaggctgttgctgcaggccacctgcttgtcacagtggtctgtgcacaggtcaagagggttcacgtgaacctcgctgcttctctgctaacatcttttagttccactctgggagagtaaagcccagaactgactgtggaaagtcagaggtagagatatcttagagtaaaactcgtaattgtacaaagaaagagtcagagaggggaagggccttgccgagctcaaatatgattgcagagctggagagaagcagtgagggtcctgacatccagcctcaccagggccctccaatccatgccccctctccccacgaggacaggccagttgcccttcctgggtccagtcactcttacctgggcatttgacagggtgacctgggcctgcagcttctccacttgcttcttcagctcttccttctcctcattcatgcgctcacgatcactgcgctccctctggaagtcctcctcgaagatcttcacctggtgtggagggagggtgaagagagggagggggatggtcctgagtggggatttctcctcaggcccagactcccatgcctcctgctggggtcacagatggcagagctgggggtcgccatggggagtgggacagctacacctccagcctccaccttaacttcaaacagagtagttctgtgtccctctatcttacattctgggcttcaagctaggactttatttgaacaaaggatatatggttttaaaaaaacgttgaaagccatcaaccagtgcaatcctttcactccgctgagacccacaggggcagtgatcacagaaccagagtgtggtgtagaccagagtttggatctgctggttctgagggcagagaccctacaaactccgctagggctccagggtgccctggcagaggtgggttgggtggggcctgcctctgtctcttagcctgtagtttcacatccttagtgcagatcagctgagacactggctaggttcaaggcagtttaggaggattaaatagcacagagacaatgggagagccacaaccttttcgctttctttcaccccaatccttctgtgtccctcagggctagtaggtctttaataccattttagtacctgccaatctcctttaaataaaggagaaaagaactccagttcagagtcttcatttggcaagagtatccggctagagtttaataacattgttctgtttttattgtttattgcgtacagttactttctacttgtgacaaataataaatggttttttccaattacagcagtgatataaagctcccttttaaattcatttatttagaatttattttttaaatactaggtaaataatagcacgtgtggggcatagagatggctaaatcataaaggtggtagaggaacgacttaagctagggttatggtgctggaaaggataaacctagagccagtggggggccctggccaatggccagaaagtggattactaattacaggttccatgtgattccaagccgtctgggccctcaggaaagctccagctcccacagagcacctcccacctgatttcctcccggaagcctcacctgctgtttcagcaactcattctgcgtgaccagctcctgtttccttaggagggcccctgctccttctgggctcccaaatgctgttggtggagatgatggcggggtttggatgctcagtgcttcctccagggcctggaatcaggaaaagatgggaccatcagcaggaacccctggaaatcagggccctttggaggggtcatcctcagggaactccttcctaataataatcatactaataatagccaccactaccagtcctatttaataaatgctgccctatttatttgcattctacacatatcatttcattggatcttctgcacagtgccatgaagaaaagactatgatcatcatcctcattttacagatgtgaaaactgaggctcagagacctgaaggggcttgtccaaggtcaaggtcacacagctagtaagtggcagagcacagattcaagcccagcacatgctcctacccagcaggctaaactggggttgtcatgcagaaggggaaacctccccttccctgaacatgtgtggctcaattcttagcacccagacctagaaggaagattaagtcctccgggggaagcttcagtctccccaacaactgccctgccctgagattcttcactttcagcaacccattcccatccaaaccaccccttccatcctcaacacttatgtacatagagaagactggatttaatttctgcttagttaatattttccctttctaacactgaaaatgggctgaaatatcatcaaataacattttgaaaataaaaaaatactcttaatctatcatgttcacaatagattatataaacagtgtgcccacatcttcttaaaggtttcagttaaccgtgtttcccctttaactctgttaacatgttactcagaactctggaacatgtctcaagactgggcaccctggactttggccccaggacagcatcgcccatgggcctccctggaccgaggggagatagagacctggcccaacttggactcgggcttccacctggtctcctcagctcccctagacacgcaaagaaactgcaggaccgagagtaaattcaggatgctccgaggggaagttatggctccactttatcttcctactccaccccacttttaaatgaaaagactgaggtccagcgacagggagatgcctaggtcatgagcaaagaaggccacatgccctgcattactcatccacatggtgtctgtccctggctctgccaagaaaacctccaaggtcatctttatgatcagcaacatggacaattctctgcctggatttagagccccaagtcccccagctcaggacagatcgcgtttctttctctggaaacaggtcaagggccccagacttggcataatcagtgtttacaaaacaccaaaaccaaaaagaaagggtttccccagcaggcctaggaatgctcaactcatgccagagtccactgtcaccagggtcaggaggcagagggaaaggaaaaacaattagcacgaaacgaaaagctgagccatgaacttaactcctccaggccctcagagaatgtttcctttcaaagctccctcctgtcagcttgcatctttgaaatgtgctggaaagcaggcagaactagagccgttcccaccagggctcggatggcaaaactgaactggagaggctggagaggctaagctgggactagaccactccgcttggctcagaccagagggtttctggtttcctcagcctctaccctgggggccccatctccctggatcccactgcacaagggcgggcccctcagcccgtgctcctccactcccatcagtgtttgctgaacatgtgcttgatgccaggcgctgtacaaggcgcccagggtatacaccttggtgaaagtatgcacctcccaccaccagatgggaagacagaattaaataagtgatgacgagccatgagaaggagtgtcagagaagttgctggtacctcaggagcatagaccagggcaacctgaatgagattctgggaaggctttgctgagcaagtgagggtaaaacaaaccctgacaagcagggtgggcaggtgaggcacaaggggaagagtgcacctccagagggaagggtgacacaggctaattcaagggctgagtcactcccagtgtgggaggcaatggcagagcaggcgggaaacaggatgccagctcactgactgggggttacccttcctaagctgaatggttgggggtgccagtgatggggtgggcattgcagctggactcaagggagcccagccaagggacccgggccaaggcacccaccttgttgagccgctggatctccttttcctggtactcacgctgtcgggtgagtgggctcagctgatcctgcaggtacttgaccttttggcgcagctccttggcctctgctgtcagctgctccttgtcggtctgcagggaatacaaggttggtaagctggctaggatggcctctccaggaggcctcggattctctgtcctgcctggcccagcccttacgttctcccctggccatcacttcacaatgctcacatgcaaagcacctggggtcggtacagtaatgtccatccggtcctgccctcaattattatgtgtcaatttaaaataataattaaaaaaagaaaaagcagtagctcagttgagtaaaagaccctggattccgacaccagttcatccactaagcagctgagacccctggcactgccacagccctctcttgtctaagcttacctacctgtcacaggtacggggttcctaacgtgagtcacacagagacctcaggaggcctgtgagccccaaaactgaatgcgaaattttgttgtgtgtaatctgctagaaagaaaagccatagttctgaccagattcacatgggggtcttccgtgatccacagaaagcgataaactacggataatccctaacagacactgcagctcatacagccttggagcctagaggagagatgacacgcccagagagaactgtgacataaggcagagagtgctcctccagaaagaaacaaaatactgtggggctaaaagaaagatcaccacagctgagggaaggcttccaggaggcggttccataccctctacggaaccagcagggcttcgccacagccagccaagactgggatggcctttagacagcatcaagccccagccctgtaatacgatgggaaacaaatgtccagagaggggaagtgacgtacccaaggccacacagtgagctggggctagaacccaggtttcctattcccttgctctctctccttccatgtcaaaggaggtgttgaaactaggggatggcagcacagtgcagtggaaagaccaggcacatccccaaataaactatatattcctatgtgtacatatatgcgagaaaggtctggaaacagatgcaccaaaatggtaacagtggttccctctagggagggcctgggatcatggcagtgggaggtagtccagggaaactttcactttgtagcatgtggacatttcataactgtgtattcacagcatgtgattaagagaccagtcgcaggggttagttttcacccagccctgtgtgacctttagtcagtacggactgcagagggcaggcttggtcagacctccctgggaattgttctggactccccatcaagaggctcccggatgggcatgggctttaccgaaattcatccttatctacagggccacgccttgtcatgaaacgtcctaccttccctgtagctgacagggaagagccctcacattccagggatttgtctcacctaccactgtgagcaagggagaggggccaaagagccaggatgtctggctgcgagtcaccaggtatgactgtgcactcataaggaaagacagaagtgttctccctaccacacctccaaggtaagggggtgtcacagacgtaggctgactgctcaaataaggcccctggtgtcccatgctgacgggaggaactgtgaaaggcaatccaggttgaaaatgtccatttttaagctaggcaaaagaccatgcccagttcccatgaaggggaaaacatggtgacataaataaaatctcccaagagtctggcagtcaagtggcctttcctctttaagctgctccaaggtcctgatgggccttggctggtctcattcatacatatgactgggcagatactactacttcaggggacctgttgtttccccccaagaaagaatctggtctcacttatgcccactctctgatctctgtaacttcttcttcgtagtactttttttttttttttttgagacagggtctcattctgttgcccaagctggagtgtagtgacacaatctcagctcactgcaacctccgcctcccgggttcaagcgattctcgtgcctcagtctaccgagtagctgggactacagacatgcgccaccactcccagttaatatttgtatttttattagagacggggtttcaccatgttggccaggctggtctcaagctcctgatctcaagtgatccgcccaccttggcctcccaaaatgctgtgtttacaggcatgagccaccatgcctggccatacatttttcttttagagaaacagggtttcactctgttgtccagtctggagtgcagtggcacaatcacagctcactgaagcttccaactcctgggctcaagcaatcctcccacattagcctgagtagctaggtctacaggtgcacactgccacacccagtgaattttttaatttttgtagagacaaggtgtggctatgtcactgaggttggtctcaaactcctggcctcaagcaatcctcccacctcggcatcccaaagtgccaggatcataggcacaagccacccaacccggccttctctgcaacacttaacacacttttactttatttgcttctgtaattagttgtctggcacctctttcccagcgagggcagggttgagctgttcctgtggactctatgccaaagcacaatgcctgagacaggctctgaagacaaatgccgggatgaatggataaatgaagctctgtctcatgttgtagcccctccccaacaaatcaccatcactatgctgaacacttggcagcatcccaccccaccaagtgccatacagcaggcctgcttggatcttttttttttttttttttagcaagagtttcactcttgttccccaggctggagtgcgatggtgcaatcttgactcactgcaacctccgcctcccaggttcaagcaattctcctgcctcagctacctgagtagctggaattacaggtgcctgctgccacacctggctaagttttgtatttttagtagagatgggatttcatcatgttggccacgctgatcttgaactcctgacctcaggtaatccacccgtctcggcctccccagttgctaggattgtgagccatcgtgcccggccacctgcttagatcttttatatggtgtgcttccctgtacagttccccattccctacaattttaatggaacaaaaagttctgaataaaaacaagaaaatgtgaaaagctgtagttaatgtaactttctcaattttcagatgggaaactgcagtgcagggaaggaacgtgcctgtgtttttggtcacctagctctttcgcactagacccccgggtctcctgactcctgcccctggcttgtttgctccacagaactctccgctaatgtggaggggaactgactctgcagggaccagcagtcacacttgcctcctccatttcaatcttggacttggccaggaggagcttgcggtcaaagtcacgctgcttctgctcccgctcggcctccaggtcagtcacctgcttctgcaaatcagccagcttctgacgcagctcagtgatctgggttcagaggcagagaggagtgtgtgaggcaaggatgtagagcacttgcaggatgtgggcagggcctggctgcccctgggccctccaacactgcccccaacttctcctctgggccatactggggctcagcgtggccactccccaaggttcaaagctgctaaagaggcagcgagatgaagaccaggcatgccctgtgggcgtggccaggaaccccacattaccttctgctcatactgctgcttcatggaccggaaatgctggtcccactgcttgttcacttccagcagctgtggggagagactggagttagcaggagatgagcagagaaggaacaaggagagccatctcctgccccatgtacaccagcgtcccaaggtgtgctcggtgtgtgtgaatagtggctacagacactgtctccatccctcagctctcgaaaactcaatgttgctcaaagccatccaccttcatccactgctgcattttaccttgccaggaaagcaagattaacactaagacatggaaactacatagttttggtgaataattatggaacacacacacctctttggagggcagtctgggattatgtattgaaatttcacattttcatcaactttaacccaataattccactctgaagaatttaaccaatagaaacacttacacaagtgtgcaaatatatatacacaaggctaatcatctcagcaatacctgtattacaaaaaaatccagaggccaatctaagcacagaagataggttaaagaaacgatagtataaacagacaatgtgcagctgttaagaaaa

SEQ ID NO: 45285 - DNA, 1915 bp, Homo sapiens
catctcagagccctcagggacagaacaggacaaggggacagaaggttccaggcgacagaacataaagagcctttccaatactcagagctgcctgaggcagtggtgagcctctcaacactgaaggcatgctagttagccagacagccacctgagggggccctgcactgggcactgacaggtacatggggcaaccagtgaacacaagcatatttgtcagccaaacctttgtgaagggaggcagcagggatcaatatatcagtgaagggctagagcacctattgctcgcataacaacaattaaagaaaaaaacttaaaagtgggaaggaagggagaatggagaaggtagaaatttaagtcgtttaaagaatcttccagacttttcacaatggttcttcaataagtctgccattttaagaaagaacagaaggagatatagttaggaaaaaggcagccagtgttgtaaggtgtggaatgaggatgctgggcagacgctccagagctgtacgagagacagagagagagagagagagagagagagagagagagagagagagagagagagtgtgtgtgtgtgtgtgtgtgtgtgtgtgtgtgtgtgtgcgcgcgcgcgcgcgcatgcgtgtaagtggaaagttgaacctccttcctgtgtgctccaagagtctgcacaaagagcaaatcacctgtcttacagggccctgggccttcctgacccttctttctcccccggggttggaagcccacagacccaaagggctgagtcatagtgtgcggaggtgcctggcccctggcagaaggcaacagggctggcaaagagcccaggctttcacaacggtcgggtgcccgtgtgctccaagtcggggaagtcactagcccaggaatttgcatatgtgagcgagaagcaccctttgctcctgcccctcgtgtatccccaagtgactccagggtacctaagggatctgaacaggttctgtgcctctcacatggtagcaagtgacaggacacaaagagggcagcaggtcaagcccggggtcctgcccgtccactcaccatcgcattggcatggctgctgctctctggtgaattctgctcctcaggagtgaccacttcaaattcagaggaggtgccctgtgcagaaaggaagttaggtgctgcccgagagaaaaacagctcacccctcctctgcggccctgtggctgagagcagcaagggggacaaaatctcttcccattttgagtacacagggaccgttacatatcatctcacatgagatcacaaagcaggattctcgacaagcctgtcatagccctctgcataatgtgaggtcatatcccctcgatggccaatcctcttttgtagaagggagatgtgggactagctgaccttgaaccagcagcactgtaggattgcattttttaaggccgtgtactttttaaatgctttcatgagctccattatttctcagggtgacccatggagtgggtcagaaggttatatcctctttggaaagatgaggaaactacagtatacagttggttaatgcaaaagcagggattgaacccaagactgcagatccagcattcctgccacggccccagagctgtctcttaggcccagacgtctctgatcggtttcccagaacacagatggcagctgttacggccaccaccaagcatgtcctgtgctggccttcccaagccagtcctggagatcccagaggagtgaactgatctgagaaaagtcccagagatgattcaccaaatttggagactatttcaggattcaaccaaatccacggtggccaagaaatcccagattttttcacatctttccgtcattcctagtagaattactggtcattcaaccaaccaagaagccaatggcccacctgaaccagccattagctctgggatct

SEQ ID NO: 45286 - DNA, 2752 bp, Homo sapiens
aggccccagagagtttgcgatggacttgcccaatatcacccagcgagacggaacacagtttcttgacctcaaccctctttcttcatgttcttgtatctgtcagtaggacttgaggtccatccaggcaacctccacccatgactccaaataaaacttacactggatggaggcttctggactggtgctggcttgtcactggggcatgcaggggctgtgggagatgctgtgacatttgagtcctttcctggagaatcaagaaagcacagatgaactgactgggaaggggagaagcccaggtaccaccctctcaaggacagcccttgacaaaagggttctcagacaggattccccactcgagtgtgggagaatgggaggtggtctcatcagggccaggtagtctgagaaaatggcctgccctggagtgacggggcagagcctgagcagagagaccatgctccctgggcttactgggaaaatcccaagttggctgctgctccttgctgccctgaacaggcctcaatgataaagacaatgatttacaatttgaaaagtctttatgtatctattatcccagccattctcataaaagccccatatccccattttaaaggtcaggacactgaggcttgggaaggtcatcaacttgcccacagccacatagccagcaactgcaaactcaggactgagacttggccctccctccctgacttcctgcagtccttgctgcagggagctccttgaaggtagcttcatttctcactctgagagtggacctggcaccaatcaggaactcaggaacattgctgaatagacaagcagaggctggaaatgcccactgactgcagcacagtggactctgagaccatcactttcctccatttgtccattcagcaaatgcaaccaccagccaatagaaggctgtcacattggcctgggccagataccatacagtagagctgcagcaggaggcatctgagtccagctgaggtgcggatcatttccatcctggtcccagaccttaccctggacttggagacatgccagagtaatgcacactctgtacgcatggtgatgcctctaccatacatgggacttcaaccccgagccacagtcaccctgtcctttaatgggcagcacacgtaaccttacatctgaaatacgctgcagcaggctaacaggcaagcccagcttcttccctgggcctcagcttccctaattgtaaaatggacgcgcagggcacgaccagggagcttccaactcatatgccagctccaagtgacagggagtagctgcttggagtgcgatgcctggcacacagtagctgctcattaaatattaaatatgctgataaagaccccaaggccacaggactgcaatgtagtcaactgttgtatctattactcatgtctgctggggcctcaggagtgctgagtcactggctatttttaacaagattgttttgaagtcccttccaaatctgaccttctgggggatgtggcagccaaaacatgaatggaagggtagcctgtgacctaaggataaacgagagaatgtgggttttggcataagaagggagttcactgtgaaggatttgggcagtttggggtacagggagagtcagaggtacccagactcctcttatacctgtgagctcagccagggggtcgaaggagcccaaggagggagaaggtggtgggagcagctcgttgtccttcactagctcctctgccttctgccggagcctggtcgcttccatctgggactcttccaaaagctcccctagagttattggggaagaggaagcaaaagcatttactcggctcagtgtgctgcttctccccgtcccaggcccctaaccgtgctgccgcctggcttctgaggctccaggccctggacttcactcccaccgttgctctgtgggccaagtgggacaaactccatgctggtccaccataagaaacaggctagagcaaggacgagggcccagcaatcgggggacacaggagcggaaggaatctatgagaaactcctcggctcccccaacccccagcattctctttctgccccactcccttcacacccagccagggcactccacagaaagccaggggctcccccaccctacgggctacccacagcctgagccaccagggcaaagggctgcctgcagggcggagaccttggataattccaaccagccctctaggcctccattttccttctcctacaagtggagatggggaaaccactcctccctccccagtcggccatcccaagcaaggatctgccaagcaaggagaaagcattttaaaaatcagggggctatgctcccctctaaaacatgagactagagaagggcacggcaaggcaaaggaagagtttcaggagtgtggaagaaagagagccccctctggatggggaaatcaatgaaagccttgtctggaggagaagggggcacagcaactgggtgctgatgcacagggcccgtcggtcgtgtggagggaggtggggttgttctaaagtggggatggcttgagcaagagccaggagaagagaactgagggacctaccacctccttgcttcaagccaagctctgctccctgctccaacacctaggaacgcgtgccccagttgcctggtcatgctggctctccccatctctcgtgccccagaaagaggagaccactctagttccatggccattaactgggccttccagccccctttcccttagcccacgcctccctcttg

SEQ ID NO: 45287 - DNA, 2109 bp, Homo sapiens
aggagcgtactttgcacatctttgtattcctgtcgggagcacaggagggtgggccttccttgagagctgcttggagttcaagaacagtgaaacagagggctacaaggggcctggagccaccttgcatgacaaaggcagcagtgtcctggttcttgtccaccattatgcattcaccctaaatggaactcacagtcaacaccacatgaaggcatggggaatttcttactcaatgtctgccttgtcctgtagattagaggctgcatgaggacagggagcaagtccatcctgtgtgccagggtatcttcagagtggcccagagtagggcctcggtaaaccttgaattcagagaagtcagactgaagggaacaagcccttgaccccgaccccgcctcctgcaaggccatgtccaacatcccagagaaagcctaaccctgacccactgaccagacgcacttggacgcccagacacttctagaatccaggctgggccagccatgctccctcagagaggcccagatgtaaggcgaagggacaaagcaggatgcaggatgtgggaactgaaacccaccccacgtcctccaaaacacgcaacactcagtttctcttggcgctggggagtcaacgggaaaggggttcatgggaaacaaaaagtgggcagacagagctatgctcccctactttagcctcagggggcagagcttggggagaaagaaaggcagtgggcagaggagacgcaggagaaatatcctattgtgggaaaaccctctctggagatcagaggagccacccctggagggcctggacttctggaggaaagaaagacaaagagggaaacagggaatttccaagttctgctgacctcatgcccagatggtcagcggcagtccctggatgaccactgggcagacgggaactctccctctgatcaatgaggtttttataacttctcccagagagaggactcattctcaggatgacagagctggaggggactctccaagggcaatgaggcgaatcctgcattatcaggtgggagagagatgcacccagaaacactcaatggatgaggggctgcattcgaacatgacgatggcatgcactcccctctgctgtccacaaaccacgaggatgttttcaaaggggaaaaggaagcactgaccactcccctccatgtggcagtatctggagttcagagcccaggagtcctcgggcatgagctcatctgattctcactcacggcacaggcagtgcagcaaggcaaggccctgagcagggaaggccaaggtcacaaaggagtcaggatggagctgggaccagaagatccctgctctccctccaggctgcccacagcccatcctccatttcccttcctgcccagcaatcccatggcacaccacaggcccccaccacatcttctcagagtctctttccacctggcctggttccacaaactacaaatcagcaggtgctccaccagcagtgggactccagccccgcttgcccaaaccagaaacagctggtggtatagaagcagccagcgcagactttcttccaaaacaagacctcagccagcggggcctccacagcctgccccagaggggccctggggctgcccgctggaaccagaaaggcccagtttgggggcagaaaggggcccagacagacggcaggtcaggcaacaaccacagaccgtgaagatggaagtgatgctgctgaaaccgaaggagccacccactagcaggcaagcacttgtgggtggcagggaggcagtagtccccagggctcaactctcagccttaccccagaaagagaggggtatgataaagactacattcagaattaaatttacattctagcttttgctctgaaatgctttggtctgtcagattatcttcccattagcagtgttctggtggctgggtaggggggtggtcccagaccccccaaatgatattcacttgcatagccactaacatttgcaaaatacttcatagtgtcccaagcattgtttttccatctgattatcacaacagccctgggaagaaggcagggctgatacctgcctgatggataaggaaactgaagtccagcttggggacttaatcagcc

SEQ ID NO: 45288 - DNA, 602 bp, Homo sapiens
tggggcagccagcactggctacagttaggctgctcccagttctgtttccactggcccttctctcccctctgtggtcccctggaataaggaacaagatgcccatcttcagcatgacagccagccctgaggacatttggaacctgcagccttctctatactgttccacatagggactgccccccctccagtcccccaccaaccctctaccccacactatctctagttggttctagcactggacccaacattccaggcatggtttgcctgaccaaatgcaggctttcacctccacccttttaggtagtatattcctattgagggagcctgggtatacatttgcttttcttacagctgagtcacctactgaagaatgtcctttctcaatgacaacaacctgcatgtatgcctaactggtgagaacaaagttctcatgtagaaacgtgtgcttgagggctgggtgcggtggctcatgcctgtaattccagcactttgggaggccgaggtgggcggatcacctgaggtcaggagttcgagatcagcctggccaacatggcaaaacccagtctctactaaaaatacaaaaattagccaggtgtggtggc

SEQ ID NO: 45289 - DNA, 1681 bp, Homo sapiens
tttatgtccatgaggacctgatatttagctccacttataagtgagaaaatgcagcatttggttttctgttcctgtgttaatgtgcttaggacaatattttctaaaagtctatgttgccagtttcctgaggaccagatcacgcaggagttgcacctgcagagacagaagtgggctggagagggaccagggctcctaagtctgctgctgaagctgactatagcgaaggcaaaggacaagtggcctgaaggccaacagagagcctggccaatgctctgcccagtgggtggagactgagccaaaggcccttgactcatagggcagtcccatacctgccctggcctctcagcatgactccttggtgacacaactcccacagcacccacacacctacacccacctaccccacacacacacccctgcctgggctgcccggtttgtccactgtgtaggtgctcaaggacgcagagctcctgcctctcaaggaacagcctcagggtgaggtccctgggagagaagagttcagctctgcccagagcagccctcagacaaacagccagctgctgctcaccagtcatccattccaatctgaagagtgactgtcctgggccagtcatgggaaaatcatcaagaacttcccacaatggtcatggtggccgccaaggtctttctctgggggttgggagctgtgctcccccacaaaacaaggggacccagctgccctgtgccttcctgtggcaactctctggaggatgcctggataccctccctacagacggccagggataggaggggcaggcactgcaggcatgtgggggcatagcagcaagaatctaggagggcaggcacagcaaggcctggcccagagggaaaccaggagctgccagagccaaagagagggtgacccaatcattggttgttatagagtttttaagacttggaagagaatgccctgagatgccagagagtgaaacattttcattctaaagctgggaaaccaaagtcggcaaaggcgaacagacgtgcccacagccacatgggacagcagtggcacagaagaaatgcacacctcgtcctctggtggccactgtgcactctcttaccacaccatgctactgctcaacctctccccctccctcacagtggtcaggtaagcaatgagggaaaatgatggaggtgagaaaggaagaacccgggctgatgtgggcccacaaaagaaagaagtctggaataacactggaaggggctgcctacgaggtggaaagcgccctgatcccaggggtcggggtcacgcagaggggcactggggctgttgagggaatgcaagccaggtgtcttcaaagccccacccacatctgagtttccgccactccaaacagggacagatgtttgagacaaagcaaaggacaactcatccagaggggacacagcatggaccacaagtggcagagggttgaaggcaagtgtcttagtctgctttctgcaactattctgttgaatatcacagactgggtaatttataaagaacaagtttatttggctcatggttctggatgatgagaaatccaagtgcatgacaccaccatctgacaagggtcatgccaaggtggaagacagaaggagaaaatgagtgattgaaatagagagtgtattagccaaactggccccttttataactaacctc

SEQ ID NO: 45290 - DNA, 9202 bp, Homo sapiens
ataatagcagcgaccctgtaccaagcgcttaccacactggtggcccgtgctgagtgcttgccacacactatcccattaattcccaccattctaggaggtagcattgacgtcatacagagctgacaggtgaggatgcagaggcccagagtgacagacacggcacctacccaggtctgccaagcactgaatcatgtgctcttcaccaggggtgctcaaggagcagcccggaccagcggcactggcaccaccaccatccactggatcggatgctctggagttgcagcccagcaatctgtgtttaacaaccaccctctacctccatccccaggattgtgatgcatgctcatgtttgtgaaccaactgctctgaccatttcccaatgctgctaaggagaaaaatcaacatttctatgtctggtatcaaaatcttttagggtctttcccaggccaactggtcaattctcccaaccgaggagaggctgattccagttattgtgactagtctactaagttccagaagagacccaggttccactctgcactttgtcatttttttagggtctgaccttgaagtcacttccctccagaagacccctccaaccatctggtgcccccaaattactctgcactccagttatacctatgccaatccgactcatttggcacttactggcacacaatgcctttcaggtcacactcatagcacatctccccatttgaccaaaagttcctggaaggcaaagccagctccttacgcacctgtgcatcaagaacactgcatggcactgggcacaggagtcatcaggaaatgatgcttgggagagcgctaggagagcactctggttctcctcctgccttctcatctctaggccttaatttcctcatttgtgaaatgtgccattattctactcattcactgaacaaactcagaagagccatccaccaggcactcttctcccgctacagaaatacactcgagaggactaaggaggtccctgctcacccccttctattctaggaaaagagaaagacagtaaacaaataaacactaaaaataacaatttgccagacactaagttctatacatatgctttctcattcgcaaataagattctttcatagcatgatacacgtatgagaaaaataaaatagtaacgtgacagaaagtgaaaaaaggggctgctttgcataaaaagatcagggaaggcccctctgaggagctgacatttgagctgagacttgatcgataaggaaaaaccagccatgggaaaaacggggaaagatgtcctgggcagagggaacagcatgtatgaaagcctaaggatgagaacaagcttggcttgctggagggggaaaagcaggccagcatggtgtgaccaaatcacagcgggtacaggagtaaaacagtaaccagtgggttggagagagaggcagacaaacaacctcctacaacgctgcctctctcaaatcaggtcggcctgacccaaccaggacatccgggccccaagtcacaggcagcactgggggtaagggtatgactcagaccccacagcttcctggggccccgaaaaaactggtgggggtatccaggggcaggcatcaaccttcagcatgagtgccatgccatacccatggaacacccaaggctgggagacaaacgtggttacataagcgtgtagaacactgcacactcccagcggcagcttccagaggggcatgatcacgtgcttccatgaagtgccagtccctgatcacattattttcccgggacacagccaggacagcagccttggtcaggggaaagggaacagggtccaggattcaagcgttgctagtcttgggaaagccttaaccttctctgggcctcagtttcctcatctgaaaattaagagttgttagaaagattaagtgaggccgggcggggcggctcacacctgtgatcccagcactttaggaggctgagacgggcggatcacttgaggtcaggagtttgagaccagcctggccaacatggtgaaactgtctctactcaaaatacaaaaaaattagccggggatggtggcgagtgcctgtaatcccagctactcgggaggctgaggtaggagaatcgcttgaacctgggaggcaagttgccgtgagccgagatcgtgccactgcactccagcctgggtaacagagtgagactctgtctcaaaaaaaaaaaaaagattaaatgagatacggaatgtaagcactgtgcctggcacatagtaagctattagcattatcagttttttcactgcctcagtttcttctgttgcaaaacagagaccaccacggggatgctgagtttgtactaatattctaccctcctaatacaattctaccctcctttgtcaaggatttttttaaaacattctgagtccccttttctgacctctcatcagatgccgaattcccctctatcacaccccattgtttggaaaatgagtaagtgctgattaaatcccattttgaccgtactgtgagaaaaaaatgatgcattaggaatctacacatttccctgcactgtcattctgcaagggggtggggaaggacgttgctgattcttctgcatcatccacaaaagtccctccctccccctaccaaaacacaatctctcacccagtcgcacaaaattcccatctgctcctgtacgcacaatgaatgtacaatgcacacgtgcacacaaatgtcctacagtggaaagctcagccttcatactccatccccagaagcactcctggaaactcatccatcctgcacatgcacacaaatgcctccaacaatgtgcatacaaaatatgttcaacagaaatagtatagtaggaactctggagccaaatgcctgagttcatatctgactttgcaactcacagctgtgtgacctcaagctccaagtacctcggtttcctaaagtataaaatggagataataacaatattaatgtttaggatggaagtgacaattaaatgagtctaatacacgtacagcgttaagatcagcacttggaaagcgcccaataaaaattattattttcctcctcgtgacatatgtacactgcttccacaacttgatacgaaaactcctgacgccgcgtaggcaactcgtctccacaggatagacacccaaagggccgcagcgccgcccgcacccggagggtctgcgctctctacaaccgccccacgccgttcccaggcgtgctaccccgcgcagtgcgcacgcgcgccccccaccaggcccagcgccaagcagggagtagcggctcagcccggcttggccgctggcggagacgccccgggaccccgcgcgccgggcctgggtgcacaagccaccttccccagctcgctccccgccgccaccgaggctctggacgatctgggcctggcctcccttcctcccctccatccccgctccgggccggccggcttacccgaggacggggagcttggggacacagcgccccgcttgctgcgtccagccccgaatccagggacggggcagcggcccgggcaaggctccggccccccgtagcactcctagggctcctggacgggggcagggcacccgggccgaggacgaggaagtgccgggggcctggccgggccgccccacccctgggaaagtccccggagactggcaggccactcgcccaatcgcgccgcgcgctccgggcgggcccgcggccgcctggggtgggaccgagcgaggtaaacaccggctgcctgcggttccgggggcccgcggtgtctctcgtcccttcggcggccttcccctctaggagcgacttccctggggccaccgtcccgggcctgcgcggcgccttgccgcactcccagcgccggaagcccctgtcgaaggcctggggccaccttgaaagccggaatttcagagcggaggcgagccacagagaccacccagccccttccttgtgccgaggggaacacaggccagaacagggaggggacctgccaaaaggcacgtaagcatttggccctaagccagagctggagctcaggcccccagagttccgtccagggcactccaggactcttcttaacaaagctatagaaattccgagctgaaaagacccataaagactctaccgcgaacattttttgctccagacattgtaaaggattcccagacatcgtaaacgctttgctccagacattgtagatgctttgcgtgcattattttcttcgcacaatcacgctagggaggtgggttttactaccttttcttaaataatatttgagtcacaaaaaggttagatgacctcagtaaggggctgaatcaagattcaaacccgggtgggcaaatccagaggccgccttccaccctacctacttatatgtgggctagataatcccaacagactgggatttcctagaccggtaaggaacataaacttgctttaagggtaggaaagctttttaaaagcttatccttttatttttaaaaagaaagaaagctaaattttaattccaaaaagtggaaggtctaaccttggaataaagaacagctctttaaactaaatatagctttatgaaaaacctattgcaaaagacccatttcactggtactgttgaaaacttagtcattgacaggccctcatcctcaaaaagaattaggggaaaggatttggggaactgtttaatacacaccctcattttacagaagagagacccatcaatcaactgtgacttcgcaataatacacacacagatacttgcccaaattatatacctaatctggggattctcctataaggctttgtaacctcctagggttccttcagttaattcaacggtgttatcagatcttcaaaacgatattcattctagtttaattatgaaaagaattacacttatgccttgattcagaagggagggagggaggaagcgatgcaaactccaaagcaccactgagtctcaccactgggggatcctacagagaaactgggaatcctggccctggtttacatagcagctcccaggcatcgtctccacccatcaggtccgcacctgccagttttcttcctgctctttgtgcctgtacttcccaattctcttcctgcagggctctcttcctattcccaacccacatcttctccacccccaccctctacccactgaaaactaaaatctacctaaaaatggctggtctctaattacttgcattttgtttccacactatttcagctgtttttatagcatgtctggccttagccgggcagacagtttcatttctcaaagtgtccgctgggaattctcaagcttgacataaaaaaatggcactcagtcatctttttgtctgatttcctagttctggatcctttttcttaacagttccaatttgtgagaaaactcatttatttataaagtcgtgactgcccccacctcttccattctttgaagtcttggtttgtcttcaggacattccaccctgttagagaccatggagcccatagataacaaacccctatttgacagataggtaaactgagtcctctgtctagaaaaggacttactctaggccacacacattgagtgacacaaccagggccttggaatccagggccttggctcccagtcctgtgtgcttggtccactgtaccaagttgtctttacaatgacatgatttttctcactgccttgcagaaaacaccactgtcataaacacaggctatgaattgagctaatgggattccaatccctgctcagccacttactacctgggtggcccctctaagcctcaggcttctgtctggaaaatgggggataatatacctattcctcatgtgaatcatgaggataaattggacaatgcaaataaagcccaaggctcagcacacagtaggcattcaagaaatgatagtggtgtctagatgtgggctgcatgcattgggtagaacttggctcttaaactcagcaatgcaacctcaccaggcgccatcccaccatacacatcctctgtgagaccctagcctctaggagcatggcaggaatgggagacaggccccctagcctggcactgcctgctaccctgtggtctggaaggggatttccaagtcaagaagctgggcctgacgctgggagctgagtgactcaggcaggtgcaacctcttgttcttccagagtaatgacaagcactcgcacaaagccacacccagaaggagaatcaaactgcctttgttttgttttgttttatttggttttgttttaaagcacgcaacttctcgatctcctttctgctactccctcctccaccacccctactgaggtagctacagagtcagacccaaatacacatttgaaggtaataaaaaacatatgaaaaatccatctataaccaacttaactctagagcaagttccagaagaggggtggaggctgcataataaaagcattaaaaggtaacatgtatggagtatttgctgtgtgctatctccgcgcttttattcataatttgcctcccaaccagcttatgaggtcggcaccattatcatccacatttcacagatgaaactgaagctttgaggtattagatgacttgcccaaggtcttacagcacagcaagtaaccggagcttgaagatccaggctcttaaacgcttaacactcttaagcatcatgctccaaagtcttgccagctagcaagacatagaactcagagtgccaggcttgaagggtctttagaaatgatcaacccaggcagggcatgccgtggctcacgcctgtaatcccaacactctgggaggctgaggcgggtggatcacctgaggtcaggagttcaagaccagcctggccaacatggtgaaaccccgtctctactaaaaatacaaatattagccaggtgtggtggtgggcgcctgtaatcccagctactcaggaggctgaggcaggagaatcacttgaacccaggaggtggaggttgcaatgagccaagatcgcgccattgcactccagcctggggacaagagcaagacttcgtctcaaaaaaaaaaaaaaagaaagaaagaaatgatcaacccagtcttttcattgtagggctggagccacaccaagggccagagagcggcagggacttgcgggaggtcttacgttgagtttgtgattcatacataggacagaacccaagtatccttctcccagcacagtgctgtttccacataccccactgataggaaatggagcatctaaatcaaacaagaacattcctcattgcattaggagaatgagtgaatcagggccttggctaggggagaatggaactcgggagcagctaatgaactaggaaaagagcagccctgggtcccttccttagatccataacctgaggcaatctcaggagtgtaagaccctccagtggattctaggtactttttggtgctgggtgtatgtgtatgttaaagagagattttggtgatagttaaatgagaatgcatatcaagcacatgatattgactaaaattgttctaggcaattgtggcagtttttggtaaaaagtaaataaatgagcagggtccatggtcccagcttctctcctcagcctaagaagacatttttaattctctctatccagctcccaaatacctgcatgaggaggtagttgtatcttcagaggttttcacagtcattcagcaccttaaggtgaatgaaaccatttcatacccacaacttgcccatttcccaagagaccgtcacgcagaggataaggtgtgggttctggcctctgggcttaaatcacagccctgccacttacaactctgtgccttggtttctttatcaatgacatgaaggctgtaactgtgcccaattcagagggtggtgacaatcaaatgccacaaggcttggcctcagtgaaaggtagcgatgatcattatgatcatcaattctatgaggcagcagggattgcttctctcctttttccaggaggaccccaaggcctggagctggggagcagcttgccctagacatcagactgtcttctgaggagctgggcctggaaggcattgctgctgacttttctccaggctctttccccttttcttccttctctatcccaactattttccctgtgtccctgggctggcctgttacacttcagtttctagggcaccactggaggagaggaaagggcaaagtgacactgggggaaattcccagcctcgtcacatacgtggcctagccaggcccctcccacagttcctaggagccctgggtctccccactccagcgtctctccccctggcctctccgtctccaggtcagggtgtcaagctggatctgggcttgcatccagggttgccccttgtcatcctcctggaagtgggaacaggtcagccaggcccagcccggcccagcctctcaggaagttagacccacaaaaccggagcatttcctaatcccgggaagccctaacagggccctgagagcaatcctctttcagtcccacccaccttcctccctgtcctctcccacaccctcttcttctatggcccctccccgctctccctccattcctctgtagcctagaagccaccgtcagacttggcctctgttccttgcctcttctagccagggacttccctaggctgtgaaaagatgcctggggaggggatgaagagggccgtttggatgaactggcctttcttcatcattcctggttccagagtttcctcattcttatggtaacatttatggaccactgaggatacaggagtggaccaatcagacccgcttcctgctctctcagagctcacagactctcaggagccatatggggctatttaaataagtagaattaaactaaaattaaatagaattttagtccagattttctaagtgatcaaagaggaagctgcgtcagctgtgtctgcctgcccttggcccactccctgtgccctgggctctctgttacaggttccaccacaaaagagtccagcggccctagaagcagagcaggcaggagagaagcaagagatccttttgctccagtgttaaggagggtctcagcctccactatgttcccctggaggcagcgccgattcttggcctcttcctatctagctgtagacttctaaagtgcccaacacacacttgtaccctctccatcaaaaattcactgtacacacagatacacacacaaatacacacagtcaccaacttacacccacacagaa

SEQ ID NO: 45291 - DNA, 3993 bp, Homo sapiens
aatgtcgcctccattctataagcaatggggggggggggcgcataggagtctttccactaacattaacaaaatacttttgtggccaaaaatgttctgatcaaactggcacttcaggaagagatctggggacagtgagaaatacgtcttgagaaaggggatttgacttgttagtgatagaggcaggtgttaaatccacaaatatccctccttattttactgatgcacatggggtaaccctggttgcaaacagctgtctgaagagctggcagcaccctttttcagactgtgagtaaatggacaggcctcaaactttgaggccacaggcatctgcttggtgccaggccagccactattactgactcaccatatggcctcatcagtacttcctctcgccatccctcaccttcctcatctgtaaaagggagtaaattctcttcacccatttataacactgagcacagctgtgtgcacaaaagggcatccattaggataatttcatagagaatattatagaccatgggtttgttaactttagtgtcctttgaccaggggttcgcaatcctgactgcacatttaaatcacctgcaatcctgactgcacatttaaatcacctggggatctttctaaacacgcggaccctccaggccccaccccagattaattaaaccagaatctccgggggtgtggcctgggcatgggtattgataaagctcccccaggtgattttgagatgcaaagttgtgaccactgacctagaagctgcttttttttttttttgagacaaatctgcccttttaacagctggttctgattcaggtgatcccaggaacttactgtcgttgagtcactgtggtctcccaacttgttccttctttttgtatcaggaaggtgacttctcaataccaggatagggacaacaaatttcagaatgtagagagaatccctctttcggggagtcacagaacagtatgtatgatgggtgtgaaaggaaaagttaaaacgcaagctaagccactaagtggagaggaggtatgtgtcattctatcagcatttgaaaaatgggattcagggaggccttttgcaaaattgtgctttccaaggaaactaatacagggtggcatgttgcaagattcttgtcaaaggaaggggatccaagtacagatgttgcaacactgtgctgccaaaggaagtggaagcaaaggaagtggcttcttagtctatcagatctggaacaaagcttagagattatcttgaccaatcttctcactggatagaaggggaaactaaggttcagagaagggaaggcttgtgcccaggggcagccagggagttactgatgagttcaaattgcaatccaggcttcctatccaccacctacctgctgccctttcctcttctccctgaatatctatcccctcactgttttgctctgggtccctagcccagcctccacatccccaccctctggacagtgcccaaggtcaaaggatgagcctaaatctgtgtgccaggatctaaacccaccagatgacaggggcgaaagccagcggtggcagtggcaagccggagaggaaggagcagtgtctgatgatgtggcctgacctcagaaaggaaacctggttggtcaccagggggaatttccccgggtgaggtctcacgtctatgcaaatattgcactgcaattaacctggaccctgggatgggagagagaaaagaggagaggacactgggaaagacagaagggcaggtaataggacctgaacattcccagggtaccaggcactgtgctaggctcctcatgaaattaatctcattttgcctctaaagtatcctccaatgtaggaaaattgagtctgaggcccagtgagagggtgcgttgcccaagcaaaatcagcacattcctaccccaacgggataccaggcctcagggagaagtgatgatggtgacgatagatttggcgctgcggctgctgacaaaggtgacagtaatgaggcttgagtccgggactctagcaaggtttcattttaggtttccatctcactcaaccaggggagttttatcctgggaacggccaaaggcagcaggaaggtagtgaccctgactcaccttgggcaaatcccagcactctggtttttcaaagccctgtgggggcaagggatgtggtagctggcacagttaaccccttcaccaccagtttctagaatgctcctggaaaagtgaacagaatgggatccatacttttgaaggagaatcaatttttctctgctacctctttaaatttcactcgctgtgcgcctcaccgtatccagaaagccttccccggggacttcactcgttttccaaggcttgatctcatttactgcctggttctccaaggagctagtcttgtctcccagaataggatgccaagtaggatcagagttcaagtcagggctgttgggctcgaagtctgccctccacacagcctggttggttgtcctcctctgatgggcttacacaacaacaagcagactcctgatttctggaggtgtgtggggcacactaaggctatgcactaagaaaagtgtgagtgtgcacatgccccagtgtgtgtgaagaacaagttaggatacatatgcgaggtgtttcccacgtgcacagcaacacacacacacacacacacacacacataatgtctgtatttttggttgttatcagcaaactaaaaaaaaattattttctctgtatggtcaacaatgtgtgtctctgtatgtgttaccagcagaataccttacactcctttgtattaccagcaatgtgtttctcattctactgtgtgctctgtgggtatggctggcagtgactgtaattctgtgtgacaagcagtatttacgggccttgagtggatagcaggcacatgggaaagtgggggaaggaaatgtcagttccccaccctccctactttcctttcaggccctcccaggtcaaggtccatggccttcaagacggccagggaggggttctgcctgcagctggcagcacaacaggcagatggtggtagttgggaggaaggggtggggccatcccacagaaggaaatgcatgttctggaaattttaacagctgggcctgtttgtgtggtggggggacattcccagacagctcttgtttagggttttgtcagtccttacctagctgagaggagggcagtgggacagcctacatcagggacctctgtcctcatgtccttctctgagttcttagggaatggaacttggcttcacatctgcttcctccccgctcactccccatggcactttagggcccttttccctgttttctcgctccccagtgtccttctcttttctccatctctgcatcctctgtgctggcttgtgtcctcatccccccgacacctagggaccccagctgctggtcctgtctcctccatgctggtccctggggatatcttttctaaaggacatctctaatcatataatctccctccctagcacattcaggggctagccagtgcctggaggataaagtccatactcttcagcctggactcagtgaccttcccagagggcgtcctcgcacagcgggtgacgggccccagcactcccacacacctctcctttcccagctctgcgcctttgcttcagccattgcctctgcctggacacccctccctccttcagtagtttctaatgtaagagcttctctaaccatctgctgaggtgctctcaagtgtcccgttctccaaggagcctttgttagtcctccctgtggttaattcatcgcttctgcactcagtgtcccttgcttggttgagatttttctttttctttctttttttgttttaagacagttttgctcttgtcaatcaggctgcagtgcagtggtgtgatcttggctcaccgtaaccaccgcctcctgggttcaagtgattctcctgcctcggcatcccaagtagctgtgattacaggtgcccgccaccgcaactcggctaaa

SEQ ID NO: 45292 - DNA, 568 bp, Homo sapiens
actccagcctgggcaacaagagcgaaagtccatctcaaaaaaaaaaaaaaagaagaaaaagaaaagaaagaaaagaaaacaaacacgcgctaacctgcaataaactagtctggtcagccagggtagggagaagtgccctttggccagcagccagccccatgccatggtcactggacaatcttagaccaaagccacagaccagaagtagggcagcgggggagggaaggcagaggaactgcagttgcgcctacttgcttatcagtgacctgcatgaaggaaactttccatgcacctctccagatcaagatcacatcgggcacccttgcatagttcaaaagaggaagtttgggcttggttgaaatggatgaagagcatacagaaatgtccagacagcgagaggggatgagggggaacctgaggcccggagcagggctgggccagccttcccaggcttgctgcaaactcagattctcctgtgcgcttcccgggaaacaccttgcaagaatttaaagacgtaactcgctcctggacagactttacaacctcaagctctaatgaggaaaatcca

SEQ ID NO: 45293 - DNA, 1810 bp, Homo sapiens
ttccttagaaataaaaagtgtcaagggaatgaatcggaggcatactttaggaagttaatgttagaagggaagccaagatttttttgtccaactgtctcattgtagataagaaaatagagactcagggagggaaaggggctggcctaaggtcagaaacaagtgcatggcagatgcagatttgaacccaggcatccaaattcctggtccagtactctagcgcggcctggatggagatgggtggtgaaatggatgggaagatttgtcagtttgccccagcacatttactatccttcccaccaccccgcccagcacattcaactggcccctgccaccaaccccctcattcaaagtacagacactactcattttacagacagaggttcaggatgtttttggatctgacatagcccaaaccagggcagaggctgtagcaaggggaggaagctgggaaagcctgagggtcagaggggagtggaggtggacaggatctatggctacggtttttcagccgctcagccgtgctgggccctcgatggcccgtgggagtgggagcgtttcctaagctccactgaagataagagcccaacccaacccctccccccacccctgccccttccttagtctctggagctggaacaatcaggcttggccatggcggctggtgctgataaccatttcttggcagaagtgcccgccaaagctgtggccctagtcctcaccaccacagagagccagcaaggccttcaggaagtctccggaggtgtcaccctggcagaggcagagagcagagtgagtgaaaacagtccttccagtctcaatgccccctcctcccggctgcccatctgtctggacatctccctcggcttctctccatgaccaacataggatcccatgccacatgtaggctactgggatctcccagacacataaatgtgaccacgtcccttttgtttatccccaggaagatatgcaagctcccggcctggcttcaaggccctttgggatctgacctgtgcagagctctgcagcttcacctgttcctttcccccaggagcatctcagtcctctctccacctgtcactcccctgtccaacatgcccctgtgcacccccaatcccatttgccagcagggccctctcctctgagaagcactctggccactctcttgcgtcaggaggcacagtgaactctggcctcccttggttcccctggcactctgctgataccctcccccatggcccttggcatatcgtgttaggtgatttcttatttgaacaaacaacattgagtgctaactgccaagccattgctgggaatgggtacaaacaccatcacgctcaccacacatcacagtggtctggtatacgttcagactggggaggccaaacttcctgacccatggtatggtatggatctcccttctgagggactcctatcattgttatgagacatggttttcgggattttgtttgtccttgtattttttgatgtatgattttaaaacataatatagtatcaaaatgtgccaacaatttacttacattcctactaagtctgtaagagactgcctctgagatgcccatagtctcgttagccaagtagaaccaagcatcagactttaagatcttggctgatctcaaagagcaaaaatataagctccatatgtcaaaaaagtcagacgcagccaggtgtggtggctcacacctgtaatcccagcactttgggaggccaaggcaggtggatcacttgaggtcaggagctagcaaccagcctggccaacacagtgaaaccctgtctgtactaaaaatac

SEQ ID NO: 45294 - DNA, 1504 bp, Homo sapiens
agagggagggcacagacatacacacagaaaagtggctaggtgaggacagaggcagagaccggagtgatgcattcacagccaggaaacaccaaggacttctggcaaccaccagaagctaggagaggcaggggagtgcttctcccccagagcctccaggaggacccaacccaggcgacaccttgattttgggcttttggcctccagaactatgagaataaatttcttttgtcacccaatttctggaatgtgttacaccagccctaggaaactaccaccgggcccaaggagcaggcacagggcatggaatgtgtgggcagccagagctgcctctgcccccagggagcgacaagcaccagcctaggagtcagagctaggttcgagtcccagctctgcctcttaggagctatgtaaatgtgggcaacgttttaccctacctaggcctgagtttcctcctctatcaaatgaggatgctaccacaatttcacaggactgccatgagggtcagctgtggtcagagagatgaagcccttggcacaggcttgacacatcgtgagtgctcaatgaatggctgtcacatttggagactgtagggtgagggtctcaggttccttcctaccctcccacctgcccaggctatctgcagttgagactccagtggctgagagggtggccagtgtggcttgggctctcccagaagggcaggactagactcagaggggagcgcttgtgacctttgatgactatttgtcctaggagaccctgtgtccccggatagattgtgagctctgagagggcagagactgtgtcctacccagccctgtgtgcctccagagcacatttctcaaccttggcatttggggctggataattctttgttgcgcaagcttatcctttgcactgaggttgtttaacagcatccctgttctgtccccaccagatgctggtagcaacaatctccaagttgtgatgaccaaaaatgtgtctggatattgccaaatatcctccggggcgggggaaggcgggggaaatcacccccaactgggaaataccatcctagagccagacaagggcagatgctaataaatgtcaaatgggaagaaacagctgccaggaatcctgatctgggggatggtgcacatctgtgtgtttgtgtgtgtatgtaagtcagtgcttgaagggaaaggaacgccagcatgttttcttaccttcatggatttgtaaagtttgtcggcaaagaagagaggcttgttcttgacactttgaactggtaggaagagcagagagatgcggggaacgtggtcagaggctgtgaacccagactctggaccggcctcccccatctccccacctcgtctatccctgcatgggtctgcagatcattgtcaaccccagggtcatgctcagacgacacctttgctccccttccccatgcttcctcctctggcccatccttaggcctggctctcaattggttgcaactctcttccttctaaggtgcttacag

SEQ ID NO: 45295 - DNA, 799 bp, Homo sapiens
tcacatgcatatgtaacgtgttttatgtatgagtgtgtgtcacatgtgagaatgtgtgtgtgtatagtatgtgtcttgtatatgttaggtgtgtgtgtcaagtgtgtgtgtggtgtgtgtgtgtatacaccctagttgtgcaggacagcgtgccccctcccctgcctgccccagtcttcctggttcttccctagcaacagttattttctcaccctctcctgcagcctcgcacagacctcatgacattcctgcacaatcacacatttggcagcacccctggaggcgaactgtgacagtgtttactttccagtagtagcttcggaggctgccaaggttctattcttccagagaatctgttcaagttcccagtgcccccagcccttcccttagtccctgccagttaccaatggccacaaatgcatccctgacatccccagacatctccttcttgatggtgtgctccacgtcatagttggtcatcttgatgaactcctggaagactggccacaagagaagccccagaggtgggggtgagcttcagtgcaggaggcggaggacccctcctcagccccacccagtgcctcccacaggctgtgcctgagaaagtggaagggcagcaaatatggccacagcccaggcctaaatgcattgggcaagatcatcccgatagagaagctctgacatcaaggctgccgtgggctcagagccaaatctgtcccacgccagtccccgtgcctggccaatggtcttagaacctcggccaagttctgggaacccaggctggggtagtaaaaggagc

SEQ ID NO: 45296 - DNA, 2081 bp, Homo sapiens
gcagtctcccccacttcatcccaggagtcagtctcaagaggccaggccttgggcttccctggcccctcctctgcacactcacatctacattttgccccagcaacagctgtggcccttatccagaaactgcaagtattttctgtatctcagcagatgctgccttaggaacaaagggtagataaggcaaagaaagatggatgagtgattgtcacagctgcagagggggatgaaagcctctgcctcctgccctccccagtcccatccaactcccagaatcctaaatcttagaacagttgaatcctagaatgtctgcactggcagtggcagccagttcagcagactttgctccagatggggcacaaagccttagagaaagggcttgctcaagaagtcccagcacatccggactgtaaccgggctttcctctgaccccaggccagtgccctcggcgtggctcagggcctgcctgctaggaggtcagggtccacaggggctgaaactggggcggtcattcacttcaccatgaagggctacgcaggtcaggatatgccatctgggtcagtggaagcaatcccaagcatgttttgggcaagggggaaggaataatggagggaaaagggcggactcttggggggaaaccagagtcctttcacaaacccgggagccatatgtccaaatttggaattgtcagagaagacccactagaatctagggaaaggaaggaggaggcaggaagccgtggccagattagttgtcccaaaggacctcctgccctttccccttgtagggcctacaagggttgtgccaggcttcccaaatctataatcaagactcccaaacctgcaatcattccatacagctgacaaataaatcagttttcaaagccattgtttcctttgaaagagactgggtttctcaactatggacttggagaaggaaatccaggctcagagagggaaagccaccgcccaaagtcacactgcaacaggggctgggattccgattcagggtattttgctcccatgctggtatatggggaattatttgaagcccccaaactttgggaaggcctagaccgcttaggggatgcagaaagaagggtagtgcccctgcctcaccataggaggcctcggagccccgttgggagactgcattcatagacaagcagtggcccaaaggggatggggtccaatgaggccctgaggtatgtacgaccggacgttcagctctctgcacgcaggcagccctcccccgacaccacacacaagccattttataagcagctggagggtccaacgctcttgctctcagtcttgggcctcagccacacccttctctgcgggtcctttgactggcgtccagctgaccccaaccccggaccttcaaagtctcttgagcccccccaaattaaggccggcaggaccagcccctggctcagctccggcgcccaggaccctcaaccagaccctctgcagcaacgggactccctcccctccccctagccagggcgccctccgcccgcgcctctccgccccgaccccagatttgctccgctgcgctccccagacacacccagtctgcgacactctcgggttaccgcgccctcccgtccctgctcctggcggggggtacccatcagccgatgactgggcgcttatttcttgtgtccctgcagcccccgggaaggggttcccagagcgactcccctctccagcctcagcccactcaccgcgcagcggaggcctcgggtcgcagacggacgcacgggcgcagggactcgaggacgcagcgctcgctggatcggagcccgttagcccagcagcaaccgcagcgcggggcggaccgggaggacagccgtgggctccgagccggacacgtggcgcgcagaggccaatccggcgcgcccgcctccctcctccaccccacccctctagctccttagctcttggaatcttagaatgtcactagcccgaggggcttgccgggagaacctcctcagtttccagcccccggatctgagactgagaaggattaggggctttggccaaggtcacgcggcccttcagggctagaagtcaggg

SEQ ID NO: 45297 - DNA, 796 bp, Homo sapiens
gtgtcttttacatataatgacttgttttcctctaagtagatacccatagtgggattgctggatcaagtggtagttctatttttagttctttaaggaatctccatactgttttccatagtggttgtactagtttaccttcccccaccagcagcaacactgtatttttcaagtgcaaaagggaaacaacctacacatccaggagctgtggaattgcaagcaagccggggtcacgcagccttgcttccaggtggaaacaaaccctggaaggaagcatacatgggttggaaacacgtgaagatgacatcatctttttggcacttcccaggccccttcctctgtggagtggcctgtctacaggtgtctgtaaaagagacggcatgatgctgtgatatgggctggaacaatggactgagattccagattttctcatgtcccttgtcagggctgtagtttctctgattataggagaagaaagttcaagatctcccagttgccctctgaggaagctggaaatggtcaaatattgccacctgctggcaagttccagctctgcctggcttccatcagaagagggtgtatgttcccagagacaggtcttacttcaagctcactagaggaaggggccccaagggatactgttcaaatgactacctggaacacccccttcctccacaaaaagtccccttaagacctctctcagtgtctggaattcctctataacggttgaggattgtttgtttttatacgagagaaaataaggagattctaacgacttggcatgaaacagattattttc

SEQ ID NO: 45298 - DNA, 973 bp, Homo sapiens
ccctggtgaagactcaatcctccctttccagggaagaggaggaagcctggtccaggcacgactcagagaagctgtcaactccggaatctggggaagtgacagcagccagcctccccaccctgggctggaggaagaagggagataaacataaatggttgtctcttccttgttgccacgactgattagctgaactcagacaatgtttttatgggagccagaaggcctagattctagtgccagctctgttacaaacttgggcaaatcccttcccactctggcttctgcttcctcctctgtgaggtggggatgaggacgtctggtggtttaactggatgatcccatagtgttcaaactctaagctctcatctcagctcctctcaacagcactgtgaggtaaaggtcactacaggcgaggaaactgaggctcagggagacttaagacactgtcacactgtgccataatgttcaaatcagcattagaaccaggtgtgagaatatcagagactgcagagcagagtggttaagaactccagaattctagaatcacacagatctgggttcaaatactaaatccaacaccgtgtgactgtatgacctctccatgcctcggatttctcatgaggctcttttaggatgagatgaaataatgcaactgcagtgtcttgcacatactaagagctcaaatattgcataagacgattgccatgtttcacaaacatggcaagaacaaagatcccacgtcatctgctttggcagacctcttgggctgcccctgggtctcagttttgtcatctgaaataagttcataatctcatgaaatgctgccttctttcagataaccaccaccagagaatggtggagaactcttttccacaaacagctttcagaccacaggcagcacgtggccttgtacttgagtccccagctcttgacaaaacaagataactccttcagaatggcagttaaggctatc

SEQ ID NO: 45299 - DNA, 1181 bp, Homo sapiens
ctttaaagcgtcatcacctgggcatattgttaaaaggcagcttctgtcttggcaagactgggcctgagcctgagattctgcatttctgacaggtccccagggatgctgatactgcgagtctgtggaacactcttcgagcagccctgagattatcagcctttaacccccggggggaggaagccgaaggcccagagaggtcaagtcacttgtccatggccacacagcgaacagccccagaccgaaagcagagggcacctgccacagacacacgacatctccccacccgaggcagcgggaatcagctgcctttccctggcccgggtgccgtgtttgtaaactcggctgcttggtgcggctcgggccggggtaaagggcgcctcccagcagagcctccctcgtctctgagctggcctctccaggttctccgtccggtatcccgggccgaccagagagagcccggggcgccgagtcctctgcggcggagcgattccgcactcccctctcctctgaaagcaaacttctccgccggcgccctttacctttttcgggggtttgcagctgctcagcctgctgtgtctgcagcccatcctcctccgggggctcccggacgccgcttcccaactccggggcccccagaggagcctgcgatccgggccccgctgcccgctccgcgcccgccggctggggctgccggcgagaccctgaaactgaacctggaagcgctgtcttgagcctgagctggggcggccgcccgccgtaaatacccgaagagcggggcctcagtgtagcccgcagggccagcggcgccgccaccagaggcaggtgaccagaatccttctaaataataggaagctctggtcagggcagaagaaaagaaaacctcaaggagcaacagatgcttttccgaaccctcagctaagaaagggccgggggaaaaaataattaaagcaattatttgataaactaacaactatcattcattgagggctgtttttgtcccagttgttttatacattttatttctatttcttgccatatcagtgcaacaaaggtattacttcctccattttacaggtgaggaaaatggtgttcagagatgcaacatgatttgcctaaggtcacatggctagtaagttaccacagcccagatagaatccagttcctttttttttttttttttt

SEQ ID NO: 45300 - DNA, 680 bp, Homo sapiens
tcagtgcagctggaatactgggggaatgcagagagcgaggaagatacagataggcagaggccttgaaggcctggccaagacatttttcctttatcccgtaggagtgggagtggtgtggtcagattggtggtatccaaggtcactctggggctcacgtggagaatggcgaggaagcgctgtgctgaagcagtcaagtatctactggaatagttcatgagagtgtgggtgaggatcccaaaggcactttggtgcaaaaggattgcagccttgagggccagctcaggccctgtcctcacagagctcccggactgatataataaggtaactacggtgcgcagcagtgtggggtgcctttgggtaggcggagagcagtttcctctactcttagcctgggaggcggcagctagcggccggcagtgttgtggttaccagggccttgggttacaacacatgtttgttttttaaaaacgttgcgataccttttaaatcagggccctggacagggtccaaggacagtagcaaggaccagcccccatggtgcttcttaaagaagcagctgcagaggagggacggaaccttgggaacctggatttctgggggaccctaagttcaggcagggcttggaagctgggcaaggctggacgcagcctccagttcaccccattcctcctcttccttcc

SEQ ID NO: 45301 - DNA, 1477 bp, Homo sapiens
caatctcctgacctcgtgatccgcctgcctcggcctcccaaagtgctgggattacaggcgtgagccaccgcagccggcaaagcaaccctttaactctctcaatttaggcaataatagattacctttcatgaattccccccactccccatgcatcacacagaccacctacgacatgcctggaccctctgactcatataacctttttgcatagctaggtgggttttctgtccttagccagtcaagtgggggaagggaagggaagaatttagcataaggtttaagtcacctgaaacgtgtgagtttgccctggatgagctgctgctgctgccaacccagacacaggtagggatctataatcagaaaggacagaaaagagtctttcacccttctgggcagggcagccgtccctgttcactctttggccttcagagaacactggagagtggccccggccagtttccctcaattaccaaggagctactaggaaacgaccagtgaaagactgaaaaagcaaaaaacaaacaaacaaaaaacaacaaaaaacaaaaaggaatagaactcagaaaaaagagagaaaaaaagaaaaggaataggactcagaaaaatgaaaacaaggaaaaagacttctcagtgaccaggcagtggcggtcaagtgcttcgacacggaagcctttcagtctcaccagagagtggccctggccagaaacttacaatttcctctgtgcttaggcgctgtccaccgagttgggttccgagttggaaaggaaaagagagagggagagaaaaattcccctgcattaaaagggaaatggagaaaaataaatcccaagctttgggcctaccttctctcctggctggcttgccaaaatatgttaccagtagagggttttgactgaaagttgtctaggttcttggcgtttttgaacaaagaattggagaaaacacacagaaaagcaagggaaaaatggagcaatgaaagaacaaaagcaagggtttattaaaaatgaaagtacactcaacagtgtgggagcgggccaagcagcagctcaagggcccagatacagaatcttcttgggtccaaataccccctagaggtttcccattggccacttggtgctcacctcatgtaaatgaagtggtggcccgcaatcagtctgactggttaatcagaggccgaagtgaagttacaaaggtcatgctcctgtgcaaacatctgattggttgtggaaagcaaccaatcaggctgaagtgaagttacaaagttgcacttctatgcaattttaacatataaactgaaatgtagcatagaaatcgaaatgtactttcaatttcccatctgctgcacagaaaaggtggggggttgtaaagagagtagcctctggtcctcttgttacttaggtgtggaaagttagggttttcctttcgatttagttctaggaagtcagcgtgaaatggccttaggttccctgcctgcaga

SEQ ID NO: 45302 - DNA, 1285 bp, Homo sapiens
ttttttctaaaagcaaatctccaactagtatattaacctgacaaaatcttggctgatggggtgtctaaaaagaagtcttgctctattccttcctagctgtgcgaccttggcagagctaacctcactgtgtatcagtttcctcagtgctaaaattggggaagaaaaaaaaaaagcattcccttgtgcgtccttagcatgctttcaagcagttactaaatgttagtttttataacggttataattattaaaaagatacggattcgtgaagtcaagagatcaagaccgtcctggacaacacggtgaaaccccgtttctactaaaaacacaaaaattagctgggcgtgtggcgcgtgcctgtagtcccagctagtcgagaggctgaggcggaagaatcgcttgaacctgggaggcagaggttgcagtgagccgagatcgcgccactgcactccagctcgggcgacagagcgagagtccgtctcaaagcaaaaaaaaaaaaaaaaaagacacacatatggggaagcgtaacatggcagagagtctgacatttttgtccggaaggacttggggatgaaaacactgaatccgcggtttcccaaaggtccttccaaaggtgacggccccggcacgagttcacaaaccacagctccgccccatcccctgcccggccccgcccttcccaggagctctgctccgccccgcccccgactccgctcggcccctcctcgcgccacgcccccgcccctcccgcgcgcgcagctccgccccgccctcgtgatcccgccccaacctcgtgctaagctcccttccgttccagccgccttcagccccgccgcgctcagttccgcccctttctcttccaactccgcctacgccccagagagggaaggccttgacacctacgctagagagacaggctccaatgaaaagagcgagggggcggagccgggaggaatcggtccaattctcggccgggaagtctctggccgggacggggcagggcgaacctgccagtgactggactcagcttctttgcgtaaccaatactggaaggcatttaaaggcacctctgccgccacagaccttgcagttaactccgccctgacccacccttcccgatgcagtccctgatgcaggctcccctcctgatcgccctgggcttgcttctcgcggcccctgcgcaagcccacctgaaaaaggtgagtgcaccctcttttaagagtctgtttgcagcctcctggcccagctacgggtgtgcgggtctggctgagatatgggggtggccact

SEQ ID NO: 45303 - DNA, 1330 bp, Homo sapiens
ccgaatctcagtagctcagttaatctttttatgtctgctctgctcttgggtcatatgttccgtgaggtttcttaggggtgggggatgaggagttaaaggtggcatcttcaatcgcaggtcaaagcagactttaataaatggtgctgagccaactggaaagccccttggagaaagttgaagttagacctgtacttcacaccatatgcaagaatgaactccatctggatccaggatccaaatgtaagaaaatgaagccatataaatacagaaggaaacgtggtggaaatatccagtggcaacaaaatattgacacatttgactacatgaagataataaaaatgcttagtaaaaacacaataaaatcaaatgactgggagaaaaatttatccagcctatataatagacaaacagttagtgttcttactatataaggaattaaaaattaagggacaaaggaccaaaaacttgatagaaaaactgggaaaagacatgaacatactcacgtaaagatataaaaatggctctttaaaatgaaatattcaaactaactcattagagaaatgtaaattgagataatactgagataccatttatcatctctaagactggtgaaagaaagaacaacacatttctgttaggcaaggctatagggaaacacactgtcatcactgttggtaggaatgcaaactggtatgacttctggaggggaatttgtcagtacttaacaaattgcagaagcatttaccctttgacacaaccatttccactgtgggaatttcccttgaagatgcacctccaacagtacaaacatacagatgcacaagattactcattgcagcactgagactgcaaatattggaagcaaagtcatgttcatatacacgagaaagcctgagtaaaccatggcaccaatggcatacccacatgatggaatattattgagctataaaaaaaatgaggaagatctctatgaatcggtatagttattttcaagatatattaaatgcaaaaagcaaagtacaaaaagtagaaagtggtactttgtatgtaagaaagaaggagatgtaagaaagcacatgtatctatttgtttatgcaaagtaaataaggaaagattggccagaaagtaatgagctgtctatggatggtaggtgggtttagagtagaaagaagggagaaatcataacggtgtaaaggaggaagggatggaacactgccgagtgtatctgagtatattttgtataactgtgagtcttggagccatagtaatgtttctcatgccccccaaaataattaaagtcaaccaggatatgaggagagttcaaaatgaa

SEQ ID NO: 45304 - DNA, 1498 bp, Homo sapiens
gacagtttttgacttgaagcctatttgttacataattgttaaaggaaaagtctgtaacaaggaggtaaaaggagaagcctagataatacaatactgaaatgttgccatccatttaaaaatgttactttaaaaatttgaatgtattaaaagataatgttgccctaccccacagttccatttccagtagcaaccacagatgatagtttgtgtatgcttctgaaaaattggaagttttaaaaatatgcatatttcttattataaaagcaatacaaactcatcgagatgtgtaaaagaaaatacagccagtgtaaaaattagcaatatttcacaaacccacaactcaagggacagtgctcttcgactggactctgccccatgcccaagatcaatgccctgttcagttcctattcgcagtccccagcgcccaggaacatagtccttccagcagtggcagtaataggtcgccaggtggtgctgtggagcagagctccggagctcagtgagaaaaaaggcgcggccgctcaagggagcacgtgacctcggcctctggcgtgggcggtgggatcacgtgatgaggtccggaagcggctgccgggcagcaaaggaggatggcgaggggctgatactgaacccgggaagggtgggctgtgctgaagccagagccggagccggagctggggccagaacccgagcagtgagttcctccactggctgccggctggcggcgctcgccgccttgggcaggacccacctcgccttcctcccggcgtggcagatgctccaggtcaggcactggatccgcccgggctgtgggtccgcgactccttggcgtccccgggccgcagctgcggtacgacgctgacacccctctgtgaattgggcgaagcgtggagatcccttgtccctcgcgctatctcccttgacctcgtggggttgggatctcaccgtcctgtttgactgacaggtgggggaaactggggtagatggtgaagataacccaaaggaccatctagggcgtctttcacgcttcgcacaggtctccccgtttccagcaaatgtcttgcccgctgcgggagcgctgcttgagacaggctcataatgggtctttgggtcagaactgcaaggacgctgggaagtcgtctggtgcagctccctcctaggacagttggagaaactgagcccttactccgggaaggggtaagggcttgcctaaggtcatccagtgagttaatcggagacccggagacctgcgactagaatgcaaatgttcctaagcttcagcagctgtttgcttttcgccacaccgcctcctgcgggaaacttcacctgtgaaaaggcactcctttctgtccctttctcttttagtcctctccctttttagctgtctgcattttccaccgctggggttggatttgctctgggtgtggttccctgtttgttcattatttttctgcaaactcatccttctgtaggtttggtttctaaccttcctgcattc

SEQ ID NO: 45305 - DNA, 673 bp, Homo sapiens
aagtacatagtagaaaccattgcggctagtcagaagcctttctgtcttcagcacttactagctgtatggccctgagcaagatatttctatgactgagttttccaatctataaaatgggactaatagtagtatctgcctcataaggtcattgcagctcaatgtaaagttacatgcaactaagcacttagcacactggattgtaatcttagctactcagtaaatatttgttttattcttagctatttttttagtctgagttttggatcaatgacattgcaagataagtacttgactcattttcaaagaatgctttgagctacctgcaagtaatagaaaatccactaacagtggcttaaacaaataggtttttgtttgtattatattgcaagaaacacacaggcagacagctgttggcttttgttcagtagctcagtgatattagggctggtgtcactgcagttcttttggcttctgcctcataaacacaatattgctgctgaagctccagacatcacactcactttcaaggcaggggaaaggagatggggtgatgctggctatgtctacattcccagaagccccatatgttttctttcctagctgattgctcctatgtttcacagtctagaactaggtcacacggccaccaccagctgcaaagaatcatgaaaaa

SEQ ID NO: 45306 - DNA, 968 bp, Homo sapiens
agaaacacaaaaacaaaaaactacagccaaactcatttgtttacttttgcactagaatggcagagttgagtagttgtaccagagaccctatggtttgtgaagactaaaatgtttactatcggtgccgtgtaaaaaaaaaagtttgctgagtcttgctctaggataaccagcagaaaatcaattcatctatggtttgtacttatatactgagccaaagctttgaagggtttgcaagatcaacataagagctaaatctactgattgtctattacatgtcaaattatctttgtacagtatctaagttagtcctcactgagcctggaaagagagctatttatcttatttcactcaggaggaaagtgaagttcccaagagttcactaggtagcttgcagtcatgtggcaaataactactgagtatggaatatgaacctaggctttcttcgctccagggaaatcttgctggttctggaaaagcaaagtacaccgccagccctcataaccctgactctcagcagaagctctgaaactagaaacacatttttagggagcacagttttttgctgcccaaggacctaaagtcaacagatacctgaaactttctgtcgctgactacagggagtaggtcccatcccccacagtataaaggtcagaagccagaaaccagcttctgggtataaacattacagttcagtgctctcctcctccacctctgaggggcaaaaataaatttgagggtgatggaaaatctatttcatggacagagtaatcacttctttataggagaatctcaagattggctctaccaccagatgcataactgggtagttctggttcctcatggcctctggggtcttttataaagacttataaaatgggtagattttaaaagccagtaggtttaaagtaggtttttaaagtcagtaagtgggatgattctttttttttttttttttttttgagactgag

SEQ ID NO: 45307 - DNA, 1499 bp, Homo sapiens
gctcacctgccagctccctaaagacaggatgcaaagacacatggcaactgtgggatacctctgggtatccacctggcccagagccatgaattaggcaccctgaagaaaatgctaaacaccacatgaccctaaccaagatgcaactgagatcagagcatcttcccaagccggtgtgactgcttttgcctggcacctcccatgtggtcaggcctggagagatggggagcctaaggataaggagctgaatcctggctctgccaacttcaacacgacctggaataagttactgggctttttatatttttatctgccaaaggcctcaattctttatataaaaaacgaggccacgagcaacaatatatgtgataagactgagtgatctgcaaaggcaggctaagactgacttcccagacacagccactgagcaactggtgactgtgcgggggggttcctgaacctctctggggctcatgggttcaggctgagaaagtgtctccattcagtgtcgcccagagttgatctgaaaagtaggccagagtgggcagggaaattaagaaaagcatgaacctctgaaaacctgcccggtccgtgaggaaataaccgggtccactcccttgtccagagcctccccaccgccctccttcaggccagctccgcgggcagggcagccaggaggaaggctcagggactaggcgtctcagttcccgctggccaccaactcccccatcccctgccccctctctggttctgtttctctgtgtacgcagggaaggtgtgggcttgtcgcccctggaggccttccagctccgacgttttgaagcctggctcccagattaaactcccttcggatcccattttctgaagggtcgcaaaagctgggggctgggtggggtaagctaggggacaacagcggctccggccgccgcctgagcccttcaagatcagcatccggtcaagcggctgtgcagccgagaagcaacccgggactgcaagtctgcgtggcggggacggcgcaaccactcaccggcatgactgaggcagcggcggtgtggcggcggtgtggcggcggtgtcagcagcgcctctctggattcggagggcgggttcggctgcgcttccgagagtgcgcactagaggcctggtcccggaggcccctcccactccgggcccggccgcgagggaggctccgccccctccagtcctgatccctgccggccgcgccgcctcctttctgcgggccgggcccgtggtcacccggcctggacggagagaggaggtgagaggggcgctgcgttggcctccatcgactgtcggcctttttcagaacgcctacttcgggtcaagcttgtgttagggaatgccagagaagggcaccgccttgaacaggacatcatccatccatccctaaaaggacagtttcactcatttattcaccgagtcaatttttattaagcgccagccaacgaggacgcagcggtggaagagcagcagcaggaggct

SEQ ID NO: 45308 - DNA, 3337 bp, Homo sapiens
agggaggctgaggcaggagaatcgcttgaactcaggaaggcggaggttgcagtgagccgagatcacggcattccactccagccagggcgacagaacgacgctccgtctcaaaaaaaaaaaaaaaattgcttggcaaaaagatctgtatcacttaaaactccctccaaaagtgaagggtagccatgtccctcatcgcgagtcacctgggttaaattactaatctgtaaatgttaaatttcgccaatcttcttagtgtttcaattcggagagtcatgttgtgaaatgccaatctcttagtccaccttttaaaaaactttgcaggggttctccaaggccctcagaataaagtccagattcctttgcagagctaacaggatacaggagactccctgctccaggaaacttctaggggcttctctcctggggcctgttccctggttttgggagcgctcgggcgaccgcgagccagagcagcgtctcgctcatctcggacccaggcctggggctccactgacgccgacggagccgggctgctgcgggagtggagccctgggggaccagaaggggctttcacttcgctcctgggcctcccgagttccaggctcgggctagccccgcgcagggaggcgagcgggcccggctccccagaggccgaggccggcgcccgtgctccttcagctcggcctctctcccccgacataggcgctccacatgcttcatttccaaaattctcagcaaaactccgcgggagaccctggtcacatgcctggaacgagaacaaaccggggcgtgtctgtgccggacggctgggaaccaaagctatttccatagaaatagggccggccagccttgagttgtagccccgccagtgcctgaaacgccaggaggaggggacgagttgccttttaaaggcgtagcgacgagaataagcccccacccgcggcaattcgaggctgaacaatagtggtgcagctcgggacgtggtgcgagggcccacactccactggagcacgcgcggaccaccgtgcctcagctgccacaaagggagcctcgccacacgcccgcggccgcctcgcagcgcccgccaagaagcgcctggcggaagggcgcactctcaggccttccaccggcgaccttccggcgggagcctgcgggcggcgcaggaacgaccctccttcctctgccccgcagcagtgctgagtaatggtgagagcagcaaggcccttggccgccgcacgtaagaaaaaagttgtaataaaaagaaaacaacccgggaaactttactagttggttcgccaggtacaaacctatgcggaaaaggcggggtacaggcctcggaggccggacccaaccagtcagggaaagaaagagggcagaagccgcaggctgcacagcctcacaaccgcccagagggcacggcggccctggggctcggtctcttccgagcagagcaacctccgtgtctatcagctccttccggcgttgcgattggccacaggctgtcttggcctctcggacgcccgcctcctagttgctaggggtttacttccccaaagtacacgggccccaccttgtggcgcaaccgctcctgcatggaaaacggatctccgcccaggggaagacgtgttaacgaataagagcagccccacacatttattggctactttgagtatcagtcaaagaactgctcactcgcctttctattgtacttttcggttattggtctctcttagtgccgatctgttactagggaaacgagatcctcacagtctcataggcaggagtcaaagccaatcaagagccacgccttcatccccgagtcagtgcccaattactgttcgaagagccctgaggacgcggtcgggattggtcatcccgtcgcccgacctggccgcaacaagttagggtgagtggcagttatatagaccggcggcggagcacgcgtgtgtgcggacgcagttgcgtgaggggtttgtactatcctcggtgctgtggtgcagagctagttcctctccagctcagccgcgtaggtacgccggggtgtgggcggggcagggaggccagaggactaagccgagccgcagcacttgtgagagggagaagtctgagtggcgctcgcggcggccgcgccagtcgcgtcccccaccccaacccccaccccaacggccgcaggcgcgcgcggcggacggacgggcgcgcggcggctcctcgctcccgctcccgtcccggctggggcgcgtggccgtgtccgccgcgtgcgcgtgctgcgtccaacggcctcgcggggcaggagtaagccgcggccgccgcctgggccccagggcggtctctggggccaggggtcccgcgcccagcgtttcccgcccgccaccctctccgccacgcgcccgcggcaccttttcctcccctggccaagggatccagtcggttcggaccagaaggaggctttcgtttagggtgggggcagcactaaagtctgattggagtcttgcggtccgcgcgtcgcagaagcgccttcggttttgcagagagcaaagagggagcagcgagtgcacggagtggtagtaacaaccaatgttctttccacgccctcactgtgtgtccggcactgtgcggagccacttttctgcctttcatttgattcttgcagtgagctggcgaggtgggtacggctatcctccttccttagcggcccaaggcacgggtttggagagcggggtcacaggcacgcacgggaagggcggggatttgttgacgccgggccctctgactccgagctccccgcttcccaagcctgtttttagtctttgcccccagagcacttgtccctcggggcagcatcagcctcaaaaggccacctgccgagaaggctgcagcggcatttgtacttgggctagttctgggcttccagggagacaagggttggaagtgggaatgtgacaaaggaaaagggtttgggcttcctttctacgtgtacttgtacaggccctgggtagatgtgccgccaccgtagcttctggaaaaaagtagggaaaacgatgagtaagtgcaaatgaacatggactgtgttcctcatcgggtttgaatctcagattgctgatgggaaattcccgccagcgggaagttaggctccggttttagacgttgaatttttttttctctactttttttttaattggaggagacttttgcagaaagaccttgagaagattcactttatagttgaagggaatgaggtgcaaagcgacgaatttaagatctcactagcatctgtgggttaaaatacggaattggaatagaaaggttggcgcccagttacagtatactatttggacct

SEQ ID NO: 45309 - DNA, 1361 bp, Homo sapiens
atccaaggttgaactatgaatttcccacaattctagaatagaggcgtgagctcagaagggcccccagattctaaattttctatgaaattgaccatcctaccaaggcaagctagtcaacagctctctgcttatcaaaataaaaaaaagagagtaattgcttttccatagggatattacaggcactttaaagacatgaaacatgtttgtctgcttgtagagaagcaggaagtattttgaataatggcaacaaaaaaaaaataaatgcacagagccagatcatttctcaaaaaaaaaaaaaaaaaaaaccaacacattctctatgctttagctgtccaaaagaagacagagttgctttcattttgctacttttctttattctcataaagctcattagctggcaattatgcaatgatatatgcagaaaaatggctacagtatagtctttgaattgtgactgctgagatgcctcagaatatactaatgaagaaaaaatgaaaattctcatgaatttgaaaacagtcagcttgaagccttactcacacaaatcaattcagcatactatgcttaagtactttgtgaatggaaaaaaggacacgttaatacctgatacatttaagaagtgaacagtaatctaatttccaaataatcaccacctatggttagtttcattttcttctcaaaggaagattgtatcgctctagttaagtgttgccatttttgtcttactggttcaacaacaacgatatcatcaccctgaataacttcttattgaaaaataggtgtagtggaaaaaaaataggtatagtggaaagaaaataggtatagtggaaagaattttaaaaagaaagatctcttaaatctcagttctatcacctgttacgtatttgaacttggacaagttccctaattactccgggaagttaggattaatagtgttttcctgaataaatgttttgagcttcataaataattaacacaaaatatttggcatttagctcactaaccattcagcaaatagagctttcctaattctgccttttcacctacattggtagtggaatgggaggaagtctttcttgtatggggcctagaccctgcaaattagtgctgcttgtaaaaaggtttcttgcattggtgtgccacctggctgcccctctagtcctgaaattatgggcaagatgtcacagttatttctgagtatgatagtttaaatttaggtacaaatgtttaaatctaagattgtgcttggctgataatgcttggagataatttcagggtatttgtacacatgtggtttaaagcaactggcttctcttgaaaagtcatggatttatctctcagtatcgttaaagagaaagctt

SEQ ID NO: 45310 - DNA, 443 bp, Homo sapiens
actgtgtattaaattaatatacattttcaattatgagatgctagcttattttatgagatctttgcatgctgtaatggaggagaaaaaaaggaactaataataagtattgagctcttgaccaagtcagccaccgactaaattttgagcagatcatatcacatccaggcctaagtttctccatcagttaagtaagcaggctggattagaatctttcacaatatttgatttatgatgcaatgggaatgggaaatgactagccattcccttgccaggtagaaaaaggtcccagtttattagtttgatttagaagccaatgattccaaacccaataactcttcagaattacttatgaaatttcaaaactataaaaatataggttggagctcataatattcctattcatttgtattccacattttgaaaactaccagggttatactcta

SEQ ID NO: 45311 - DNA, 494 bp, Homo sapiens
acccagtccatcacatggggaacgaaaaagtcccaccattcaggggttaattgttcatgcctaacagggactttagccagggaaaaatattaccagttactacccatattagagacagaatgatgatatgtcaccgtgaacagcaaactaaggatcagaagtcagatcataaatataaattagattttgatacactaagctgctctgcatatactgcgtgttgtcaggattatattactcagctgaggaagcctgtctagtgtttgtttacttggcctgtgatttgcaggtcattcataggaatggaatgtttcatggccaggtgctatgtgaagctagggattaattaacctgtgatctatgagttttaattattgttctcaagttttacctaatatttgccagtgactcttaaaaagccatgtggcctagcaaaagcatttgggactgaaaatatattggcagagacactcttctgtgttattccattgccc

SEQ ID NO: 45312 - DNA, 838 bp, Homo sapiens
tgggttctctagcgccaccaaactttgcagacttcacttccggtgggttcacatttgcatgagctctggccatcctacattgctctaccctgtaacatttgtgacttaactgcctggcttctgaccccatcactcctccacaccctacaacccacgtctcccttgtgctatattccccagtcttggctctgttcccagtgccctcagcctgctgccacccacggcacagcatgacgaaatgattccttcgacaatatttgcctttggaaacatagcccacgggcaagagatgcctggatttaaatatccaaactgtatttctctgcagcaggaattgaggaattgtgttctctagggtctttccaaacccaagtgcctgtgtgttcaacaggctctgtggtttcatgagagactgtggatgggattgatttttttctttagctcttccccagttgaccttggctgactgccctgtgtcctggtatccttctctaaacccgaacatggagatcccaggaaaagaaaatgctaaatcaaggccagtggtgatatttacttagaacagatggtgacacaatcctaagctttctcgccctgagcattactccaggagaattttctgggtctgatacagctgagaaaggatgaattcaggcacattttttccctgagcctgtctacaaaaagtgtgttaaaaactcattattcatttttaaaaatagagacctctacaatgaattccacttctatgttcgtagtatgtgaaacagcatcgtattggaaaggaaccagactaggtgtctggagatttgcattctacttccagcttgaaaaagtt

SEQ ID NO: 45313 - DNA, 947 bp, Homo sapiens
ttcgcgcattcctaccaacgaagagaaatttgaggcacattattttaggaaatttgtaccataaaaacaataggtatacatcaatgttttatcatttataatgtttcaaccttaatatgtttttgacactgctcctgctgcactggaggaatgttgtaatagattgttacataaccacttctcctggcaggtattttcccccttccttattccactaagactcacttgcaacgcaaagaccagggcctcatggaagaaggcagctgggcacaagcctgttgccatggaaagcttagggcgggaagcgattgattggtctctgcatacagagactgatctagaaggcttcagtgtgtctgaatggacctgtctgggctggaatttcagtcagtctgacagactgctaaaggagactcaggtgtacacttcagcaacttgataactcttccccagctgaaagtcgaatcatttgatccaacgggaaagaagctaaaattgtcctgacagctaaagagcgatctgacctttgtgatcaggaggagaatttcttgtgatacagaaagtgaaagtagaaactggaatgatggtattgatgatgaaggcatttagagcagcaggcactgccattcattaaaagattgcactgtgtcaggcacatgctttatcctattgaaccatcatgccaaacttgggacacttaggtatcattgtttttcattttccattaagaacttgaggattaaagctgttaatctatctgttcatggtgaaatgagtagtatgtggcctgggtttgaacctttgttatagctgcaattttttcagagcttttaattgttgaactacacggtgtttctggggctattcttgatctttgcacagtgtgggggcgaaagttggtccttttaggaattcaactattctctcatttagttatggccaagaaa

SEQ ID NO: 45314 - DNA, 1863 bp, Homo sapiens
caagtacgtggaactgcactatttagtgtttttgtaagtcttccaggcattgtgtagtaagcgtgtagaaataattgtagtttctcctccagttattttctcagttggaggagaaagattccaataactgtaaataaatacggctgagccatatttttaagaaataaaaacgcatacgcttacacacacacatatatattacgtatatatacactccacccgccccatttaccaaaatgaagagcagtacagcttagtagctaagagcacgggctctggagtttactttcttcctgtcctgcagcgattgtggggaagtcaggtcacctgtctgcctctccgtttcctcatctgtcaaatggagttctgggtccctataaagattcagtgacgcgatatgtgaggggcttggaacagtgaccggcacgtaaccgcccacaggttaacagctgctatcacttggtggggtgatggtttgtatcctatcgttattaatacggctgtctctagatgagcaaacatgcgctctcacttcttcccacattcaagaatggggtcccaaacgagagattcgacgtaaacgtccgctcccaactaagttctcaggcgctgacaacgacaagaattcctcacacaaacgtagcgcttcaatcactaaaccgctttcacagccctcgaccctgccgcgagatgtccgccgcccaccgtcaggtcaccgcctccctaacgacttcggctgcccgggccctgcccctgaacctcgcacccctcctgcctcgttcaggaagctccgcacctatccggccgccaccctcagcacagccacggcagccgactcggcgttcctactgccccggaagtgctccttcagcgcagaggcgtgccggtgtgtccgagaaaacttccgagttaagccgccgctgaggccggaaggagctagacggcggtcgggtaggtgacggcttggttggggtcgctgcgaggggactactaggagcgccgaggcgtgagtcgtagcctgtggcttggggtcgggagtgcaggaggcgaaaatgtttgccattcttttgaaagtctggcctgggtgtgggagttcggtcatcgaacacttactgagagccagatacctgccaggcactgccctgggctccagggacacatcagtcaacgaacggaagggccctgctctcaagcagtgcgaaaagcagattataaacaagtcaacaaacgggattatctaaggtggtagtaagtgctgtaaagaaatttagactggataatgtgatggaacgaagtgggagagtaataagccgtatgaaaatctggaatagagcattccaggcagagagaatagcgcgtgcaaaggccatatagtgggaacaaacttagcaaagtcaaggaaaagacaaaggccactggctagagcaaaaggagcaaggtgagaatggagagagatgaggccagggacttgagcccaaatcttgtaaggcttatgagcaaggataaagagtttgatttttgtttggaatccagtggaaaaccattgaaggtttctaagcagatgaatgacatgatctgatttatgactctaagattactcctgggacctcatcagaaagatgcaactcttctgttgccctcgagcagtgaaaatgcatgaaatccagactgacagagctagtaaaatattaaaatcaatcttattgtacagataagaaaaactgaatcccagagaggtgaagggacttagcctttaagaactcatgttttccaactccatttaatgccctcggaattatcatcttaattcccagataagagtaattgtcacttctaaaactcttcagatattttcctttgctt

SEQ ID NO: 45315 - DNA, 1236 bp, Homo sapiens
attacattcacccctttctaaaattctcaagcaccaagtttcaaatgcctcattcccacaggactttacctctttcttacaatgctgtctaggtaaatggtaataatgaaaatgatggtggtgccagatgtaatgggtttcttctccacgttatgattcatggtggtctgagggatagaaagagcccatttggataagcacagtagtcaagaactgaagtttatgcctgctgtcttgacataattattaatagtgcctttcactctcaaaagtgtcctggtttgggtgacaaactatttggtcatcctattaggagcacaggctttgaagtggatttgacctgggttcaaaccccagcctgtttcttactagctgaatgactttgaacaagttacttaaggtctatgagccacagttgccaaatctactgatagagaatactattagcactgagttcacagggtcatttggaaggactggccttgcacattgccaagcacatggtaagattgcaacgtgagtcacctccaattctaaagttacagagcatacattgtacaacttcatttgtggactcacctaggcaggaaagtagactcttgaggatgttttgcattggaaaaacctggacttgtaaccagacagactagcattcaaatcccagctgcaccactcactagttctatgaccctgggaatttaaatgacctttctgagcttcaccttgttcatctgtgcaatggggattaaaatctcagagttgttgtgaagggaaaataagataaaggtattagaaagcactccatatgaactcaataaatgctgcctcttatcattacatttgcccaggtacacatccagggttcactggtaagggaagaagcagatctagccctgtgctctttcagttatatcttatggtctctggggactgcattcttcttcctccattgatcaaaatgttgtcctaagccatcggcattatttcccactctaaatccttctcaagctctccccctctttatcatggaaattagaaacaagaaaaggaagcatcatgatgacatgcagctggccccagggtttttggattagaaccaaatttcatgtttgtggaactgatgtcaatttgctggctatgtgacattgggcaaattactccaccccactgagctgcaatttcctcctgtgtaaaaagaaaataataccctttgcagggtgagcagcaaacccaagt

SEQ ID NO: 45316 - DNA, 2007 bp, Homo sapiens
tcagcctggagctggaagaacttggaggcaagagttgccagaacgctggtcaaggactagtggcagctaggcacgaaggtcagcggctgagctagagaagcagagaatcaagaggacgaatgtgggggtggcagagagtaaggtagccaagggggtgctccgttccaccgcatcagggaggaggcagctaagtgaccagcgtcgagcgccccgaggaggagccgctggctggcatcaccgtcggagtccggctccacggccctccgcatcgcccagaagcccgactcctctgtcaaagccctcgccacagttacagacacattgcctggtctagtgaaattacgtgtttcatgtttcagctcccagacgtcagggctcaggtctgttttcatttcatcccagagcctggcacagtgtttggcacatagtggcgctcgccaacggtttgctgagagctttccgggaagggctcagtgcgcttaggatccaaaagcacgcgtgagaatgcagggcattctaactccaagggggttggacttgcgtgaggaaaggtgctgcagagaggctaccgtcacttacccacccgccggtttgcaggatctacagacgggcggcggccgggcacagctccctacagtttgcagagggcgttcacacctaacgccagggcccccctagaggaagaaaaccagggcccgcccgcggaacagtgagcgtgcagcacggctgtggccccgtttcatggccgggaacaccgagtcgccggggtcaaagtaggtccgcaggtcctgggggccgagcctaggtgggctggaagtgacagccccgggggctccaggctcagaacgcccggcggggccccagcactatttgcatatccccagggaggcagcaaaggttcggctgcagtcccgggcggaggttgccgggcggggcggcagggtacccgggcgagcggacatgcaccccacccagcggtgcccagcccgcaccagttagcgcccaactcgccaactccgggactttcgcaaagctccagagggcgggggagccgccgaggagtgggacggaccatcgcggctcgagaggggggaagcgctccggcccggcatcctgcagcgcccgggcgggccgagacgctccgtgagagggccgagcctgcagcgcagagactcggcggtcgacgcgggggcaggcggcgcggggcgggcggctcggcggggcccgggggcggtggcggcggcgacgaccccctcgtggcggcggcgtggtggcggcgcccagctccccggccggcgagcggcggaagtgccgcggagttggagcggggccggcgccgcagccgcttctgctggctgagctgctgccgccgccgggcggacgggcggacgcgcggagctgggggcggcgcggcggggccggcggggcgcggcggggctgaccggccccgatgaggcggaaggagaagcggctcctgcaggcggtggcgctggtgctggcggccctggtcctcctgcccaacgtggggctttgggcgctgtaccgcgagcggcagcccgacggcacccctgggggatcgggggcggcggtggcgccggcggcgggacaggtgagtccccccgttgctacaggccgggaacacccccttcccgaattcacttttagcctgtggttccttcctccaccttctgctgtctgcctcctcagagtcagctccgagactcttcagctcttcccattttccggatgggaaaattaagtcctgtcgggacttgtccagggtcccacgccagtcagagactgagtccgaactagcactcaggacgctatttctcaccacatgttaccaccttcctttctgtccccgtctggtattccttgacgtcttccagcggatctcttttgaaggatcctatctgcatccctgtatcccaggatgactcctgccttgtgccaataggaatgaagattctggttcttctatttggtgtccaggtcctctctgct

SEQ ID NO: 45317 - DNA, 2049 bp, Homo sapiens
ttcccagcataagctaacatcatctctgcctgcaccactgtgatagcctccttcccagcctccacccctcctcttggcctcctaatcccttttccacttggctacaagagagctttccaaatgcaacctgatcttatcacctccttatagaaaacacttgtatttctaaatgctcctggaggaaagacagaatcctcacccctgtccacctctcattcctaccagactttccctgcttctctgtgcaccacacacactgctcttccaggccctcctatgattcatgtttgctcagccacagaatctttgcatatctttacttttccctctgtctggaatgctgtgtactcctctttctactgagttaacctgtaatccaattttctcaagaaaaccttgcaggctggatcagatccccccagtctgatctgaaagaaagggactatctttgtaccatgtacccctcttttatggcctgccactgtagcttttttaatttacctgtagtttcggatgaaagtctacatttccccaccaccacacatacttctataagctctatgagagtaggaccccgtccgtcttcctcaccagtatatcctcagcacctagcacaaggcttgatttgtgcttgtgttcatcatacacttaagttgatggacagatggacagacagacagatggacagatggattgataggtaagagactcagatgaacattatcaaattattgatcagagtcgatttgtttttttttttttttcccagtgataaaacatttgggcacttatcctgaagaaagtgttgaaattgttcttttagaatggaagggaaaagctactgaaggttctatttgccctttagataacagacattccaaagtatcttggcttttttttctccctgctgtttaaaaaatcttttaatgagctttcatgccttacgtagcaaatgaccttttctagagccacctacaccaaacaaaggaattggagggttgatatggttctgcccttggaaacacaggatcagccctttgaaacaatggctcctatctgtgagtgaccttcccctcttagagaagggccagatttcagatttcagcatcctggtgttgagacaatggagttactggagtggggacaacagacacagccccattgctgattggaacagcaggacttgcctgacgtgggcccagcagacatagactcgtggttgctgggttgtaatgcctccttccattcataaatagtgccattcaggtttgattgttttctcatacagcttggtcctggttatagtgaaagttaagttttctcaaaacagcagcctactgaataggtgctagggttaggtcagcctcacttaagtctgactgtggggtaccagaatgaatgatcctcagcctatgaaaaggggacattttctctgaatgaaaacaaaatcatctttctccttgcatttctcatgggaggaggaggattctgagattaattgaaagtggaaaggtagtaacgtattttattcttggagttctacttcagcctgttccttgctcaaaggcttactgtggctgcccacctgccaagcagctcaaatgtaaggccctccaattctggtccagacttccttcctggtcttattgctcgtgactcacttttgcatcctgctcactccagccaaatcaggctccttgcccttaagtaaatatgcccttcactttctaactcgcattctttccacatactttccctctagctggattccacccccaacccccacccctcaactgctaccagttaaaatcctaccccttctctcaggttcctgtcaaagactctgcttctgcaggaattcttccccgatcgtcccaggtagaatttaatttttggcttttgtaaatatctatcgaatttatctgtacagctttcaaggcactatgttataggcttgtatgtgtgtatgtgtgttttccttccttaaatacttgtctcatagctgtttgtggaggccatggactaccttgttcatctttgtctctccca

SEQ ID NO: 45318 - DNA, 774 bp, Homo sapiens
tttaaacctcaaagcaaaatcatttcattgcctttgtagggttctttgagaggaaggtggaggggagccatcctaaaatttgcagcagagcctggtctctaacacagcctcagactgtggatgaagcagatgacctgctcagctttccttccaacattgctgtttgagcgcatacagccctttccttgttttgaagacactagccagctcagccagagatgctctttgccaagtctgcagtcttgggattagagtatgcactttaacaaatcttccttcttgagcagaatgtagttggcttgcttcaccaccattctttcctacctccaaaggctgccaggcctgctaaatagtgattaaacaaagattaaaattccatttgtgtgtgtgtgtgtgtgtgtgtgtgtgtgtgtgtttgaacactaatcgattcttttagtggaatgttaagtaaaagcatgcagataccagaagcagttatttagagcagccagtcaaaatccattgccaatttattatttaatgtgatttccacattgattctgccagtctcctccacacactctccctcacttcttgccatgttccttcctaacccctttgcttcctgtagcagaaggacatctggaaaccaagagaaagcaaagtagcaaaagatggttgttgaaggaaaataattacagcttttgtagacaaatctttgagcttacagaattaaagaaacttaaaattacctctggattgaaaaatccagacgtgatcttttacataata

SEQ ID NO: 45319 - DNA, 1487 bp, Homo sapiens
tcaagaccatcctggctaacatgttgaaacctcgtctctactgaaaatacaaaaacaaaattagctgggagtggtggcgggcacctgtagtccccgctactcaggaggctgaggcaggagaatggcatgaacccaggaggcggaggttgcagtgagccgagatcgcgcccctgcactccagcctgggtgacagagcaagactccgtctcaaaaaaaaaaaaaaagagagagactcagtctcaaaaaaaacaaaaagaagaacttcatttttctattattctagcaggaaacatgggattctggttttgatcatttagagttcctaatatgatcaagatggcctaggttgatttttctaaactcaccttcggcattatgtcacaccagtgatctgatcctcaaacctttagcatgcctaggaatcacagggaaggcttgttaaaatccggctcagtgggccccacccatctgcttcagtaggtttaaggtgaggcctaagaatggacatttctactaaattcccaaataatgctgatgcatctggtctggactcacactttgaaaaccactgtgtgagatcaccagaaaggaatgtacccagcatagatcctggcacagcaggagctcaggaaatgctttcttgattaaactggactgaattctcctcagcagagatgctctcgctgaggttcagtcggctctctgctttcaatggtgcaagaaatggctggttgatattgaattgtatgctttaaatgggtgaattgcataatatgtgaattatatctcagtaaagctgttatcaaaaagaagaggaggaggaaaggaagggaaaaaaaagaaatggccggctttccaagctgctcatcaaaagtgtccattatgcctgaaattgtcttacaagcggactcatgtcaaaggaaaacaaaggtcctctagctgaactctgagcttcctttcagctctgccactctctaaaattcctcctggggctctgagccagaaaaagtatgtctttcctgaagggctgatctgtttcccttttccaaacagtaaatgatgcttaaatgcctgtgcatttcacctgccaaaacccgtcctgatataaacatagctttccttctcaacttgtctttttaattttcctgctgtttatatttacctgtctataagtttttcaagcaagggaaagccttagacatcctagaggactagggttggaaactggtatttgccaggcagaatagagagactgagggcattgagaggtggtgtagttgcatggttaataataacagctttggaatcagaaatacctgctatgattcctggctgtcacctaccagctgtctgaaaacagattcacacaaaacttctatgagactcattttctctttgtctaagaaagttgtcacaagagagtggtcactaagagagttgtcacaagaatgaaatgaggccaggtacagtggctcatgcctgtaatc

SEQ ID NO: 45320 - DNA, 2581 bp, Homo sapiens
tatttccgacgatggctgtcccacgtgtgaaattaccagttcagatgctacaaatgcatttatggccactgagcaaaacttaagatcaccagccacctgcttctaaacatggaaactggtagctttcccttttacaacaggacacaaacccgaagctccttctatgccctctagtactaacacttgcttacctatcacctaacacagcctcccctcttccctgcccataaaacgctgcccagccctacataattacacgaccctgggctggtcccatcgcctttcggacctcatcagtccccatgctgcgcagttggagagtggcatgactgaagtgctggaccagagcatatcctacggcccctcctggaggggaggtggtgccctgggcgccgaaaccaagcgcagggtcttggcagggcgcagtcgcttcgccggtagacccggggactcaaagcaatagaactacagcttggagctccagggagagcccaagacaccgcagcccttccccatctagattccgagattggcccctgggccccactcccagccttcacttcatctcccctgaagccctttctcttgcccgcggctcacctagtccaccctccagacctcattcggacttcccattcttcccagtggaggggtcgcccaaacccctcggggtctcctttccccctctccttttctttccgcgccgtccaagccagtcccactctccacactctggaaggtatcggctacccccaatattgcgactgccttgcaagatccccccatcacctcctccgcatgtctttccacgtatctgtatggggttgtccctctgtctttcccgccatgactggctttccgtcctatttcacccacccttcctcccacggatccgcgagtcctctggccctggccctttcattttattagtccgcccctctcctgatagcacctctatcctctttaggtcccctcatatgcccctcctccaagtctgtccctcagcgtccccgtccgcgtctctactgtctgtccccgaatgtgttcctctgttcctggagtctggccctcggtccagccaggcccctgctcaccatccctcccccgggccggagagtctgcagcccggttcccggttctcgctggggtaactctttcctcttccactttctctactttgaacccatcccagcagagtccaggaagtagcctggcgccggagactggcggcggcgacgcccaatgggacgcgccagcggcggcggcagccccgcccagagagcaaatgagaccaatggtcgcgtgaaggcgggacttccgctgtcccgcgaagggcggggggagcgaactgttgtggtgcggagcgttcggcgggcggcggccgggcggcccaggggctgccgcgggactcggggcgcagccgagtggctgcaggggtggagtgggccggacgagccgcggggcccgggtgccgcgggttcgaggccgggccccgcgcgaggaggccgcgccaccccgggggagctgcccggcagcgagtttgccccgctgccgaaagaaggcgggagccggcaggggccttcgaaaccccctggcaacccaggcccggagtccttggggagcggctgtttcctgggacgccctcccggacacccccgctgcagggttacggttctgggcccccggcagaaggctcctccgggtgacccccggcggggccctgcgagccgcgggagccgaccccggggcctcgagccgggaggaagggggcttccggaggcggagggccgggggccgagggagccgggcctctcggacgcggggcagggcagcgcccgggctggagacggactctgggaccctcggctgcgggggtctcagcgacctgccccgcggcaagcgcggccgcggagtggcctaccggggaccctcccccagagggaccggcccggggcggggagatgaacggcttcagcacggaggaggacagccgcgaagggccccccgccgccccagctgccgccgccccgggctacggccagagctgctgcctcatcgaggacggcgagcgctgcgtccggcccgcgggcaacgcctccttcagcaagagggtccagaagagcatctcgcagaagaaactcaagctggacatcgacaagagcgtgagtccgcccccgctcgcgtctgggccccggcgcccccagctctccgtccgctgccctgggctccagtcgggactccccgggcactccccgccgtgggcctcgccgccccggctctgcagaactgagttggactccgcatttcaaaggccgctccagcgctgacatgctctgactgtgattctacccagatccgggaggatgggggcgggggcttcaggactcctgctgcctggaaagattggacagcagtttccaacttgttttattggtttagactttagagcagggagaggtgggttagttttgttggcccttgaaggagcaagaatcggagcggggagtgatgaagatacccggctcttttccaacttctctctccttctaggaaccctgttattccttcagacagagaaagg

SEQ ID NO: 45321 - DNA, 854 bp, Homo sapiens
gtggctggggcaatgttacaaattaacaacatctcagcaaagcaattgtttaaggtacaggtcaaaatagaatctcttatgttttccttttctacatagatacagcaacagtctgatctctctttcttttccctaaaagtaatgattttatattgattacatgttaaaatgtaatatttttatatagtagatgaaatatcttattaaaattactttcacttgtttgcttttatgattcctaatgtggttattagaatatttaaaattacatttgtgattgcctttatatttcccttggacagtattttagagaatgcagtggtgagaggaaccagcctccctgaacttgaggtcatggccctgtgacttagaccaggcctctcatcctctctgaactttggtcgctttgtgttaaaaaaaaaaaaaaaaaaaaaaaaaaacagagataaatctgcccctgtacatcctctcagtgctattgtgagaatcaaatcaaataatgcacacaaagctgttttataggctgtaagaataattaagagcaacaattgcgtatttttagcttttgctaggagccaggctcagtgctaagtgactccacgcatttctctcacaggccctatgaggcaggtaccagtactactcccattttgcacatgaggaaactgagtctgaaagaggctgagtgacctgccccttggcccacagccagaatgtggcactgccaggatcccaaatcaggctgactgagtcgagtgcccacatcctcaacccacagcacaccaaagggaaaaaaaaaaacaaaaaccaacctacctactgagatttgaaaagccaaaccccaggcaggccgc

SEQ ID NO: 45322 - DNA, 1751 bp, Homo sapiens
caaatttggtcatttcgtactcgtgatgtccttggtcaagggctctcctctgggccggtggtggttgcagagagaagcccccgccgccgtcgctcctcgggaaaggaagtcgcgggtgaacaaccgaatatgcgatgaaaagggcaaagtaagaaagcgcacagcggcccccgccccgtggagcgctcctttggtcccaggcgggaggcttgctggagcccaggagctggaggctgcagtgagccgtgttcgccccactgcactccaacctgggcggcagaagagcgagacctcgtctctaaaaaaactcaagaaactaaaaaaagaaagcacatctcttccagcagaaggctcccggaggcccgggctgaggaggaactgggagaatggggcagcaaagagaaagggagagcagctttgcctctgaggcggccttggccatttgctgtagggcctcgctgccttcgcactggggccacctgggtgaagtttaccctggctcccgcctgctgcaccgtcacctccggcccctcattacggaaatgaagaccactaaggagcatgagcgtcgtaaccgcccgcctggggttgacttctcttggggtgatcagccacgtgaccctagccacccgcctcctttacactacgccccaggatccccggcggcagagataaagagctggactttagactcagacgaccgcgctcttaaaccttagatgacctcatcccagccaggtgatctcgcaagctcccgacgctgtgctcagctcctgtctcctgcgcttgggtaagcgcttcttagcccggccccgccagggttacgcggaggattgaatggcactcttcccacactgtgcctggcgcgtccaggctcggtcacttaaggctgctttcctgaaccaccgcaggtcccttttcccacagccgctcgagtccccgtcagcagcttgcttgccctctcaggacttgtttgcagggtgctaaaatggcactggggctgtggtggctggcaaagcaccctgcaaatattaatcccctttccatccctaaaactttgagacccgccatttagccttacggggcccggtttcctcctctagaagctgaagataagtgagacacttccacatgaggttgtacatttactattcattcagccagccgttttttttttttgaagtgctgggcacagtgtggtctcaggcaggccctacccatgtcctcctctctctttcccctggcgggtgtgcaggcccctggaggttcccagggctagtctaggcaccagaatgctgctcggtgagaaatctcagagcaatgtggaagcttctaatagagctgtatttactcaaccacaagggactagcctttattctgaaatttcctgtttgtatctagttgttaaaatgtccatttcttttatgaaatgatggtaaccagggctgggagttttcttttttcttatttatttattttgaattgagacgaggtttctctatattgcccagactggtctcgaactcctgggctcaagcaatcccccagcctcagcctcccaaagtgctgggattacagccctgggccactgtgcctggccgggagttgattttctaaatgttcttgggttaccgggtgcagtggatcagcctggctcagtggctcacgccccaggtaatcctagcactttgggaggcgggcggatcacctgcggccaggagaccagactggccaacatagtgaaaccccgt

SEQ ID NO: 45323 - DNA, 497 bp, Homo sapiens
tgagccgagatgagatcgcaccactgcactcaaggctgggttacggagtttgactctgtttcaaaaaaaaaaaataaatagataagtaaataaatgttatttagcaaaattaaaagttgacaggcaactccagtgtgacaggaaggctctagaatggccttccgcagtcccctcctcctgatattcaagcctttgtatgatcccctcccctccagagtggctggggctggtgacttgcttctaagaaacagaatgtcgcaataatgacttctgtgattagattagcaatgactgtgacttccatcttgccagctgacttttgctcttcttggcttgcacactttgatgaaacaaactgccacactgaaaaagcagccaggctgggcgcggtggcccacgcctgtaatctcagcactttgggaggccgaagcgggcggatcatgaggtcaggggttcgagaccagcctggccaacatagtgaaaccccatctctactg

SEQ ID NO: 45324 - DNA, 1599 bp, Homo sapiens
tcctcactgtccctatcaggtaagagctatgattttccccattttacagatgaggaaactgaggcttagggacgtggaagcacccattggcataaaaagcatggcatagtgggcagtgcagacccaggataaggtcagaaaaaccaaactaactggcatgggggggttggaggcactcctagacccacaagggatgcagaagcaccccaggcagggcccagaggcgccaggtaggacccacagcagtgaggctggcaagggttttcccagagagggcaacctgggtgttcttgccccacctctcctggggctgccggtcctgcccccaggaacatgttatctgtgtcctggggacaaagctgcagattctcaccagctgaggccttcctggcaggtggcgtccaacctttggacatgtaaacagccttggcctgaccaggggtggcccagcttggccttggggcctgcagacctgtgcatgcccaggcaggtgtgtgtgaatatgtttagggccataagggtgtgtttgggtctccacacatccacttgggattggatctgggggccaaggacatctcattcatcttgctacctccccataccctggggaatccccaggttacttcctaaaagaggaccaggctggaaccaagaaatcccagaagaacctgaggaccagagaggggctgacatgtgcctaggaccacacagcagacagagccaggtccataaatcgctctgctgcagaccctgaccctgctggtcctactgcctcccacccaccacctgcagctcctcttatctctggggccctggagcctgctgattcctgggacagggcccaccctccctggggggaccagatggacgggactgcagggcctgctcaggcctgataagggacttggctcaggcctttatcagtgggacttggggctcccgacaggcatgtgtccccgtttgggagaggaagctgtgaagagagggtgcccagcccctgagcaaaagagataaaggacagagactttttaaaatacttttctttttgttttttaatctgtattgctttctctgattacaaaggcaattcaggcatgttacaattaattagaacataacaaaaatagacagtatggaaagtgaaagtgcctgtaaatctgccttcagacataatccccaggcctggtttggggtcatttctccagatttctttctacacataaacatggtcaattaattaatgaattggaatcatatagagcacagtgtggtggctcctagtgtgtcccaggtcccagtcatgtggctcctcagcttcaaacccagacacattacttaatctctctgagcctcagttttctcgtctataaaacctcgcacggatattgtcgagagtaaagaaaattacacatgccgggcacttcatggacctacacccagctcagtgagctcttgataaatggcaacgtcaccagtgtcatcacacaacctgcctttatttttcacttaacaacctaatgtgtgtttttcttttaattacaaaaaaaaaaaacaaaaaaaaaaacaaaaaaacaaggacatctttctatattagtgcct

SEQ ID NO: 45325 - DNA, 1887 bp, Homo sapiens
agccctcacctctctctgtccccctttttttttttgagacagggttgcccaggctggaatgcagtggcacgatcttgcctcactgtagcctccgcctcccaggttcaagtgattctcctgcctcagcctcccaagtagctgggacttcaggcgcgcgccaccacgcccagctaatttttgtatttttagtagagacggggtttcgccatgttggccaggctggtcttgaactcctgacctcaggtgatccggccgcctcggcctcccaaagtgctgggattgcaggcgtgagccaccgcgcccggcccctctgtccctttttgactgcccagtcccccaggcctccgctggaaggcgctcactaaaggttcagagtccgaagccgcattcccgggcaccctccccggcccctcccatcccacagaggcaggggtgggtccgtgggtgtggcaatgaaccacgtgtacccacgggactctcgaagtgggggaggggaaggggcgcagcacgccaccctcctttctccgcccctgccctaccctctccgctgttcccccactgtcctcccccagcccagcccaacctcagccggccgcgggaggaggcgggagctggggcttcgaactgccccctcccacctccgcctctcccccgtctcctctccccctttcctctttctcctcccccatcccacttctctctccttttcctctttctttctcccctcctccctccattccacccgcctccttttaccccgccctgccagtcgtcctccccctcgccccctccgcctccctccagctccgccgccagaggctgagtcatcgctgctgcggcgctgccggccgtgctgggagagcaggcgagcaggtagggagggtgtgaagcaagcgacgccgtgcgacccggcaccaccgtctgggccctttcccggagaggcctggggagggggcaccgaaaggggcccgggccgcggtgggggacgggcgacgggccccggaaaggcacagatcttacccctcaacccccatccttacaggagccgctttgcagcattctcagccgcacatgcaaattaatacctaacattagggtggcatctgggccaggcaagtcaaactgacggcccacggacagatctggccggcacctgatatttatttggctcacacagtgttgtgtttgtttgttctgaagttttaactattaatagttgccaatacttaaacatcactcatttcttggaaaatcagattcccaactcaaaaaattagaatatatgtcaacgtatttcccatgataactctagcctatttctgagtggggatacctttgtgtagtcagggcattgcaccctccctacctgctcgccctctagtttgccacagtctccgctactccctactgtttcacctaggccactgaacttcctttgtgtttcctgccaggcctcatatggaatgattcctagtctagtccaccccattcatattttacatggggattaggaagtgagggtagggcatttcccaaagtcacatgtggccttaaagctgaaggggaaccctgcttttcctcacccactaatcttttctaccaaaccattctgactcctttggtatgcaggctaacatagggaattcttttgtgaaaagtgtgttccagaaaattatctggggatcagagtagacctcaaatgggagatgatttggagcatacagcacctcgtctttggagttgatggtagcttctcacagtctttcccttggagtggaaatagatgacaaaactagggtggatagatgaatggaacagttggccaatctggtatatttggttataagaagttgttttcgggtcattggaaacctggcttatgagaca

SEQ ID NO: 45326 - DNA, 527 bp, Homo sapiens
tgagccactgtgctcgctctgagttggtgttttcttttgttttttgtttgtttgtttgttttttgtcttaatttagtgccaatggcaagtgcctcacttgccttacccttacctgggccctataaaacaggtcttttggcagacagctaagtaacgccccattgccctctgggaatccctccagatcctatcacttcgtttgtctgacagaattgatgtttacttggtctcaatgtgacattgcttttgtcacctgacctgcagagaggtttgcattttacagtggatatttgttttgctgacccagcgaaagtctcccttctggcaacagcaaccatatgttgcttgggaagcctcccctccccatgttcagagctgactccagcccatagggaaaggtgggcccatgactcagctctgccagtcagaccccctggtcacagtgatgggccaggaatagatatgtgactcagttacagccaatgagactcaattctggggatatggtccgaactttggggagggaa

SEQ ID NO: 45327 - DNA, 514 bp, Homo sapiens
ctcctgagtagctgggattataggcgcctgccaccatgaccagctaattttttatatttttagtagagatggggtttcactatgttggccaggctggtctggaatgcctgacctcgtgatccacccctgtcggccttccaaagtgctgagattacaggtgtgagtcactgcacccggccaaactttctcttttatctgtagtagctgagaagttaggatataagccaccattgtggacctgagcctttttgtgacaggagctcccacagacacagcaggattgagtgatggagacagggaggagacatcctgatgatactgcttgagccactgggtctactgtgtacaaagaagtctaccctctggacttaatgggtgcatgggccaactcttgcctaaatggtttgagttacgcctctgtcacttagatggttcattccctctcacctgcattctggccaggttggccccaggagatgtttagtggagcccagcacctatcactagagttctg

SEQ ID NO: 45328 - DNA, 591 bp, Homo sapiens
agcctcccaaagtgctgtgattacaggtgtgaaccactgcgcctggcctacaatgttgttaagttcaggtgacatttcagcatttctctatggataaaacaagcattgttgccttgttgtcaacattggtagactcgtcaacctggattgcgtaccacggtgactcattaatcctctgtaacaattgtgtctcaatatcctctgccagttcatcaatttgtccagttgtggtgctagccaaaagaggaacacgtgtcaccttttgaactgcagcctctcccaaaagttcatgacaaatgtccttagcagcaggcagaatcaactcttcaccaatagtaaaggcttcttagctttagcaatgcagttagccactaagaatgatgctctcagtgcagacacatttgatgaagtggtggccttcaataattgcttctgctcttcatgttcacattcttttcttttgaaaactccaaaagcttgtcttttgatgcagggtgcttggcctccatgtggtgaagcagttttgaaggtttcatggcttcattggatagccagtcgccacatattatacaaagcaggcttggagaatgt

SEQ ID NO: 45329 - DNA, 1100 bp, Homo sapiens
aaccctggtgagtcctagcactctgcgtttcttgaacctcaggacagcagggtgtggtaggaagatccttctccctaggggcagaaaccttgggtgctggttccagccctgctgtgtgaccctgagcgagtcactccagctctctgaacctcacattccccatctgggaaaatgaggagctcaaattccactctcagctttcctcttctattgttttcccttgtcacaccccttgttctgaaagatttaagtctgtcagctgcacctgttacataataatttgttaattggttttcctcttctatgtgaattgtggccctgtaatagccaatcagtgttttttggttagcagacacaaaccactaaattgatgcaggtttagccaaaagcagtgtagtattttattctgtctgtgagatcttatctagagtcgatatttgattttcatttgaccttttgaaatatgagaaatagagcatttgtgagtaatttccagggaatggggtccccaggtggggaactcctagatctagtttgcatggggtttataaggacaccagcaaaatcctgccttcacgcccaagctgagctttggtctctgcagtgctgcctcacacacagggttcattcttgaaagtgaaagctttggacttaaaaatttcctatgtggagagactgctcccaggagtccccacagtgagtttaccccacctctagctggctgaggctagggaagcctggttgggggagctgaggtctccctcagccctctgttagggtgtggccaggagagtgatgggaacaggtaggtatgaacacagggcctggaggccaggaatatatggtagataccgcttgtgctgaaaatcaggagctaggcctgcagttctggttctgcactgactagctctgtgacctcaggcaaattgtttacctctttgaactcagttttcccagctgcaaaatggggattgtaatctgggcaatgcttgcctaccaggattgttcttatgaccaaacaaagtctgttccatggaagcttagattccacagattttaagataaattcagatttaaaaatacattttgggattgatgag

SEQ ID NO: 45330 - DNA, 818 bp, Homo sapiens
taatgtgataaaagaattactgattatgatggaatcgtggctgcttgtttaaatccttttactttaaaaaaataccatttactgggactttttgaaatgtacaatcatataaacaaaaagaaaggggaaatagctcactgagtcatggtattttctaacgactcgtgggatgggaacccagtcctggaatgtggccccattggaagcagcaggataatacaatggttagaacaggcatgttggagtagaggatcttgggctcaaatatatactgtaagacctactgatgaccctgggtgtaagtcacttttcttttcaaagccccttctgtgcagtcacttgagcttcagccaccctgttctctcctttcctgcagctccctgctgagtaaataaatctcagagaatgttggtttcaagggttgtggcagcaccctctctcggggtagagcctatggtagaaggagtggagtgaaagtgaaagccaaaacagtttctaggaatagggaactcaggcaggtatttgagtaacaatgtgtgtgagcgttgtgtgcgtatacgcatgtgtgcatgtgcacaggagctaatgaaattaaaaatgaagccgggtgcggtggctcacgcctataatcctagcactttgggaggctgaggcaggcaaatcatgaggtcaggagtttgagaccagcttggccaacatggtgaaactccgtctctactaaaaatacaaaaaaattagctgggcggagtggtgggcacctgtaatcccagctactcaggaggctgaggcaggagaatcgcttgaacccgggaggcaga

SEQ ID NO: 45331 - DNA, 763 bp, Homo sapiens
caacactcagtaggtggcagttaacagtaatctacatttattgctctcccattatcaattaacagtttgtaattctcccaacagcctaatgaggattctccctgttttacactagaggaagcagagacacagagaggttttatggcttgctcaagctcacacagcaagtccgctgcagagctggaattccacccaggcagcctggccggaagcccaggcctttcacccctatgctacactgccttgtgttacaccatactgctgattaaagaactttctaaacaaagccattcattggtgagatgagcagctctgaaaggcactgagggcccctattctgagcacttcaagtggaatcatggtggaggcatctttggaagacagttaggtttaaggcaaaggactgggccaagcatcccttttaatccagaaatgaggggatttgatgaaatctcttgcagattctagcctttcaggtcaggacagtgacaagtcctccttgcccctgggcttccagattgaaaatgttttcccagcctgcccaccatcctctcctcaggggcactgggatcaagtgagctgggagaacaggtggctgtgcatggatcatcctggaaatctgacagcatggtccccagtccagggactggggaagaggaacagcagaacactaaattacagggtgtttgttgcttgattaaatcagtgcactcagtgcagcgcggtggagatgcaacacgccaggctcactcctgggcttgag

SEQ ID NO: 45332 - DNA, 5231 bp, Homo sapiens
acaatgactgcactccagcctgggtgacagacctcatctcttcaaataaataaatagtgcatttcagtggcaatgtgcaataatttaccttctgattaagagtacatgtaatgaacttagtagattcctggtttaattcattgagtaacattaccttccttggtagctcttttgacgtactggcttgtctataaaatttacacagcaccttgactaacattgtctcacttgaccttcacatgagctcagagggtggaagcaagtcaggcattatttacccccatttttccaccaggagaggggtccagggaagtgcggctagctggccaaggcttggaggctgaataacccaagagttggaagtagacatggcattacctggctatccctaccagtacttctcccccatactggttacaacaatcctacagctcagctttgctggctggggcagttccaagaggcttttcattcagtcttctcctagatccagcaggtcgtgtgctctaattcttgttttggagatggccaacattccaggctgttatgttatgtgagcacgtgggatcacagccagtcagaagccaggacttctccaagtgaagtcataagcaccaaagggatcttgctagacacgcagatttctgggtccagtcccagaccgagcctgattcctaatactttggcatctgcgttcaaagaagtcttcccttatcacccaaacaaaagtagcccatctagtctaactgattaccacagtttaactattgtcttcatagatactagacaataatttattacttgtttattgtctctttccccaccttagaataaattccatgaggatagggactttgttagcctagtttataccaaacccgtttcctagaaccctgcaaggcccccacagtacgaggtcagtaagtattgaatcgaatgtacactgaagtttgaaactgctgtcatacactgctccttcattttacaatagagaaactgaggcccacgaagctggaagtcactgctgcagagatggtaagggggcagggccaggataaaatctcagatctcagaagtcccaatccagggacggttcaactccgcccaaagcaattctttagaaaaaaaacgacatccacttgaaagaaaagacatttcctgcccataaatacaaggtttcgcggcggggagaagggcctggcctgggtgagggctttagtaattccgttcccacttcctaggcgccggctgcccgcaagggctaaagactcgctttccaggcccggagttgaacccatctccgggtagtgtcgaggccaggcccagcggcggcgaggcgcggagcacaacccactgaggtgcggacggctcacccaaccaaggtcacccgggcggggaccgaaggggccaggcccgccgggcacaggggagggggcggcgttggcgcgtcctcggggcggatgagggtcctcccttcggcctcctagaagtcaggaatgacactaatggctccttcccctgaatctgacacccagcctaaagagcacgagcaggcccggcaggccgcgtggccgggtcccatgtgctccacctgaggccgctctcacgcgctggccctttaagatacctcccctcctcgcccagccttctctcctatccccgtcagcgcccccaccgacaactcccgaattgcatcaggcacgtgctcgcccccgtccggtctgagcgtccctacccccagcccgggaggtgctctgaggaatcggagacgaggggcggggcgaggggcaggaccgcgtagccgtgcgcgcgccgtcccgccgcctcctgcccgcccgtcgcccagggcccggccagcggcgcgcccccgctgcgccgtcccctcccctcgcccgccgcgtcgtgaggcgcgcgcccgcccgccgcctgccgcggatcgcgtggtctgcttggctcgccgcgcctctcccccgtccgtccatattgctgcagcccccgagccgggaagcccgggccgccccgggggcgggggggagggagggacgggactagaagcctgccgggctcggggtgggggcgtcttgcgaggaacgggcggggggggacgcacgcctaggaggcctggactgcagagtggggggccttcctccccccccgccccgctagtgggcctcggatttacggcggctgcatctaactgggagggggccgcacctcgcgtgaaccccgacccttctctgcagggactggggcccagcgccccggaggaaggcgtcgcgggcgctctgctagccaagttcgaggcgggggaggcagcctcgggcgcgcccggcttctccgggggggcgggcgcgcagatggccactcaggtggagccgctgctgcctgggggcgccacgctcttgcaggccgaagagcacggggggctggtgaggaagaagccgccgccggcgcccgagggcaagggcgagcccgggccaaacgacgtccgcgggggggagccggacggcagcgctcggagaccccggccgccctgcgccaagccgcacaaggagggcaccgggcagcaggagcgcgagagcccgcggccgctgcagctgcccggcgccgaaggcccggccatcagcgacggggaggagggcggcggcgagccaggcgctggcggaggagctgccggagccgcgggcgcggggcgccgggacttcgtggaagcccccccgcccaaggtgaacccgtggactaagaacgcattgccgccggtcctgaccaccgtgaacggacagtcccccccaggtgggtctccctccttgccctcctgggtccgggggcctcttccggggacatgggagtcccctcccccagcacctccagggccccggggtctgctaccggtcatggtgactcgggactttttaaaattgcctcctggttgatcctggtcgccgcgccctcccccccaccgtacactcagggacctgcccctgcccgagggcccggcctccgggaggctacggccaccgcctgggccgcagcggttagtgggcaacggtgtggttcgggcctacctcgtcggcagagggtgggcgctggtttcagtgaaacgatccccaccgcatgctggtgtaagagacggtttctggtttgaaccttcctctggaagcccctcttcccaccccgcccggcgctccccgttttggtagcgttgcgagcgtccccatgttgtaaatgtttaatgagcatatgtcacgggcaacccagtgcccggcgcggagtacatgctggccgcacggatgcggggattaaaagttaacaagttttgttctcggggagatgaaattgggctttagaatcgccatttggagacgggttgaggggtcagttgtggggagaagaaacccatcgtgtcatcgaattcggtggtttccctccccgatcccgggcaccttccgccttaagaaggagcccgatggcgagtgtgctgggggagccagttaggaggttggcggaaaatgtgaggcgggtgaggggcctgcggcgacttgaggggcgtgtggcggcgggggagggagtggccggcctgggcgggcgggtgacagttgggcgccatgcgccgcgccggcggcccgcgggccgctcggcctcggcgttcggtgcgggccgcggcgctgggggtggcaggagggtgcgggcccgcggcgcggcccgagtgtgcgtgtgcgcggcgcgggtgtgtgcgcgtccccccttcccagcattcctctgcagccgggacaacgtggtgcctccccgcgcggggagcggcatgtgactgccgaccggcgctccgcgagtcctccctctccctcctccgcgttttggtccttttggaccgtgcccctttccggggggaggtaaggggtgcaggaaatcccagcagagccgtgtcagcgtggggggagaggcggtgcagaatatggagtctgctcttgcattgcctttgccgagaatagatcgtcggcttgggtggggggggcgcgcccactctcctctctcggccggcgtatagggcgggtctccattctttggttttgggtccgtttgtggtgggtcggttttaaaattgtcttgcagttggaatgatggcctctggtcgtagccctggtgcttttaaaaaactcacctgccgtagctggttgaggctaactggtttaaaccatcaaaaataaagggggagcttaatgtcttcaccgtcaaaggagtagaagcactgctagtcctagggaagccagaatagccagtcctgaaaacagcatgttgcaatttttatttcttttcaggttgcttcatttggaggaggggacatttggggtttactaacagtccttcatactgtgttctcttccttcccccctgctccccttcccccctgctccccttcccccctgctccccttcccccctgctccccttcccccctgctccccttcccccctcctccccttcccccttcctccccttcccccctcctccccttcccccctttcccttccagagcccttttatgcaaaagacagtgctgaaacctccgttttctttcagtccctcctatccacccacagagtgaaggaaaacaactttaaaacactctttggtccttctcccctctttaaactcaaaagggtataatcatccccgggagagagcactccttttaaatggggctactcatcctggcttggctaatggtgaacctaccttgtgggttttaaatcaaccgtgacatcaggtggtattgggtgcctgagctggcattttgtgtaagtccaggagcccttgatagtgtgcgtcactggggttattgatcgtgggaagaagacagcttggctggcatctcaccttttcctctgagtggagaagctgacttgctttaagtgcccaaagcaaaattctgagtaagggtagatttgctctgttattgttttttggaatcttaaggcaagagagtgtctacttgttggtttagaacctttggaataggttttgacagcctaactcaagttaatccagtagcttctctctctaagcctgttgttagggtttgtgtgcattttgagagagaattctatgattgggttgtcagtctggtaaggctagatgatgaccctttctctggagcctacgtggatctctgaagtgcttttccagccctggttttatttacagcttcgacaaatttaaacgtgacactagtgg

SEQ ID NO: 45333 - DNA, 835 bp, Homo sapiens
ccagttctaacaaactaaaaatacaggggacacccagttaaatttgaattttagataaatcaaatatttagtataagtatgtcccagtattgcatgggacatatttagtctataaaattactgtttatctgaaatttagatttaacagagtgtcctgaattgctatttgctaaatctggcaaccatattctctccccgcttaccccacctttttttgggcaccagtcaggttcaagaattgccccaaagaaatgaaaaataattaccatgcatttatggtactattacttcatttaatctgttaatcctgtgagctagctgtcatggaccccattaatagttcaggaaagtgagaggttaagtctgactcctgggatcatctcggtaagctgtcattttgcctcctcatgaacctagttgcttggctctcattgatgtgtggcccagttaatgcctatcaagttacaagctacatgagagattgctcagttttgactcatctgcccctggccttgtgagttacttaattgatgatggctcttggttagtacatccaagaatggactccaaagtccacgctgttaactgctgctctaacctgtctcttaactccgtggcatagtaaattgttggtagggtggctttggggtaggggtcggaccccctctacattctctcttttttttttttttttttttgagatagagttttgctgttgttgcccagactggagtgcagtggcgcaatctcggctcaccgcaacctccacctcccggattcaagcgattctcctgcctaagcctcccgagtaactgggattacaggcatgcgccac

SEQ ID NO: 45334 - DNA, 717 bp, Homo sapiens
gataatggaatggctggagtctgctgttgtcagaaggcagggagggtgatgaaggactgacccacatggactgggatgtgtgtcggttatgggcatgactgcacgttcactctcagtgggatctgggcaacatggagttcattgtcctgttgcttacttactgcaatgtctttggccctccttttcaactggttcctctgttgggcccaaaggttgggagtaggagacagtatcccaggctgacaagggcttgccctttaccttgggcaccttgttaatttttagcctgtgcccttccccacctttgccctcccagtggttggtatgtgggaagcccatctcagttcctgtgacttcatgtctcaaaccaaggatgagcgtctggtctctgctatgatggtggtatccgaggcctttccctgcccagtctggtgcctgccccacattgtaccggacactggattcctggacccccttctcctttcctttctttccttcaggtcacgcagccctgtactgtatccagcaccacagaaacctcagtgtttttcctctgctggtttggggcacaaggaagccttagggtatggggaaaggctgttattacctagagtttactcccaggccagggggctgccatcttcttcacagacatccctgaaaggaagcccctttggggcagggaggtgaggacttcatctcaacatcggctggtgg

SEQ ID NO: 45335 - DNA, 1665 bp, Homo sapiens
ttctatatcctcgatacaagtgtagcacatagtaacattatatattatatgtcatattaataatataaataaatgtatattatatataatatatattaaataaattgtatataattattatttgagtgaatgtatgatcgaggacattcactattatagataatgctgttataaatatctatgtttacatggcttttccttccatctatttacttaggcttgtttggagccattgaagctgtcagtaaatatttattgactggccacttgctgtcaagcactgactgtaccaggtacagggtacatagtctcagacaagacagggcagctctctgtgcttgtggaattaagtgtagaaacaggattattgctctaaatgtgcattcatttttacataaaatatttcttatttttctatattttgggaggagtcttaacttctcagcttctttttttagacatcctgttttcagactgcccacaagtttagtattctttgggactaccacttttttgaagttcaagtcctcatcccttggaataataaactgaaaagtcccaaagtagagaacaaaacaacaaaaagaattaagttataatcatgcacccacatgctaggtgctggtggtctgggaacctcacctataaagaagaggatccactccttcccttcaaatgtagtcagcagcctctcccactgggcttgccaaaagtagccagaagcaccccaaaatctctgaagatgccttggaaaaaaaaccaggtttctgggtgaagactagtgggtggacagctccttcccctatgctctgcccccgaccaccaccacactgcaccctagctgggtggagccgacttaccatgtcactgagttccagaaggccacaaatgagagaagtccagagcccaggatgaaagctgtcctcctcatagagccccagatgtgtccctcctggaggagggcagggaagtgtcagaccccagcaagcctcctgcctttacacccagctcactgctgaggcacagcgggagtgctgtaggatcagcatctcaaccaaccaggaaggcacatctgcgttttccagctggccttttccagcttctgtgggagcctcttccttatcaggagctctcaggctgtacatgggtgtgtttatgaaaattagagctcaagttgggggagggaagggaattagcctgactccagagaaactagcaggcaattctgtcagtcagaggacaggcgagcctctatcagccataggatttcatcaccagtcctcttggcaaatggagatacccattatctacacattgaaatcacctgggagcttaaaaaaagtcccaatacccagggtcccctccaatccaattacataaagagtccctgggggtgggacctgggctccccagttaattccaatgggcaggcaaggttgagatagtcatcatagcagcatctgccaaaaccatgatgaggaaatcctttcccagtcatacaggcttcactgtgtgcataggccaggcccatttcttccatccctaccctcctcttattttagaaggaaagagtgaattgtacacgttttctgactttttttgtttttttgttttttgagacagagtctcgctctgtcgcccaggctggagtgcagtggcacgatc

SEQ ID NO: 45336 - DNA, 721 bp, Homo sapiens
ctctgtcacccaggttggtccaaaactcttggcctcatgtgatcttccagccttagtctcccaaagtgctgggattacaggtgtgagccactgtaacccaccagaacttgttcttttacatgggccattcaaaggtcgccctgtgtttgctagactggtgaccttgggcttttccagttattcctttgtttggaatttaagggctcttttcaggaacttttctagactcattggaagttttaatcttctgagtttgatcaaaccaaattaagtcaaattaaaacctcagtttcacatacaggattagatatttgttcggggatgttgggttttttcatctctctagcagcccaggtgaaggaaatataaacaggacaaaggtcctctgtgaagtgcaggaaaacgcagtgcaggagttagctggggtcaagggccagttctcagctacctccagaaagcctctgttgtccccaggaaagttatagaaaggggttttccaaaggcccgaggcataggacatgccaagggctacaggcaggagagccaagaggagaagggaggacagttacaatgcttttcaattccataacgcacattcgcagtctgcattcaggcaaaggggttgtgggtaaaaggcagttggcagtcaagtgaactctgctcagttactgaaaatgaagacattaccatgtgtcagccacccctaaaccttgggggagat

SEQ ID NO: 45337 - DNA, 635 bp, Homo sapiens
ctgccataagtagagaggacagggtggtggcagaggtgggaagagtgttgttttgcccttactttaagtgaacctggacatgtcctgacctttgcaaacaccacccctcccccgtagttcccacttacctctgcagtgggctgtgtccaagctgctgaggtccttgcacaggtcaaatctaagttctcttccctttcagcccccgctttggtggctgttgctgctgcggctctgctgcaggctaaccttgtttttgctcgggtgggaggctggccatggtgatctcattacagagctgcgtactggctcggaccaggcacgtgatgaaaaaagtttgggtctgtgtgggctggaaacaaaacacccttctttccagagggcatgtccttaaagcggaaagggaatctaagctcaagcaggaacttgaaaaacgtgcatttggccaaactctgggcttccctccccctgccccctttttttcttttaaaaaattttctccatcatctgcaacttaagaaaatgtcgctgtcccataggaggaggcagattcaagaaaagatgtgggtgtcagataatggcaggtagtacaagttgataaaaaggtgacagagaccagaggatctcattttcttttt

SEQ ID NO: 45338 - DNA, 2718 bp, Homo sapiens
tgccatttattgaacgctcttttatatcttcctcggtgcggggtgtttttccaattattaactatttaatcttcacaagctcacgacagccattcgtaacctaattttgcagataaggagctagacactcatttgggggggagaagaggaggactggagttcagaaagtgcatttgatgctcttatcctggaggctggagctagttcacctccctggagaacagcttttgggaatcccgtttgaaattgccgctcaaggccagctcggcatccagcctaggaattggaggattttggagaatccccttagggggaaatgtttaaaagtgcaaagtgaatagtagaagcccctctcctcgtcactaggggtacatttgccgttttcttatcaacagcctctcaagtacaagcatctgggacaagaactagaaccgtgcttggggcagcccccacgtcctctcgggaacaggggtggagcgctggcgggagtggctgagggcggcccgccgccgacactgtgtgcaggaagcgggcgctttgtctgctctcccaccgcggagaacacgaggcggaggcgcgccccagctggccacacgctgcccagggccggcgtcggtcaagagccctctcttcaagcaggattaagagggaaccaaggggctggcagaggggcctcagaagctcctgggcgaggcctgagcccgtgggtctcgacactaaaatctggcgagctccctgcgcgtccgcaaagattttggagctctgaagagcccggcgacgcctgcgctggccaggcgccgtgcccacgggaggcgccgtcctctttgtaactcgagcagaccctggcgggccagttgctatggcaatgttcctcgctctgctcggtgaggccgggaggtaggcgggccttggcggacgtcacccacattcggctttggggagccgccccacccccaactaattgtttgccagaaaggaaccgtaggatagatgctttgtgagacatctacggggccatgttagaacagaaagtcgcgacagcctctttctccgtcagcctcttcacaaatcccttcgtgccaacgattttaacggtccttcaaagccaggaggagggggcgtggtaattcgaggggtttgttcgaagggccacgccctttcctcggcctttggatttttccaggccgcgcccacggcgggggggtgggggggggcgctagttctagaccacgccccttccttgttcgctcggaaagaggaccaaaatggaggagtaagaatcatgattaaattgagcgagcgcaactaatcacgcgaagagggccgcaggcgggccgtcttccgcaagcgtgcttccaggcctccactccccacctattcggcggcaccctgttacttctgctcctgcgcgctgcttcccgcgacctcacaggcagagcgaacacgcacggagtcgcaggggcgcgcaaagggggaggagcgggcgtgaccaggcgcgcgcgcgcgtctggagtgactctagagagcaggcgagtcgggcggatcgggtgggtagagtggtgccgtccggttgtttggtgggaggcacgtaagaccgctctgggcacgggggcgctcacctcactggctcgttcggttctaggagcagatccggggtagagggaaaagagctccgggccaggggctgccgtcgccgccgtcggggagtcagcccgccagcccgccagctcgtcagcccgccagccagcgcttcgcgggccctgtcggtcccggtaagcgggcctgcgcttaccggaaagaggagcgtaagatgaaagagtgtgagagaccattgggggtctgtagggggaaggggagtgggggcgtgtgtaaggggcagggtgtgtgaggaggagaggaaccccagcaaagagtagtaataataatggccaccgtcacacgataatattcgagtaatatgtgcggggactttacaaagcatctcatatgcttcattttaacttctactccaatcctccgaggtgcgtactgttatcaaacccattttacaagataggaaaaccgaggcacgaaatagattaagtggcttatgcaaggacacacgactactacgtggcctggcctggcttcgaacttagttatcttagtcctaaggcccgtaattttaactttgctttaccaaacaaaaacagaagaagaatggcgtgtcagaaggaggaggactgagtgtgatttgaagtggaaggatgatgataaacgagaagagaatgatgatgggagacggagtagtggggaggaggacctgaatttggaatcttgcgggcctcccccttctaaatcgccgcctcttccttagttcttgcggccccataactttttcttggtgttctatggctttatgaatggaggagccaactcacagacctgggccattcgggtggttttaagaagtttgaactgcggttcaatccagggcagtgccttgagacactgtttggaggtaagggagggtcagaggatcctcttaaacgctgctgctatttatttcttcaaacgtgccacttccttttctatcatatctatgcacggcaaagcctttgttcagtcctctagaataaggaagtgatgtttattgtttccttgtacacttgggcttaaacgaacaaaatcagactcaacgtttcttttcccgagcaaggccttgattgcttgcagaga

SEQ ID NO: 45339 - DNA, 1275 bp, Homo sapiens
acggacttacactcagaattcccaagtgctgatattggctgtgccacgtgacttcgaacaagtctctgagcctcagcttctcaactgtgaaatgaatgttgatataccttgctctgcttagttcacagactggaaagcagctcaaataatgtgaaagtgactcttatttagatgtggccagaataaatcacctggcatgtcatatcctaaggcacaatcaaagcctagtttggagcctgaaagcatctggttcaacccattcatcttacagtaaggaatgccacacgttgcaggatcttgcttagggcctgcagctgtggttagcccccaaccccaggaaggctcccggggggctggcgcgcaccaggctgggcaggggagccatataaatggccgagactatacaaggctaacttttcagtaagcaagcggccccacgtggaagctccaggaggcgggaccgctcggccacagcatggtgtagctcattaggagaccagaagcaactcagcttagtgactgtgggctgcctctcctcccagcctgggcctcagtttccctagctgtagaaaacggggtggagtcgtccactcggcgcccctggggagcgtacaaagggcagtaagtctcgggcccaagggtggtgagttacctcgaaacgggggtgtccctggactctcgcctgcgcccgggcccacgcggacaaggaagacggaggtccgcgcggcgaagccaaagaggcccccgggcacggcatcgctgcagcgggcgcagtaccagttgggggagggcggcagcgtccgcggctcctgccccataactacaagccgtcagagacaagagaagctgccacagccgaccgctcgtagcctcacgccttaggtagggagcggggcggggtgaactccgagccccgccttctcgggcagtcgctacggtgcgcgtcgaggcccagccagcaccgcgcgttgcgttcccgctaccgccgggctgggaagggcgggaccacgcgtgctgcactggccctcagtacctagcccgcggtaggaggtccgccccaaccctggctagggtcaggtgctgcctgagcacagccccgaggttaagcattctcacttcccacagaaaggcacaaaattagaggattagactagtggaaccaccgccccaggctaccagtttattatttggagctgttcaaccactatcccgtccaacgttttttgagcgctatgtgccagggcactttgctagttgtggaggtgttttaaagat

SEQ ID NO: 45340 - DNA, 1791 bp, Homo sapiens
gctctttaaaagagattttaggctaggtttcgtggctcatacctctaatcctagcactttgggaggccgaggagggcagattgcttgagcccaggaattcgagatcagcctgggcaatttggggaaactccttatctataaaaaatacaaaaattagccgggcgtggtgatgtgcgcctgtagtcacagctacttgggaggctgaggtaagagggtggcttgagcccggggtcgaggctgcagtgagactaggtcattgctaccacactccagcctaagcgagagagagaccctgtttcaataaaatgaaataaaatagctttcacactatttcaactgatctttacaacaagcttgtgccctaaggttagtcatttctgataagaaaactgaggaccaccggattaggtggcttgttcacggattctgttcccctactcctttctagtttgtgagttgggactttagtttttctgaatccaggtgaattttcggaagcccacgtgctttcggcctttattaattaattcattcccaagccaggttcgcctgaccacacctcgagcgccggcccagtgcttgcgatcttcgtgacggcacctggggtgtaagtactgcttgtgggagagccccacaggaaatccagagtattgcgcatgcgtgctgtccagaaggcgcttgaactcggcggcttccgtagcgggagggcgaaagatggcggcggcagtactgggacagttgggtaaggatttcttagtggttaagcgacagaagggagtcgagatggaatctgagttgacggcttgtgttgatgttgcaggtgcgttatggatacataacctgaggagccgggggaagctggccttggggtgagtctctcgcttcggagtttcggaagggcccaaggcatctttagtattctgccagttggtaactgagcgcctccgtgcctaactgtgttttaggctctggggttactgaggcgaatgagacagcccgagtctctgctttgtcactctattttttctccaccttattgcataaactgtacagggatcaggattacccataacccaagggcgattgtaaatgcgatttccgaacgtctactgtgatctttctggacaaggttagactattccatctccatatggaagcgtccaacttttcaagttacctctctgattacttgcttacatgggcagggaccgtgttgtggacaactctgctttacgtcgtacctgacattgtgtttagcggtttatatgctttaactcactctcataacattctacgagtaggttctgctatacccgtttttcagacaaggaaattgaagtccccaaacgtaaaataacttgcctaaggccactcagttgtaggaaattttgaagctttataccagagcattctgtagccttaggacaaaagcattcattaaaggttagggtaagtagtcgctgtatttctccccaaaataaaaaatcggtatttgaaaattgataatctgattgtaaattttctggtctgtccatttgttagcattgattttggtttagttcataggctttgcagacagatgagttgtatatgaatccattttttaactgtgatcttggaaaagttacttattcttaataagcttcagttatcacttttatgatatgagcgttatgttagtacctatctcttaggatttaaaaaattttttaatttttatttatttatttttttagatgaagtgttgctatgttgcccatgctggtctcaaacttaagggctgaaacaatt

SEQ ID NO: 45341 - DNA, 819 bp, Homo sapiens
aaaataatgagctgcaaaaatgaaaatacaggttttttttaaaaaagaataatgctgtgtttctatctcacatttagaattacttcatccactataaaaattcatgagtgaaggagttgcttttagaacagttgttatgaccaaaagaacagatgttacagctctatctccttaattatttcaacccaatcattcaattaccaaaatccagcctttgctatcagagacaatatgaaaggaagggatgagcaattgccaaggaatgttaggctgttagacaatctgggtatctctgcttccgaaaacatcttcaaactgccagtcttctccacataccagaagcagagttttgtttgtttttcttcatgttttggtcaactaccttccctgacacttctttttgtgtactttgactaaatttacggtgagaaactggactttggctttgtgcataatcccaagctgtaccaggctcacaaaattcatgcatgtcatttaccttgtcttgccatatcacagctcagaggttgtgagccgtgatacagaagcattgatgggacagctgagccgtgacacagaagcaccgatgggacagctttgttatgctcagaggtcccatggaaaatatcatagctgcagttcctccaaatctgggaacagtttggttagtacagtacaacgcactgatgcaaatatccacatgggctgttgatcaaaatagcaaagactgaggtctctcaattctcattttgccctctcttttacaaccattacagattcaatctcaaactgtacgtaaaaagaaaaaactaaggaaga

SEQ ID NO: 45342 - DNA, 872 bp, Homo sapiens
cccagggtggattccctcagctactgcccactcgttttcttgtgttactctaaacaatatgttatatagtgttatatagctgatgtggtccctgcccttggtctagggtagagcaggcagtgggcaagcaatgagccaacactgatcactcaggttctgtctcctgggggttggaatcttggagcagccctgctgccagtgcacttcaatttctggttaattggctcttctgtcaggtttatgagtaatcccagatcctctggttaaattttactttctcccttacgtgaagtcagtgttaattcctgttgaaggcctacaaaggaccctgatacaaatggtactctgaaatctgcactgaagtgtagatgactgatagtcctttcctacttctccagaaacatctattttgaacccaatacatttctaaatgggaaagttttcagtggtgaaagagaagccatttctgcttagagtggctactgaaaagcatcttaaatcctaatatttagcatactccagtctggactcattctgggaagacaaggactcgtggtcaataaatgattaatgagtgtcagaggtgaccagttttttgatctttgagctctgtattctgaggccatatctgtggttacagcactgctaaggttgcgtctgcagtctttttgctttgttttttttttttttttttgagacggggtctcactctcttccccaggctggagtgcagtggcttgatcttggctcactgcaacctctgcctcctgggctcaagtgatcctccctgctcagcctcccaaataactgggactagaggtgtgtgccaccatgcctggctaaattttatattttttgtgtagatggggttt

SEQ ID NO: 45343 - DNA, 1311 bp, Homo sapiens
tctcatcctctgccacctgccccattcaaccaactcaaagggaacccaagaggctgcttggtccctagcctatgacactttacaaatgccgtgtatattgtgatatcactctctttttttttaaacaaaggtactttgcttggaattctggtggtattttttctaaatccagaaaatacatttgcataggaaaaaaaacagcaactctctctgtctctgtattctcagcctttcatggtctacattacagctcatgtatttactcacccattgcacacctttctagccatctatcacatataaggaagtgtgcccagcatgaggtaaccaaaaagaagaccaagctgcagtccttgcaagaggttttgccctaggtgctctgtcccagaccttggctgcagtgccttctttgtatagctcagtcttcatgcctcagtcccatcaatgcatccaaaggtggcaacaaaggccccctttgctgtggcctacagcctaaaattcttcctattttgaaggactaaactcaccctagagtgaaaggatccctgaattaagctaaacatacttctcgactgagaatatccatcttggtttttgcttaaacccatgttaaggttttctaccatttcccagcaaattcagtgacattcaccctaagaaagttaagctcttgtttaaaagtaatttttaaaattccctttctaattaaccactgacaggctctctgccaataactgtgtttattttttagaaaatcaattgcattctctacaaaagactcatccttttcagtcaatattccctccattacacacagataatgtttactgtagcagcttcagggaccagagtccagttctttcatggggttacctgcagccaatctaaatagcaggtgtttggaacgtcatctccctaaacactaacagatttcacctttatcatgtttactagtaagtagatgtgttgggaatactaggattttctgccttcctgcagccctaagataaaggtgctgactatgggcagtgtttgctgactcagccccgagctgtctgttaatactgcccaatgattccagctcagggtagtctgtgatatgtgtaaagcagtcattgttcttggggcaagggaagcctgagaaaatggggatactggattttgctattgtatgatgtaagatacatgcaaagctgtgacgatttttttaaaaataatcatattaatcttgtttacttccaaattcatttattcattaaacacactttattcagcccctgctaggttccaagcactgttctgggtatagac

SEQ ID NO: 45344 - DNA, 1323 bp, Homo sapiens
ttgaagataccgccaaatcatccttcatccctaccgttcaagtacagctttctctcatatcttctaaaaccactttaggacacatgagatcattctcctcctcaaatattagctaaagaaagcatctatggcactcctaagactttatctggttttatgctacttttgggcaaataggtgattgtattgctcctgaggcattctctgcttagctgcttaatgctctctctgcttacatacacgactatatgcaactatgagtttttcctggagttatgctgctttcttgggctctagcctggaattgatattctctgctgtcctgtgtctccaagctaatctgaacttgtcacatctgaacttgttttaaggctcccttttcttcaagaccctgaaatctctgttcactccttgcctcccctttacttttcctcccaataaggaatttttatccaatttgctatgtgaagtatgggagtcagccagatagctctgccttttactcatccaaagttttcccaagtcaatggcctttactcatgagtaatatttgttctctcctaggagaatgtactaagttttggaaactcaaaagtcaagaatgtacctctttttttcttttcatgttttttttctaccctctagaagcaatgaacatagaagggcatcgtcagtactttaatgagggaaaggggcaatgggtaaaagggtgagtatttcaaaatatttaatcttactagattagttctacaacaaaacccagtataaacaggataatagagataatcataaaccaagttaaatgaccacagcagagaggaaaaagatccttcattctagggtgactgaagatggcttcatggagggcatggagttctgcttggataatggggaatgaatatgatttcaataggataatgggaaatggatatgattttaatagcaggttttttgatggaggagggaccaaaaaggctttctcagtaaagagaattgctgaacaaaggcaagccatttgagaggatctaggatgtgcaggaaaacagttttcttttggctagaatgttaaaagcattctgaatagacatatagtctctagccctctagaggcttctggatttgaatcttgagtctgaccttactagctgtgtgaccttgggtgaattccttaacctttctctgccacagtttcctcatatgtaaacacgaatactgatagtacctgtggcatgatgtatgaggattaggtgtgttataaatggtaaggtgcttacaacagtgtctggggcttagaaaacactgttagctgctgttataactttg

SEQ ID NO: 45345 - DNA, 832 bp, Homo sapiens
taggaaattgttattcaaaaataataggcagaaagcacaaaacagagaagcaagcttgaagtgtattcagattcatttttttaaaaggctcaatctatgtgttaattctaacctagaatcagtcatgtagttttgcaacatattggaacatacggaacaacatttagctgtagatctttgaccctgaagggatgttgacaatctacaccattccctcctacagtatggaagctcccctctgacttattccatgtggcagccctgtggaatggtcctaaccacagccagacggggagttagcattaggcccagctgtggctcagcctcgctgatgactatgcctgctgctttcaactgtggttgtgttgtaagctaggtggttgttggaggtgccgcacaagcttggtgacacagcatgaacattgtgccaggataaatgtcatgactatttgagctaggtttgaccttcagcaatgttgtgaaatctgtgcccttatgtagaaactatttgttcatagtttctcagcattttcaatatattttttaattgaggagctttccaaaacatactaaaacctatcctagcctttacccttccaaaaactggagtgcttcttcagtatctttagcttaaacagtctgtattcacgcttgctttttttttttctttttttcgagacgaaatctcactcttgtcacccaggctgtagcgcagtggcacgatctcggctcactgcaacctctgcctcccgggttcaagcaattctctgctttagcctcctgagtagctgggattacaggcgcctgccaccatacccagctaatttttttg

SEQ ID NO: 45346 - DNA, 1227 bp, Homo sapiens
cagaactagtaacttatagctgaaatgggagttgtgtgtctccagagcagatttatagcgcctcctcaatctggcaatagcattaaatatggcctgccttgaaagaattaaacaagataatatatccatttcctggcacatacatctgtcaaaggtgggtagtgggccatatgacagctccaatcctttccagatctaatattccttgcttccatgggctttaggcaactgagggccaacccaggcacagtaagaacttggcccaagagccttggatccacggccaaaatggcagcagccacacaaatcctggggatacagctgctccactgtctgttccacctggaaaactctactttgaccaggtttcactgacatagtatttcggagaatgattccccactcctactttcttcctccttacactctcaaagagtggggtgcagctgctcctaccactgttacgttgtgtttttatctattttcattttgcttttgtgcctggaaacagtttgcgctgaggattacactttcaaaacgaaatgtcgccattatctaatcccagttgaatgagtccctctgtgaatcacactgcaggtccattttaaattaaccagctaccaggaatgattggcaaaaaaagtaggccatgtaggctggggagcagctgcctacagattggcaacagctgagtacaatgagtcatacacacaaggaggcctgcaaggtgtgaccttgcttggatgccacacaaggacacagagccagctcagcatcacagaggagctcagcacagggcactcccagagcttaccactaagggaaacaaggagagttagctgggaaagatgacaggtttcagcatcaactttctccatcacaaggaaagacaggtcaattctacacttccaaggagcagagactctaagaggcctgttcagacttgaaagaatagtaaggattgtttggagcagagtagcaggatctcagagggtcatgcctctttgatgttggtgtgggtgtcctcaactcatctgtcttagtctgttcaggctgctatgataagatagcttagattgggtaatttaaacagaaatttattgctcacagttcgaggctgggtagtccaagatcaaggcacaggctgattactcaatctagtgagggtcctctttcctatagatggtgtcttctatttgttcttatatgggggaagggtcaaacaag

SEQ ID NO: 45347 - DNA, 858 bp, Homo sapiens
tgggggcttaggaatttgcactaacatgccctacccccttcacaacagccccattctgggtttcctggccttactcaagttcaattatccacacatctaataactaacagagaatagatacaatattaattccttgaggtctcttaaagctgacaatattgcccaatgtcagccttggtaatgatttacaaccctaaaggtaaggttcctggcaggacctgaccccagctccttctgcatctgcattctagtcattcctttaggggtgatttcctgtgttttctgactcatcttacacttctcacggtaaagcttccattaggaattctccagcatagggctacattcccctttcctttcctgaaatccctcctttatttcctatcagatatctcaccttatttgcaaagttgatcacttgcctcttcacaaagcatttacatgattcccttctcttagagcaccacagaaatttagagtcaattagtgacggtgactggatgaattcccaaacctggctttccttattgcctctcactggtctgtttctctttctccaccacagtctcaataacttcacttttcaacatcgctctttctcctgttctcaactttttcctgttttcctctagtgctcaaacctgtaagaggatgtggctctctttcggaacgaaaaacagaacaacacaggagagtcacgtgggcagtctgtacccaattgagttctgtgcaaaagatctcttgagcttaacttctttcctaagtttgggtccttatggcatctttcttttctccactgctcctacaaccatacatacaattgttccctggagttttaggcagcaagcaggtactagg

SEQ ID NO: 45348 - DNA, 2360 bp, Homo sapiens
tcctgatacagggtatcaggggaacaaacaaaaaggaaacagggccgggcgcggtggctcaaacctgtaatcctagcactttgggaggccaaggcgggcagatcacgaagtcaggagatcgagaccatcctggctaaaagggtgaaaccccgtctctactaaaaatacaaaaaattagccgggcgtggtcactggcgcctgtagtcccagctactcgggaggctgaggcaggagaatggcgtgaacccgcgggaggcggagcttgcggtgagccgagatcgcgccactgcactccagcctgggcgacagagcaagactccgtctcaaaaaacaaaacaaaaaaaaagaaaagaaaaggaaactggaagcagagaaccagcgtggctcaatggcagcacgagagcaaatgccagccttccagtggcagagatgcacttgcttttcagagtaaactgggcctctggtggacgtggagcttttcctactcagtggccacaacgacttatccctagccttaacagtcatattgccaagtttgccattagcaagagaaattgagagtgaatgtgaatcactgtgcctaacctttcatgctcctgtacaacatgcttcagactacacctccttaccaagggacttcaagagaatgcttcaggaaacagaagtctggagcagacttacgttcagatccaggctctgtcactcacaatgctgggtaaccctgagagttcctgagttctcttcaaacctctatttcctcagttgtaaaatagcactaaaaatgcttcctctatctcccaccaaggattgatataataagcaaaaagggccacggaagaacttggaaaactaaacctacatcatatgcagtaatagcactagctgaggtttttggagaatactatatagcaggctctgtgtcaagcacccacatgcgttaaatcgggctgttgacttctgctgttaatcattaaaccatacaaacatgagtaagcttgcctagtacttcattaactcctcttctggtctaagaattcagtaacttccaaggaggcagtggtggtctgtatcttgcagctcatgacagggttcatggggaagtggatgatctcagcatagtgttttgtatggcagcgtttaaaaattcatttcttgaccgggcatggtggctcgtgcctgtaaccccagcactttgggaggccgagtaggccagtcacctgaggtcgggagttcaagaccagcctggctaacacggtgaaaccccgactctactaaaaatacaaaaattagctgggggtggtggcgggcgcctgtaatcccagctacttaggaggctgaggtagaagaattgcttgaacctggaaggtggaggttgcagtgagccgagatcaagccattgcactctagcctggacaacaagaacaaaactccatctcaaaaataaaaataaaaattcatttcttgccaggcacagtggctcacgcctgtaatcccaacactttgggaggccaaggcaagtggatcacctgaggtaaggagtttgagaccaacctgggcaacatagcaagactccctctctgcaaaaaaaacgaacaaaaaatatagtcaggccttgtgtacctgaccgtagtcccagctactcaggaggctgaggcaggagggttgcttgagcccagcagttggaggctatgattgtgccactgcacaccagccggggtgacagagcaagaccctgtttcttaaggaaaaaaagattgaaaaaaaaaagctaattcaattcaaccagttattactaacatattgagctgatgggacatgactcaatatactagggacgtcaaaaatccagacttgtgcaatcgggcagggacatgggtaagtaagcaactaatgaaatcaggataagtgaggtaaaggtaaatatataatcagactacatcattcccccacttataaccctctcataactctctcagaaaaataataataataataataataataattcctaaatctttactcaaattactgaagccctggtggtctggccctgacctaccccatagatttcttctaccactctctcccctgctgactcagccccagctactagagctttctttccaacttgcctcaaccctaaggccttttccgtggctgtgttctccatctagctccccagccccaccattttcacttttttccttttcatttttatcccggcttaaatatgacctccctggacatttttcacaggtccttcaatctaaagtagccaaccagtccctctcactattattatcttgttttccttaatccattttatctgtgtgtgcaatatatgtggtgtctgtctctat

SEQ ID NO: 45349 - DNA, 1049 bp, Homo sapiens
attctcctgcctcagcctccctggtagctgggactacaggggcacaccaccacacacagctaatttttgtatttttagtagagacggggtttcgccatgttggccaggctagtctcgaactcctgacctcaagtgatccacccgcctcggcctcccaaagtgctgggattacaggcgtgagccaccgtgccgtgcccagcctccattttcttaaataagttttgcatttactcatgagaagggagacagggttgccaacaaatgaaaataatcactgtggtcacaatgtaataggagccaggccttgtgctaaataaactctttcagtgaagaagctcattttagagatacttagaagcacttactttagaactacgcttctaaagtagagactgttagtcccattgcacagatgaagaaactgaaaattagggaagtgaagtgactaacccaaggtcacatgacttagcaaatgacaaaatggccttccaatttaggtctgcatagccttaaatgcacattcttaattatactgccttcaccagcccttacctcagtgctgtcattatgaagagggtcacgttgcccagccacccactcaccatctttccttcctgttcatttgtttatttcttcatctgctgatccattccatgaatatgcactatgcccttactctaggcacaggggacagagcaggaaacaagaggggcacaggccctgacctcatgaacactgaattctaaaaataagtacattgccagcttttggaaaactaagcatgcttactcatttttatggctgagtcagagatgttgaaacttcttaaatgtcactgtcaccttctggaagccttaatgtgtataaagggtttgactaaatgctggtttagcaaactatagtttaaatattataaaggcatagcctcagcctaaaattattgaagaaaaaaagattatgttccaattacttttgccctaattaccagaaaaaaatttaaaatataaaaaccacaggcctggtgcagtggctcacacctgtaatcccag

SEQ ID NO: 45350 - DNA, 2242 bp, Homo sapiens
gtcccacgaattaagttctattatcaatttcattttagaagtgaggatccgaagtctcaatgaggggaagtgttgccccagatcaaaaggttaataaatggcacaacaggaattcttatcccaggtccctttagctccaaagggcaagctctcttatatccctaagccgagaagcatctaactgtacaataaggactggcatatcacaaaaattatatttctttctctactgtctctctagatggaacttttcaaaggtgatggaggtcttatttttaataaaagcagagccaagcatcagagctggttcttaactcaagatccaacatctagtgtttgttctactgggggagaaggagcttcaccagaagacgacagacattccagggtcccagccccagagatttgattcattctgtctactgtgaatgggccctagaatgtcgcttttaaaacctctccagatggacctgacgattaggcttgggatctaccgccctcgcctgcccccatacctcagctgtttcataactgctcccagaagaaggaagggcagggagggctactctcatgttacaaagagccggagagggcaaatgactcgcccaaggccacacagcttagaaaaacagcggcgcggggactagacgccaggtctcccaacctccactccggctcggcgtcccaacacggaggaagccccgagactgccacgcttagagccccctcctccaggctgtccaccccgaggcctccgcgctctcggagagaccgcactctcggagagactcgggagagaaagacgaaagaccgcctttggaggccgaactcagccatgcctccccagttcccagcccagcacagaggaagctgcggggtccggaagaaaaaaacgcacacaggcggcggccccaaaccgttgccgcccacttacctcagctctggctttacactggtagccgccttcccctctgcagccgaaaccaacttccggtctcctccgggaagaagccaccgactctgtccttgattggctgtaagagctgtcctttaacgaaattctagctccgcctcagaccgatccctcgctgttgcgcctacgtatgtttgactcctcccatccacccgttactgacttttaaaagtcgtagctgagggttccgtttcttcgtttctttttgaattaaggcataaaattgaacaagacaccttattgctttattttttatagaccccttattgaccagaaacaatcttatgttttaatgtttaacatgctcttgtaagacttaacgtgaatttagaaatttatgacacgaaaataacctccaaaagaaacgcttgctattgcgcctgcgtatattccacccccttccccattaccactcttttactgacttagtcgctgctggtagttccattccttttgtccttttttaatttaacgcatacaattaagacgtcttacatacaaattcgaaaatatagacatgcagggtttttttgttgtttttttctttgagacggagtctttctctttcgcccaggctggactgcagtggcgcgatttcggctcgctgcaacttcagtctccgggattcaagcgattctcgtgcctcagcctcccgaatagttggggtttcacctatttttttttcttttttttgtatttttggtagagacagggtttcaccgtgttggcgaggctcatctcgagctcttgatatgaagtgatccgcccgcctcggccacccaaagtgctgggattgtaggcgtgaaccaccacttccggactcccccattttaaatccctcgcacgtatcaatttatttcctgaagaaatccatctacgttgagcataacccaatccagcttttctcctcaccgctgaccccaatgtatcctgcaccagtgacttccaatggtcgttcccagtcctcattttactccatctgtcagcagcatttggcacatttgattaatggattgccccaggactcagttctccaaccacttctcagtcagatatcagctggatgattacatgcaggccctggaacaccgtttcctctgcacttcagaccctcatatccagtggtgacagacatctttccccagttgcactttactcaattgcaaatgttcaatcgaaggaatcacctttttctcctttctcacataccccaccgaaactaccataccagccttttgcattagatctatttaaaaataagtaaataaa

SEQ ID NO: 45351 - DNA, 1864 bp, Homo sapiens
ccccagttgcatcttctgtcacttcaccctgctccttctcctcagagcactttgggctgtaactggacgtttgctaggttaatttacacctgtttctcctggcaggtgataaaactccaagggggcaggaccctgtcttttgtacaccagtgcacacccaagtcctggcacggtacttggaacaggataggtaatcaataaagactgggttgataaaagagcacttggaaatcatgtggggccaataagatccgaacgcggccgaagctctcgtcctcgggttgctgcaggtgtggttcccggtgatggaggccgtggaagaagccttccctccctttcccgcccccagggcaggaagcctgggggctgagcggtcctccgaaaccgagaggcaggtcctgggtgcgccggcggtacagcggagagcgtggagagaccctcgccgcagccatttcctgccctttgtgtgacagccgctgcggcgaaggggcgggcgctgggtgggggcggagccgcggcgggcggagcagcggggccggggcggggccgagcgcggcgcagcggagcggggcagagcatcctgcgccccggcgcggggccctgcggtagcctcaggcccctcccctggacccgccgcagagccaggtaagcggccctcgcaggcctcgggccgggcacggggactaggatgccgccggggacggggatgaggccgtgaggatgcgcgaagggccgccccctctcccggcccgcggggggcgctcggcgctgtgcccgggctagcccgaggcccggcctcaggccccacgcggcccctttccccctcggacccaccgtgcgtcccgcggcacggaccctctgcccgggaggcgcgggcacatcgcggagctccggcgcggcggcgggggagccgcagcagcaggtgcgcggcctgggccggagccgccagcccgggaggaggcggtgctaatctcagggaccggagacacctgcagcggccgcgagcccggcagcggcgacatcctcgagtccaggtactgcagagcgctggcccctgcctctgccgccgtgaccaccgtcacctcccccagggccagcgagagccgcctgggcccgcctggcagccgcctcgggcacacagaacgtgtgatgggtggggcgaggggcgcagcgtcgatgtttgggggcggagggctttgatgagagaggagcaggtctgacccgcttggaagctttctggcctacactagcatcgctcaccaagctggctgcgggcacggtggaagtgggggaaggggatgagtgggctgactcctgggggaaaaggtggtttttttcttgagctctgaagaaccaggaagatgcttgcctgtctgttgtggcgtctacttttcaggtcagccctacccctcaccccaaagaacagcccacctatgtgcaaaagaagaggaggaggtgctctctgcttggggatgggggcaggtagcatgttccacataagtatggccctctatatccagaacccggctggaaaggacactgacagcccaggtgcctccccagcacagggaatctgattttgacctttgcttgcctactttccccagcacagtggaaacactcaccagggctgatgagccatcagctgtccttccagctaggccaagaatgggacaaggatctttttctgctagttcctgggtgcctgtgccctcagcatgggcagggagacggaggcaggcctgctggcaggaggggcaaatcaggagactgtcggttcctgtgttcccatttcctgcctcctgtctgtgtcccagttagggcagtgggtctcaccttactcttggatacaggctgtgccagc

SEQ ID NO: 45352 - DNA, 1138 bp, Homo sapiens
cacaaaaaacagccacagtaattattcttgtacctatatatccacacccttgggtgagtatttctggaactgccgaatcaaagcaatgcacatcttaacttttagcagctatttgggcttgtggagtttaagcatctgcttctgaagctcagatgagtgaacctgattactgatgggaagcagacggcagaccctgtcatcaccagctcctgcccagtgtgattgagagtgggactttgtggggaaggggcaagatgaaaggtgacgcagcaggaggtttccacagagagcttgcgttgtttgttggcagcagtttgccctctggacacccagccaacttggaactgttttctaacaaccaaaatgttcctgtcctctaattccacaggctaactttgacacaaactttgaggacaggaatgcatttgtcacgggcattgcaaggtacattgagcaggctacagtccactccagcatggtaagtctctgtgacccacgtgtgcagacatgctccctgctgggctggcaggggccgcgggcagcttctcacaccagaggcatgtgctcagctactctaagaaccccctgcctcagtcagaatcatctgcttaagcccactcttacattctgcgccatcccctgtcggtgcctagaaacatacagttcccctttattgtccagctttgggaatcctactcaactgttagggcccaacttagtctccactactcactttcttgagctcctatagctttttgggttaacatgtgattggatcttgccttgtttataggttaatgaatgtgtggaattttgtctcttgagcagagcaaaaggttccttgaaaaagggacattggctttggttttggaataacagttactcaaaaaagctgatggcctaaatcatttgcaaatagggccagttattattttctctcttagagtctgattcatctgtggagggctcctccccttctctgttgggcttccattgattttattctcatgcagcactgcaatttaaagaattccaaattccatgttcatagaccctgcctgtggttccataaaccctgcctgtggctccatagacctttgacactatatgtcttagctcgttttgtgatgctataaca

SEQ ID NO: 45353 - DNA, 3156 bp, Homo sapiens
caccatgtggaagagctggtgtgagcaaaggcacagggcaaggattttcgaggagtgactggtatggactgtaaagtgcatatagggatattgtttacagattccctacaaataaagggtcggggcatagagggtgtattcgttggcttggataccttaacaaagtgccacagactaaatggcttaaacagcaaaaatgtatttcctccccgttccggagattagaagtccaagatcaaggtgtctgtaggttcggtttttcctcagacttttttccttggctcccagatggctgtttctctctgcatcctcacatggtctcttctctgtgtgcacacatctctggcaccttctttctgtgtgtccagatttcctctttttataaggacaccagtcagattagatcagggccctctctaatggcctcattttaacttaattacctctttaaaggccccgtctccaaatacagtcacattctgaggtcctgtggggttagggcttcaacctataaatttggggggcacacaattcagcccataacagaaggctttagtttatttaataaaaaattaaaaacaatggaaaaatctttatccttaaaagagatatgaacagaacgcagcttgggggacagattccatgtgttagtcatatgtagaatgagttgcaagtaggaatgaggcaaataaattagtcaagataattaaagttatctacactgcaggcattcaaggctgaatgagggtgatggcactggggtacagctaagaggatatggatgtgagggacactggcttagcagtcacctgggactgcactgactgagttcccaggaagaccaggtcaagacaccaacagagcagtcggaaggaggggttaggttggagagtgatagtgttcattttctgttactgccctaatagagtgtcacaaacttagtggcttagaagaacactgatttatttgcttatagttttgtaggtcagaagtctgacgtgggtcttactgagttaaaatcagggtgccagcagggccgcattccttctgcaggctccaggagaaagtctgttcccttgccttttccagcttctagaggtgtctacattccttgactcgtggcccccagccagcagtgacatcactctgatctctgcctgcatcttcaaatctccttctctgactcttctgcctccctcttttgcttatgagtaccttgtgtttacactgggctccccaggataatccagaacaaccaccaccacccgcctacccccattgcaaggctcttaattggtcacatcagcaaattgcctctttccatgtgaaggaacatattcacaggcaccagggattaggatacagacatcttggggggaccattattctgcctacacagggagagtgttgatgtggcttaggcatgagtcatgagtggcatgcaatgctgacattcctggataacaccaaaatctcccttcagtcaacagtgtcttcctcgtgccttccccagtctttctaaggtagcttattagcagcaatgtgggtgtatgagatgctcatcttcttgtatgtctcctgtccccacttgggcaaggtgaatctctcaaaggacaggatagccagagaaaagaggaggaggggaagtacgtaaaccacataactgaccaactatatggaagagttgagggttctttgctggggtgagatgggggctgagtgatcactggatctgtcactacataaaatttgagctacactcacattgggtttaagtcatggactttcagaatattagaaatgtaaaggaccttagagatccttagtcctgaagctgtcaatgtgggctgcacaagagaatcaacctggggattgtttaaaaacaccagtgccccaccccatccccagggataaatatttagttaatctggggcatggcttaggcatcaaattccccaggtgactctaatatacaacaagggttgaacacgaatgattcaggccaactctttacctccaagtaaggaaactaagacattacaagttaaaaggtgggcccaagaagagtgaggaccagaactcaagtttcccaagaccccacccagggctctttccactgcaccatcctaacctctacattctagcataattgcatgacagatctggctgatggccaaactgtccgtagggcagagttcacattcttcttgttcactgcgctgtttgcagcacaaagcacagagcctgggacccatgagtgcccagttaaacattcactgaatgcatgagtcggaattaacacccgtcggcaggcaggttggtgctacaagtagacacgtgttccttacgtgactgtcacttccccttttggacatgtgttctgaggcagatgactgcgggacccacgggcttgattggttctccctgttctcaaggacaacatgttactgatttttaaagttctctaaattaatcattgaagtgtgacttgtcaatgacatttgctgctgaaaacagaactgtcataagtaaattgatctgctgttatactaataagatattatgaaatggtggtatgtggatttaaaaataaagttcattttttaatatagatataaacatttataaaaagagatggcctagtaaaattctttctttggtgatttttttttcaaagtgtatttccatttgaagtgtacaattcagtagttttcagcatattcacaatgttatacagccatggctactacctaactttcatcacccctaaaagatgccctggacctgttagtagtcaatcccaattcctctcaccccaccacctcctggaagtcactagtatactttctgtttctatggatttgcctattttcatctaaataaataatccaatatggaccttttgtgtctggcttcttttacttaacataatgttttctttctttctttttcttttttctttttttatttttatttttttattttttttgagatggagttttgctcttattgcccaggctggagtgcaatggcacaatcttggctcaccgcaacttccacctcccgggttcaagtgattcttctgcctcagcctcctgagtagctgggattataggcatgcaccaccatgcccggctaactttgtatttttagtag

SEQ ID NO: 45354 - DNA, 894 bp, Homo sapiens
gaggctgaggcaggagaattgcttgaacctgggaagtggaggttgcagtgagccgagatcgcaccgctgcactccagcctggtgacgaagcaagactccgtctcaaaaaaaaaaaaaaaagaaaaaaagaaattagcttcggatttaaggactcctctgagaaaaattgcctggcagatttgcctttctcgagagggctggctctgaggagggccctagaggagcctggaccctgcccccataagggagcacagtggaccttactcactgcccctctgcccccagcgcaaggccatcgagcggttctgcagcgaggtgaagcggctgtgccatgccgagcgcaggaaggactttgtctctgaggcctacctcctgacccttggcaagttcatcaacatgtttgctgtcctggatgagctaaagaacatgaagtgcagcgtcaagaatgaccactctgcctacaagaggtcagggcaacctccccctctcccctttccccatccaggcccctcctccagggctgcctgtcaagtggaggaagagaatggagcccctctcacctgctttttctttgataccaaactagccatcccccaaacatagtgaggcttggcctgtttcagtgtggtttgaggaacagggcatagagctgggccttggaagaacttgatctttgtagagttttatatctcaagatggaatcaaaccctcagttcccccatctctggagcagcagcattttatgttgccccatgtaatatgggaccagtaagatcatcacaaaatggttacattagtcattttctgcaagaatcataaagccaattcaaacagtgtatgtaaaagaaggaaatgaattggctcacagaaagtccaggtacacctgcacacagg

SEQ ID NO: 45355 - DNA, 1342 bp, Homo sapiens
caaggacatggggaacctgtatcacagccaccctgagggaagagaaactcattttcctgagatctttctaaacccaacccaggcttttcccccaggggtacatcccgtattttccacttatttccaaacccaagaacatccaagaagcacctattgtgtgcagagaactataaggaggccctggggtggtgaatcagaagctcagcctcagccttgcagtgaggttttcaagagcaaacaattgctcatggcaggatgggaggaggccccaggaaagcctcagaggagtgagagtcaggccagctcctgtccggagagccacccagcacctttgtggagtgggagtctatctcccagcaaacatctccaggtgctttgcaaaaaccgtcctatctagcaaagcaccacacggccctccttccctgctgcagggaagacaggagccaccgcagaccccctcacctgctcagagctctctttctgtgagggtcaggtaagggcagtgaccagagagagaacaaaaggaagtgaatgacaaaaagctgggttgaggaagaggctccctgctctgactgttccagtgcagctgctgctggctgccttctccagtgatctcgggcagctcccagaaatgggtctgttctctgctcagagggcaacggtccagcccgaagtcaatgaccagcctgctccctcgtgtgtactttgtaaatagctgggctccctaaggggaaacctcacctagatttagcttagagtaaggaggaagacccccaccctgctgaggtcacaaaacacaatgaaaaataaacatatgaccccaatggccatgccccaagtctactctggtcacactcctgagagccagtgagggaaatccagtggccgactgtgagagaggactctgacttgtaggtcacaagcacctggtcacccgaaggtcaggactgctgagggtttgctcaccaaagcaccacacattagagggagaatgagaggggaaggaagagagaaaagcgtggggcaccaggaaagtgcggcagagaaaacaaagagcaactaaaaattatccagagtcaggagtcgcaacctttggcatcacggctcagaggaagcccaagcccggtgctcctcctgctgtctacactgcctacgaatagtacctgtctgagtcagagtgacccgtgtgaatacagggatgcaggggtttggggagaggtgggaggggacgtggcttgtcacatgcagccatacagccagaagccgttccctcaaccaagccctgggcagggccacagcagtggctggcttgacccttccttaatccctaaaagctaaaagg

SEQ ID NO: 45356 - DNA, 922 bp, Homo sapiens
ccaagggagctgtgcaaatgagccactgaggggctggagtttgggcaggagcctcatcagcatgtcagcactgggcctcccagggcaaccagccacaggccacatctgcgatgatccaactcagccctaccagggccctcgcccagcactgttttcctttttctagagcagaaacagtccctcagctactctggcccatgctcccttccacaagggatggcatcttactcaatcagattgcacaagcctgacacggggcgtcatcccctgccaagcaatggatcttcaactcgttatctattttctcttctgcacatttctcatcagcttcacttcatcagccctgcctactccctgctccaagcttttaccatctttcttcaggacaacctttaaatcttctaactaggacacccatttgcttctagagtgactttcattttttaaaactattttaaaaattcaaatataatacacacagaaaaaggcgaacaaatcataaatatacaactagatgaattatcacaacgtgaatacactaagtaatccccatgcaggtcaaacagtagattaacagcttcagaagcatctatgggccccttgcaggaactacacctctctcctgcctaaagatatcccaaagagtgatcaatccttgtcaacagaaaattgcatcatgtcaccactgtcctcttcctatggaatacagaccaaagtcctgaccaaggctatgtggcctgggcatagacgggctcctcctggctttccagcctcatctcatagctccttgggacccaagcacacaaacctttaagttccttcaatccacagggccctctcccatgacagagcctccctactagtgggtcctgggaccaggaaagctccttcatcacttgccctcacagcctggttaagtcct

SEQ ID NO: 45357 - DNA, 1928 bp, Homo sapiens
tgtcaaggatggaataagcaggttgcaagcaatagactacagacgttcttggtaatcttcagggttttgtccaaaccagagatcctgaaattctatacccaagatctgactcgacctcctcgaggctagagctacatctaatctttatgatctggcatttttcacctcatacaaatataagcaggaggagggttttctttaaagctaaaccactggaaggtgtggatacaacgggttctttgatgggtccaccctacaaatactgagccagtgacttaataaaaagccccatgtatggagaggacataatgagcaggagataccatctttatccaaaattggtaggtactgccccagctgaaaagaataatcatagcaccaacatttttccaccactttttacgtactaggcactgaggcttagagaagttaaggaacttgcccaaagtctcagcaagaagatggtggagccaggatgaaggcccaaattacaacctcagagcctatttgtgaccctttactacttcagtgctgcagtacctacacatccagataatccactcgctccaagaaacgctggtcaagatgggctccagattcagtgaaatatcagtttatttcaacagaaattttgatttttctgttttgtgccagttcaatcgttacagaaaataaaaggttcagattccaatttgaatttgctttactagggagcttttgaaggaagtaaacttggctttttttcacagttacagaaaaacattttggattgggttcatgactcagcacgagtccaattcattccagttttagttcaacaatagttcagttcaagtagctaggtcagcaagctccagagaagtgggcgtggcttcccttacccgccaggagtgactaacaccagccgcgaggagagagccaagacggctgcacaggatgcatgggccacccaggcttagggctttcagtaaggactggggcttgctggtgcctctcttctcccttcacttgtcaccagcgcccttggttccatcacataccccacagaggggatacccagccaagtccgaacctgccaggtctccaaacaatagatgtcacatgggggaaagcagagtcagcctcccatattctccccagggaaacaagcttcccttgttttcccagatgtcaaatgtttgggttgtaggattatttaaatgttattcttgagtgagtcaggagctagagggaggactggactgtgtccctagagtctgtccttccaggaaatgccagtgtttgactttcacctgtcactgaccactgacctttgtttccagagccatctagggcagaaaaaaaccatgggcatggaaactgccatctgatgacttcagaactaatacatttgcctattaatccctaaaacatattttaagtgatctcctatattctctagtgtttaggaaaaaatgattttccctttagacctggaattcatgaatccctagcaggcccaaagttaagcttcatcaatgttatgagtattctaaaattgtgcaataaacgttaccagattctcaaagagacttttgatcccaaacacatgaaaaactacttttaaaaactatatactactagcctaccaagaggctactgtcattctaggttacctattctgcattttgtactataacaaatatcttctttcatatacacaatgtacttccaagtcccagaccagcccgttctagtaaaattcaaaaatgtaggtatttccgaagagcatcttgtaaaaggtcctgacctaggaaagttaaccactgcacatccttcctaagagacaagacataattttaggataactttacagatggagactttatagattagccccaagcaacccacttctcagacaatccgcttctcaagcaacccacttctca

SEQ ID NO: 45358 - DNA, 1627 bp, Homo sapiens
ctgaactcagaataaactcatgtgtcctagacataatctagacataatccttgtccttgagaaactcacagtcctctggaagacagtcacaaacatttactgggctcctgctacgggccaggtatcatgccagttgctgaggacggaatagcgaacaagacacaccaagtgcctacccttgtgaagcgttgagtgtaaacattggaataagtcactctaatgtataacagagagagcaaaaagtttcatcaccccttggactggaggcagctgcttcaactgttacatcaccaaggcttctgagggcttttctagcctcagcaagaaagaggaccatgacttattatcaattgctattgctaatgatcagtgaaggcccaggcagcagatatctgccaaccttgatacaatgagataaacatgattgtaaaggtatgtaatcaaggcttagtgggaggaggaagcccaggagtaagccccatggactctagcagcattttgtatgctctaaaacctcaggcaggctctcatccatgcagagagctcagaacctacagcatctccaacccagtctttgccactgtaaattggcaggacctctctcttagcttatctcagcttccacctccaccacaaccgccacttgggattcctgcccagattttgccctttgggaagagcctgtgatgctctctggaaaatcagcgccaggctctgatgggcagcagcctttcccggatcccatccctggctgacctcattccagatccaggaagcctgatgacttcctggttgcctcacccagtctgacgcagcagtacccaatcaccccctctgacggacatctaaggtactccctgaacatctgggggtgggagcgtggcaaggagcaagggtcgcatccactccctaatccagccaggaaagggcagaggagagagctgctgcacgcatcctgttcccaagttatcttttcatctcagccaaccaaggcctctcccatcacctcagtttcccctaacggctacacactttgggaacacagagggcttgaccaccaaccagctgatggttctgtgtgcaccaggttgtggttgccaagattacacccagtgagtggaaagttccatagaggaatcagggaaagttccaatggaggttcacaaggcgcaactgatctggcatcacttgaacaagcctgtgagctaaacaggacagagaccaagccatagtgtggtgcacaataaataagaatcctcatagtggctgcagattatagagcctttgctatggacttggcactgtgctaagtgagcattttattcttcccaccaccttcctaggatccttacaaatattgtccccaacgtacaaatgggaaaacaaaggctcagcaaggttaattaacccaaagtcacacaaacagtaagagtaagagtagggatttgttttttgtttttgtttcatcaacttttaagttccagggtacatgtgcaggatgggcaggtttgttacacaggtaaacatgtgccatggtgatttgctgcacagatcagcctatcacctaggtattaaaggagtcgggatttgaatggaagcattctagttccaagtcccacaaccttac

SEQ ID NO: 45359 - DNA, 3605 bp, Homo sapiens
attaggccatgagggctccaccataatgagtggattaatgctgttataaaagggcttgaggctgcaagtttgctctcttgctctttttttcatgtgctatcttgcccttctccctttcaccatggggtagcatagcaagaaggccctcatgagacgctgataccttgatgttggacttgccagccagcagaactgtgagaaacagatttcttttctttataagtgacccagtctctaggattctgttttgccaatgcaaaatgaattaagacaactatcctgctacttattcaagctagaaactttggactgtcccttgaaaccaccctctccctcagcccacatgcaacccatttcccagtttccatgattccaccctataaatatctctggaatctatcctcttctctttatatcagctacctcttccctaaattagtccttctcaaatgcgttttggatgctgtcactatgtgacttttaaaatattcttcatccgcttcccattgccctagagataaaagcccaaactctttaaggtgcctacaaggccctttaaggactcacctctgcctgcctcaccaatttcttctctcatcatttccttcctcctgctctctgttctaactatagagaacttttcattttcaatgtcattcttgcctttgggcctttgatcctgtgatctgtgctgcctggcacatactccctattgtatgagccaactctgccacactctccaccaccatcacactcccccttttctttacttcctcctatcagacttcccgtgcccccaatccagaggaagttccccttccccatgttcctacagtaccctctacttcctccctcctagcaggtcccacattgttctgtaactgtttaattatctgtcccctctactacgttctaagccccatgatggcagagactattctgatcaccattgattctcccgggaataaccaggacctatcccagtgcctgccacatagttggcactcacaatatttgtttaatgaaggaagagaagaaaggaataacataaattaggaattctcaatgagtagtccagaactcaagcccagtacactgggaagagacttgccagaaaagccagggattctctgactcaatacctgccccagttgagtttgtgcaagacctagcaacttgccccatagtacccagaagactattcacttagtttattcaaggggtcagccaaaggtctgtgtatgtcactgagttctaaataaagaaaaagcaaatcttaattgctcaaaatcaaaaacatctcctgggtgaaatgtaaatgtagtttcattttcaggacagaatctgtccaggggccacattgtcagcctcctctcatttttctccaggatagtcatgctccattgcccaaccacaaagggtaaagagtaggaaacaccctccaatttccagagagcctagatgaagagtttaatcacatcctcggagctgggagaaaagagaaggccgaaagagcctctcccaaatccaaatgtatatccataaatccgtctgcatcccgcccaccagccttgcatctcaggaggcttccccatctacagaagttgtgaagaagccatcaatgccttgtgctcagccccttccaatccatgggctccatccaccaagtacacctccatcctcttggctcagcccaaattgttcttcagtggggaggggtgggaggaaagctacttctcttccaaggtgtagaaatacagcctagcttttaagtgcacttcaagtatgtttcctagaagtagctcacctacttccctgaccacatgggtctgcctgaggcaagagaatgcaactcaaagtcaaaaatgggagaattaaaatattgagctctatgccactcaaatcctctggtagcccaccagtggaagaaaaagcaacccgttccccaacctcaacatatcactcttctgaattcaaatatttggctagttagggatactaaattcctaaaagattagtagcactacagttttaggttccctttgatccagaccaaacatttacacattgttttctcagtctgaattcctttctcattctccattcatctcatctccctccctcatcaaaagcctcccatcattctgcaagacaatatttcaagtaaccctcattagggaaggctcccctcttccccagtcacaaattcccgttcctcttgccttcgcagttctttactttcaattctaccatgtaaatttgtaatctgttttggattatgctgtttgcatgctgttttctctcccacagagtctaaactgccagaaggtaagaatatcctgttttcatgcctagtctctacagcacctagcacaggattctacatagaggtgctcaatcagtatcccctgaaatcaaacttgtagaatggagaaaaattagctcgagcttaaaaggcagatctatcaactaatgaatgggttaacaaaatgtggtatatctatataatgtaataccatatagcaataagaatactgatacatactacaacacgaataaacctcaaaaactttacccgaagtgaaagtagccagtcaaaaagaccacatattgtataatcccatttacatgaaacatccagaataagtaaatctggagacatcagattgccagcttcataggactgacgtggggtgggggagaatgaagaatgactgtgctccttttctaggactaccgtaacaaagtatcacaaaccaagtggcttaaaaatcggaagtttatgtcacacagttcttgaggctaaaagtccaagatcaagctatcatcctctctctgcaggtgcaaggaaagggcttatcccaggctctctcctggcttctgagttccttcgcctgtggtggcataactctaatcttcacatggcattctcccagagtgtgtgtctgtttccaaacctcccccttctaaaaggacaccactcatgctggattagagacctgccatactccagtatgatctcatcttaactaaatacatccacaactcaatttccaaataaggtcactttgaggtactggggataaggacttcaacatatgagtttggggggacaccattcaactcataacactgctgatgttttttccttttggagtggtgaaaatgttctaaaatcagattatggcgatggctgcatgactttgtaaatatactaaaacagatgaaattgtatactttaaatgagtgaactatatggtatgtgagttgtatctcagtaaagctgtttggaaaaaaaaaaaaaaagacaagagagcttgggtttaaagagtctgcccaagctcaataatcaactcaatggtgtgtttgggaaaacaggatctctcaacaagggcagtgagatataaacttgcagaggagccaagggcaacttgcctttatatatccacgttacatgtaaattcgctttgactcagttgggtatacagtgattcataccatcattctctctactctgcacgtttgataatttttcactataagaagctgtaagagttaatcatgcatacacatagactataatatcacacagccacgaaaatgat

SEQ ID NO: 45360 - DNA, 1436 bp, Homo sapiens
tccatctaaggccaacagggcagttgacagcttcctcccattcattttaccccgtgctcctgctgaagagcagccaggagaaataagcttgagacaaaagaaaaccgtggacatccttcctggctgcacaggcagccctggctgcggatccctggaaggagagccggaaccagtgaacaaatcccaacctcatattggacagttcagggcctcatctgattctgcaggcacagaaaagaggtacagtttggcccactggagaacactgcaaagcagtgttttcgagatacaattaggtcaaactgggcatcgctggagagcagaagtaatttcctcccaggggcaatgggttttaaggtcaactcttcttaattacatttggaaaccaactcaggggaattccctctgacttcattcttaaatgcttttctgaccctgcaaaacacaaataacagtgtctatttattgtgctctcatagtgcaccaggcaccctgtaaatcctttaagagcattacgttattgaattccacacacatcctatgaggttattatccccatcacgtagatgagaaaactgagactctcaaaggttgagcgacttgccaaagcttacacctccaggtagtgcaaggagccaagcttgggatgcacacctgcctggattacactatcacattacactgacatgcaaattctaaccagggcctgggaaaggtaggaggaaagggaagggggagagtagaacaatgaagaagaaatgccagtgctaaccaaaaaagagcccaaagcataatgagccaggactatgcatctgagaggcaatatactgccccagttaaaagcctggacttgggagtcaaacagatctagtttcacatcctggccctgctcttcccacccacatgacttttagcaagtcacactgctccacacctcagggtccccatctgccaaatagggctaatataggaatctactcttcattggttggttgtgacaagtgaagtagatgacccatataaataccacagtacgatgcctgttatacaggcatctcctactttttagctatcaccatttgttaatatgtgacaatcattcctagttatcctcagccagaagttccctaagggcagacagagcatcagagaacatgacccggaacttgggtaatgtagataagcaataaccacacagattattgctcaatatgtttttttctcttgtcattttcatgcttgaagaaagctgcaagggccacatgtcacagcttgcatccccaaaacacctgaaaacatttgttctggacgttgcattagtacaaattagcatgtattgaaaacctgcttgctatgtgccagacgttgtactaagtgcattgtcatacattatctcctaacctcacaaaccctgtgtgtgtgtttcctggggctag

SEQ ID NO: 45361 - DNA, 581 bp, Homo sapiens
ttgagcaaataagatctctctttagctaactgggctggagcacaaatggatggggttagaccaaaggacgtctctccctttctcaagccatcatcatttggacttgaggaaggacagtgtattgaagaaatgagagtcctagaatgtgtttaagatactagaagacagaagcatatggccaaagagcctctgggcaaagtgcctactagttgagccattcatttgcttttgaaggtgatcttgtaatagagtgatcctgctcactagtaatgcggcccagtgagcatccaggaatctggttgagcaattcagtgtgccctccttttgggaaaaagccaagaaaggacaggatatggcgctggggctcacataaccctgttcatctccctggatgcctgcagctaactaaggaggattccatttgatttcagcaaacaagtttttgtcaaatatgggttcctgggttggtgaggtagtctcaggacatggggaaaagaacatagagaaaaaatatggattaatgctcaaatctgtgggttgtgcaaacagcagtctataatttctgctctgtagtttccctt

SEQ ID NO: 45362 - DNA, 1671 bp, Homo sapiens
acaagctgtgagttgtattttaaccacactcgggacagcactcatcctcctttgcaagtgcccaaaaagcccaaatttggaataaattatattctccctttccacccaagcctaaaagctattcccatccttttgtatacaggaaggtccttcttcatccttttcttggcagtgatgcatttgattactcattggcttccagggggttctggaggctgccaagaggagacaggcagctctccaagccacgcagccttatctgcgacgtctgtgtggcagaacgaaaagtgggacggtcagtggggaaacaccaaatgttttcagagtcccccggccaagtaaggagagctcttcatggctaagtagatggggaatggccaaagaatgagccacagacatagccatgcatcgtgcccattcacctcctccattacatgaatccagatatgactgcatctgatggcaaatcaatgtgcaagtgcctctgagccaggctaccacccaagatgaatgaggttaagaagatggaagagccgggcccgatgtagccaggagactgttgacgatgccctgttgacaaaatctcagatgcggctgaaccagaacacatggaacaatctgagtctgaggctccaagccccagcacaccctgctttgctcgctcctctctgctgttttcctctaatctccttcatttcctgccacacactaggctggcgctagtaaggcagctgccaaagacctctggtccatccactcccttaatctcacacatacacagacctctgtgtgcccgcagtgaactccaggggcccctgaaatactgcctaaggaaattttagcaacacatttagcagtccagcaatctcacatcgagtcaagaggctgtggaaaggctctggctttgcaagatgctgcctgaaagaaaccaaggactgagagcttggggtcactccattgactgcttccttccagaacagcgacacctgcgtccggcgttgacacagaagttatttgtttcattttagacaaaggaggagtccacttactcattcttctccaggtccaggatcagttctcgcccctcagccattaccctgagctcagctttgagtggatgctaaaagcaacaacaaaacaatgtcagttcctaaaagccggcaccaggctccctgggtcgggcacaggatctagcacagcgctccaacattgatccacaggaagtgaatgagcaaaggtcaattgcatttccagcccacatgtaaaatgacctcaatcccagaatgacccaaatccttcccccatctgctttctcctgaaaggcatagagaagaaactccaggctgcaatgtggtgtaagtgtatgtatgtggtgcggtgaagggaaacactggaaaacacaatctccagcagtaaatgtcctgcagagtcagatctggattcaagcaccggctctgacacctgcagctgtgtgaagtcggacatgttgctgagcctccccacatctcagtttcttcatgtatgatacagagatagtaatagtcaatttgatggggatcttgtaaggattgagtgagataatgagcataaataatgtatcacagtgcctggcacacggcaagccatgatacatattgcctattatcttgtaaaatactaggggatcctctt

SEQ ID NO: 45363 - DNA, 1558 bp, Homo sapiens
gggatggagccggggaggggattggtgtctgggaaactagtcctgagaaacacggacatcacccggcatcttagctggaaacatcgagtcagaccccttcgcttcacagaaggggaaactgaggaccaaagaaggcggccgtcgggttggcgtggaaagagagccctggtttccagtgccaccgcggacctcaacccgtggcgtggccttgggcaagtcctttcccttttgtgggcctcggtttccccatctgtgaaatgggtgcgtttgacttggccttcagtagggctcctgccagctcggggatccgaagtgtgtggctgcagatacccagcgagccatcccctagccaaggctaccacagtctgccgcgggcattttatgtcctaccccaccagtgtggcaggcaccgagcctggtcccaggaagccgctcccaggccacacgggcagggcgctcgggatgctcggcgttggcgagtgcagcgggcggtagagagaaagacagagagagaggcggagcggacacgagggaccgtgagaaaacggaggaggataagccccgagaacggcggaaagagaagccaaaagcagaaaaacagaggaaggagaaggcgagaagggaaggctagccagtgagcggaccggctgttttctggctgcgccgggtttccccgacctctgccacctcccagggcgcagaacgtgggaacaaagcccgggctcccaggctggggacggcgggggcgcaggccccgcggagttgcgggaggcgcaggggtcgcggtcccagcgctccggacccgcaaggctactcccaggtctccgggccacccagcctccatccccccgcgcctggccacttacttgtccatccaggctcccgcgccgcccgcggccggaggggctgcagggcaaacgccagcaagcagagccgggcggcgcctgcgccccctggcatggtggcggcggcccttagcgctcggcgctcacacgccctcagccatacctgcccactgcccggcggtggaggcgcgtctggaaccccccggctcgccccgcgcctccccacccggctcccagccctctgccgagacgctccgcctccagccccgcgggcctccgccaggggatggaggaggggaggctccagcccggagggggctggagggaggggccggggaggagctggcgagactcgggggagcggggctggctcaggtgagggagaccgcggggaagggagaatccgagccccccaggaggagggatttgtggtggacgcggcctgtagagggtcggggactcgggcttctaggagttaaactggacccctctccgcacagcggcccgtttactgtcccgcactgtgccagacgccttgggtgacactcagaggtgattcacccagcgccgtcccccgggggccgccactctcggagacaggctcagaaagagttaacccaaccgccaggcacaaagaactaagtgctatatggacttctttttttttttttttttttttttttttttttttttttaagcaggacacaaatcca

SEQ ID NO: 45364 - DNA, 900 bp, Homo sapiens
aagttaataaatgccactaagaaaaggggaaacatcacagctacaccttcaaacaccagaaaaagaatttttttttttttttttttttttaggttggggtatgattttgatctgggcactaacggggacactgattgcttttgccagtaagtcaagaccagcagataaaaaataatttttaaaaacctcgtgagactgatttgccgcaggacgggaggaggaagaagcaagcgtggaaggtgctaacggaggaacctaaacctccatcctctttgcctgggaggttaagaactacagggagaggcgagagagactatgactgccctacggctagagtagccgcgaagagaacacttccggggcggggctatctggccctttcctttccgcgtgtagaatgtggggcgcctgtaaagttaaggttcacgattccttggccaccatttccatcactctgagacggtacctgagattgggggcgaccatggcaaaaagcaagttcgagtacgtgagggacttcgaggctgacgacacctgcctggcacactgctgggtggtagtgcggctggacggccggaatttccatcggtgagcgagctcgactcggggcgtcgcgatgcgccagcgcttccggggaatccagcttcttcccttgcaagtcctcccgcccgctccagtcacggttaccagggtaacgcggtagccaatgagtgcgcagcatggagcattgccccgccctgcgtgttggctaggacagtgcctgaacgctggctgttagcgtaattgaatgggcgatgtgctcccgtgatgaggatctggcttggagtgcccgtgttaagtgaacagagacttgttagcaaggacctgttgttaaaagtcactctcatgcacaatatttaa

SEQ ID NO: 45365 - DNA, 1681 bp, Homo sapiens
atttgtttatgcacagggtataggaaatggaggacagacacccagtattggctgacatgcatctattatgagctctgtaggcagtatctctccatcctgaggtcagttctataaggtaggtgctatttatatcatatttcagacgagaaacacgctaaatactttgagcccagataggctattcttcccaccctatcagtagtactcagcatggaagcaaactgagacattcattgccttcctccagacgcttcctgccagctcaagctaggatgcgatcccgagctcattcccggggaacccagagtattaacaaacaccctaagtgataatgatacagacggggaaactgcgctggagcaggtcaagcagcagtcgacagcgttaacctgtcagctatgggaggaggcggtgcgaggcgcgggctggtcggagccgcgtaccacgccccccggcccgggtggaacgaggacaggtgctgccctcccgcggccgcttcggcgcagtgcaaccccgcgccgcggctgcgcagtgccgccctctggcggcttcgttccttcttcccatcggcctcggcttgcgggcctttcaaacatggaggagcgggagcggggggcgaggtcggctggcgccgggagccccgcgcgcccgcccagcccgcggctggatgtcagctctgacagcttcgacccgctgctggccctgtacgcgccccgcctgcctcccattccctaccccaatgccccctgcttcaacaacgtggcggagtacgagagcttcctcaggaccggagtccggggcggcgggcgcgggcgcgggcgggctcggggcgcggccgcgggctctggggttcccgccgcacccgggccctcgggcaggactcgtcgccgcccggacgcgcccgccccggaccccgagcgcatccagcgcctccgccgtctcatggtggccaaagaggaaggggacggggccgcaggagcgggccggaggggtccgggtcggagcaggaaggcgccacgcaacgtgctcacgcgaatgccctgtgagtccgcgggccgggcgggaagcggggcagccgccgtccggaagctggctgccgagggggcgtctgcggggcggcggtggccgggcgcgggtctgcacgtattgcgggagcgccttggtgaaaatttgcggggatcatcagtgactatggggtggatctgcttgagtaatgtgggtaatgagggcgtggggagggtcaccctgagtaagaaaaggggctgtaggagcaacagagggagagtggtaaggctgtagtggtcataagaagccgtgggaaaggtcttcagcggtaatcggggcccatggaagggtcacagaggtgatgagcctgccgagagggtctacaggattgatggaggacctggagaggtggcggggctacagagtttgggggacatcatagggacgtctacagaggtgatgagaggtcttagagaccacagtgagaggtaaggtggggcggaaaacgggagacgtgggggagcgcacagccaatattaggggaaggagagtatttggtcagtgggatttgaggatgatcggatggagtgtggggagatttgttcagatagcacaggcgcataatcccataacccctgtacattgacagctccttctcgagtgcgataagcagaag

SEQ ID NO: 45366 - DNA, 526 bp, Homo sapiens
atgttggccaggctggtctcgaactcctgatctcaggtgatccacctccctcggcctcccaaagtgctgggattacaggggtcagccaccacgcccagccgccctctttaaatatgtttggtagttacatactttcagagaatgtcattcctctgactgaagcacttgccattgtttatcactagataactatttgtgactctgattaatgattattttctccacttgaccttcgcatgaggacaacaactctgttttttacaagcacccagatcagtgtctggttcaacaaatatttgttcaattaaaagaataaaaagttaaatgatctctaggcatgcccaaggtgacagctgcaattaaaatttagggaaagacagtaaaatgcgcagagcagtaccttttgcttataaagaaagtaaaggcaacagtttaaatgcaattttttgtttctccaagttaatcttaaaaattaaaaatggaaactatagattccaaaatctatgatgaaaaatttcagaaagta

SEQ ID NO: 45367 - DNA, 576 bp, Homo sapiens
ctcatggtcttatcaggggtttctgcttttgcctcttcctcattttcccttgctgctgccatgtaaaaagtgcctttcacctcccgccatgattctggggcctccccagccatgtggaactgtgtccaattaaacctctttttcttcccagtcttgggtatgcctttatcagcagcatgaaaatggactaacacatgcttctagagctatgtaaacacagccagtattcagttagtcaagggtcaactattcagtttgtaaattattagtgttcatcgtagccctcctctttattctccattttctgcttatttgactacttgacattcagataatatcaaattattttacttggtaagtttcagtccagtttttagaggtagaattgattaaaagctaaaatgaggcttttacttacaggcagtcaatacttcttatctacattaagaatcatcagtaaaataattaacaagaaaaaacttgagcagtccttgttggtattttttcctcttaaaagttcaagaatatgctttgctaaaacaaaactatacaccaagagaaaaggtaaagtatagg

SEQ ID NO: 45368 - DNA, 488 bp, Homo sapiens
ccatgcccggccgcattttagtaattcttacaatatttccaactttttcattattctttctgttatagcagtctgtgatcagtgatctttgatgttactattgtaattgtttggggatagcatgaaccacgctgctaattgatagtaagttgaatgtgtcctgactgctccactgactgcccattcctgccgctctccctctcctctggcatctctattcccttagacacaatattgacattaggtcaattaataaccctacaatgacctctaagtgttcaagtgaaaggaagagctgcacatctcctactttcaatcaaaagctagaaatgattaagcttaggaaggtatgttgaaagctgagacaggctaaaagctatgcctcttgtgccaaaaagttaggttgtgaatgcaaaggaaatgttcttgaaggaaatttaaagtgctagtctagtgaacacaacaatgataagtgaaacagagcttca

SEQ ID NO: 45369 - DNA, 1809 bp, Homo sapiens
gataagtaacttccccaaggttataaagcttgaacccagctttgcaggttctgaaacctgtgctccttaggcactctattgccttcttggtagcacagaaaatataaaaatatggtcaagctctaagttctatctgatgtatcagacaaggcactggaaattactttgtttcctggtgtcaagaaaacagtttgctatctatacttcctgattttaggttaggtgggtggcacaaatcaactgtttttctcaccacacttattgcataatcattaaagccccaaaggaagaggactgcttaaattcttaaactttatttcctgctggcctagaagaccttacttaaccactgttatacctgatatactcattttaaaagttaaggttttccttgtgcaagtaagagactaaagttatttcagtcttaaaggaaatcaactacgtactggtcgttttacctgcttttaaaagcagatcaacaggatataaacctgggttgtttttttccttaagaggacatttcttaatgacctcttaatttaatcgaatggaacaagtagcacaccaaaaatgatgtgtagtggaaaaagaaacagaagaaaaaatcgcaagaagtcatatagtgatctactttcactagtgttagaaaagcaaaggatgagtgtcttcttgagtaacttcaggctgaccacaatagccacttgttacactactaccacccactccaacacttcaggttcattaggaattaagaggaggcaaggaagataaaagacacaccccaaccaggtctaaggtctctccgtactacaccttgagggacacagggaaccagtgcattgtgccccccacccccaaaccttccctgctccccaggaggcaaagcccacggcctggggccaagacagtcctccggccagggcagtgacccagcgccaaacaacccgccccttatgaccaaagcgtcggcacccaggggttggaataggggaagggacgggaaggcctggaaaggagagaagggtggccaagaggatgtttttttttaaaacgagggagggtccctccccagcctcgccagcggggatgaggcccggggccgggaaggagcgggccgccgccatgatggggctggcagagccagggggcgtgacgtgggcaacccctagcccaaggccagctccttctccccctcccccctcccccacgtgggcctcggccacaactgccccccgatactcacgctttgtccaccagctcgcgcaccttccacatgttcaacatcgtgccccgcgcgggacggtccgccgcctccctctcctgctccccacggaccccggaacacttccgtaccggggcagttccaggccggggtcaccgccgcccgccgcctcgaactcccccagtcagctccttcctttgccacagcagcggcgccgccggtgacacgtcgagacgcggcagcacaggcgctgcgtggagcggaagtgtccgactttccgccgctgcgcgcggggcacgccgggacttgtagttttccctgagtgccgagctcggccggttgagttgggagagctgagaggttgagttgggagagctgagaggagttgggatggtttctcttaagctttcccagtccccggccccagacctaccgagccagaaattttggaggtggggcccagcgatctgtgcttttacaaatcctctaggtgattctgatcacgctcaagtttcagaaccactggtgcagggtctagtcacactcaaacacttttcaaatgtaaggcagtattactatgttattag

SEQ ID NO: 45370 - DNA, 2597 bp, Homo sapiens
atgggcatggtggtgcatgcttgtaatcccagctacttgggaggctgaggcaggagaatcgcttgaacctgggaaatggaggttgcagtgaaccgaggttgtgccattgcactccagcctgggcaacaagagcgaaattctatctcaaaaaaaaaaaagaaaaaaaagaaagtgggctaatacgcgcaataagagattaacaacaataataataaatagaatagttggctgggtgtggtggctcatgcctgtaatcccagcacttgggaaggttggaaggtaggaagacggcttgagcccaggagttttagaccagcctgggcaatgtggtgaaaccctgtctctacaaaaaaatacaaaaaattagcctggtatggtggcacattcctgtagtcccagctacttgggaggctgaggtgggagaatagattaagactgggaggcagaggttgcagtgagccaagactgtgccactgcacttcagcctaggtgacagaatgagaccctgtctcaaaaaatttaaataataaaagagaacaattataacaatatactgtaataaaagttatgtaaatgtattctctctctctctgtcaaaatatcctattgttggctgggtatggtggctcatgtctgtaatcccagcactttaggaggacaatgcccaggattgcttgagcccaggaggttgagaccagcctgggcaacataccgagaccctgtctcttaaaaaaaaattaagaaaaagatcctgttgtaccatactcaccctccttgtgatgatgtgagataatacaatgcctacttgatgaaatgaagttaggtgaatgtcataggcattgtggtgtagtattagactagtagtgaccttctgatgattcatcagaaggagaagcatctgtttcaggtgatcctggatcatccagccatgacaatatccatggttggatgtcaggagcagaaactctccatgactaacgggcagtggtagacagcgtggatccactggccaaaggaatgattcacattccaggtgggatggagctggatggcatgagatttcatcatgctactcagaacggctgctcagaacattgagcaatttaaaatgtagtattgtttctttctggaatttcccatttaatattttcagagtacagttgagcgtgggtaactgaaagtgtggaaagcaaaactgtgaataagaggggacttctgtacattcttcttttacatcatatttatattctagccaatccttcctgagaatcagtcttcagggtattgattgaatttttgtagcactttagactttctgtttagatttggaagtcaccaaggtttggttcacaattcgtttacaagccctccctgcagtgaggttacttcttgatattctcattctttgctgtgttaatttgactaatttcagaacatactcttttcttctttttaatgctacgtatctattctggtgacaccctgttattagagaatacaagtgtcatgacttttgttttgctttgtttggaagtggtgtctgcccatggaaactgattttcctgtgtgctggcagttctccaggaggatcacttgcgtcttatggcctctggtgggtggtattcaaacctagttcctcttgggaaggtttatgagaatttccctgtttttgatgattcatcctgaaaagtggtgggtcactgattgaaatccaacatctgacagattcaaacacctatggggaggggagggagtggaaagtaagatagcaagtagtagtagtatcatttttaatacagatttattctgtttcttcaaattttttctttgaaatgtttttattagtttttttaattacaaaagtaaaatatggtcatatgtcctcatctatctaccctttgatgcagcaattcaacccgtaggtacttatccaagagaaataaaaagctatatcaaaattctcatgtaagaatgttccatagcagcttttttcacaatagccaaaaaccagaaatgacccaaatgtccttcaacagggtatggataaacaaattgtggaatatcattggaatagactatgactcaccaacaaaaaggaatgaatgactgatatatacaacaacctggatgaatctcccagataaaagtgagcaaagaagctgggcacagtggctctgtagtcctagcactttgggggctgaggtgggtggatcacttgaggtcaggagtacgagaccagcctggtcaacgtggtgaaaccccgtctctacaaaaattagctgggcattgtggcacgcgcacctgtaaccccagctactcaggaggctgaggcatgagaattgcttgaacctgggaggcggaggttgcagtgagatgagattgcgccactacactccagccttggtgacagagcaagactctgtctcaaaacaacaacaacaacaaaaaacaaacaaacaaactaaaaccaaaaattagccgggtgtggtggcaggggcctgtaatcccagctacttgggagactgaggcaggagaatcacttgaacccggcaggtggaggtagcaatgagctgagatcgcaccactacactgcagcc

SEQ ID NO: 45371 - DNA, 878 bp, Homo sapiens
tcctgggaaggtggcccagtaggtcttagccttattttacccagcccttattcaagatggagtcattctggttcgaaggcctctgacaaaagccctggagagtccggggttgtcacacaccttgtcagtcaagcagagcctcccgacggatggaagagtcccaagccattgaatggctccagaggatgctgacgtggtgtccttcagagagctggggcaatgacaaaagacacatacaactgtatacttgcaagtggaaaatccattgtgacaacaggctacatttgagttaccaaatgcacttggccacctggctggaatttgacctccatggcacgtccggagaagtcagccgtggctccagcctgggctgccagtgcaagaaaagtggttcagcgatcaaatctttcaaaatcaatttagctcagactccaaagtcctggctggaattgacagcaacttcctccctggtttccttaaccatcagataaaagtgctgagccgttttaaacccttttgaagccaagactcaccttcaagtgaaattttaaggggtgccggcaaagagatttgacttaattccagacctttccttcctgctggtctgaataattagcagagttatcccaaccttctgtatctggagtttatgtatagggctctgaaataggaaatattaaagttgcctgtgcctagtagtggaataaacagatttctacccaccttctctgttctatgaaatggggatgatgataatgaactctgctgggtgggtacgggccaattagtccaaatttgtaaagctgagtcttgttacagctttactgcttgtggagaatgggcagcactttcctgtgactttgcatgtgaaactaatt

SEQ ID NO: 45372 - DNA, 522 bp, Homo sapiens
ctatagtaaatttaccctcaattcaaaggggacacattctgaagttctctgaaagccagtatttataattacaagagtggttaccaccaaattaatgttgatgtgaattccttacttttgtctctcattttccagtccaaataactttatatcatccatatcaattattcaatattatattacttattcactataatagatgggactgaaattatccttctcgctttgtaaagtctcccttggttacatcattgtacatatgatgtaaccaaagttcaaagtggcagtaccttgtccaaggtcacagttaagtctgcctcaccaggtagagttaggagttgagaagaagtctcctaatttaatctactctactttttgcccaatctgcttgtcaccctttgaggtcagttctcccaccactagtttgctatttcagctgtttctgaccactggcctgatccaatgcattaaggatacttttctttgtgctgagccatacagaactaattttttctggttttt

SEQ ID NO: 45373 - DNA, 1349 bp, Homo sapiens
caggttcccaccctggggattctagtttaatagatctgggacggaggccccggattttgtatttttagtaagtagcccaggggtttctgatgtgcggccaggtttgagaactcctgagctaaaacatttttacatttcaaggatgggactttcctggggtgacatgttattattggcagagctaggactcgagcacatgttcctcctggattatattttgtactactgcgacctaagagtctttgcagaactcaccatggaatgatcatcaaactgcctctcagcccgcaggcacaatgctcttccttatttggagaaaactcagtgtgtctcagcagccccctctgctgtcaaaaatccctagctcagtctagctgagcgggctttggggaagcgagcagggaggagagcgagcccagaagaaagtagtgtgaaaaatgctgctatggggaaacccgtttgcaacctggaagtgattggaagaaatcttgcaataagatccttaaagctggatgacatgtgggggaaatctacctgactgcctcctggtctggaggagagaatttgttttgttttattttggtttgttttgttttgatacagggtgttgctctgtcacgagagcagtggtgtgatcacagctcactgcagcctccaaatcctgggctccaagcgatcctcccacctcagctttccgagtagctgggactacacaggcgcctgccaccctgctctgctaatttttaatttttttgggtagagatgggggtgagggagataggagtcgggggggatgcttgccttgttgccctggctggtctcgaacttgcgagctcaagcagtcccctctcctcgatctcccaaaatgctgggattacaggcgtgagccaccgtgtttggtctagaggagggaatttgaacaaattatttcacttccctgggcctcagtttcctcatctgaacaagggccataatgacacgctctgtcccttttcttcctcagaaactattttaatagtctaattaactaatggggatggtgttatcaatgtttggtccaaagacacacagctatttagagatagagctggactttgaactcctggttcccagttgagatgtatcatacaatttctgctaaccaaggagagatgtgttcagctgcttctagagggacagaggcaagaaaaacttacaagggaggttgaggctggcttcatgcctaaatgaattaaagccaggtggccactctctcatttatatattcattccttcactcatttattcagcttacttttattgagcacctcttacatgactgaaactgtgtaagtagtggtgatattatg

SEQ ID NO: 45374 - DNA, 756 bp, Homo sapiens
agttcagcatcaaccttcagcttctggaaaacacctctcagataaagctaaaagaaagaaagaggaaaagtagtactctatcccctgaactcagaactgcggatttcaggcacctgtgagttgttagccagtaactgatatgctctgtggtcttgagtttggtggtaacctgtatgtatctgtcttgcttacccatgtaataaagcttctattttacatcagcccccagccatcttttattagctaactacagactgtgagcgctttgaaggcagagacatcttcaattactccgttgtcctgacatacagcacttggacctgacaggcagtgaggaaatgtttacttaatgagctaatcacttatgaatcctcaccttttattttccttcttcactgggggagagccaggcgactaccttcactaaatgctatttccccacaaacatatttctctgaaagacaaattcagtgaagctgagagtcgagagtgattgtaacacattcctcctgacttgatttttgctggatgtgccaactgatttccattggctgcagtctgatttttttttttttgaggtctgtggcataggtagatgtttgtttttctggctaatgtgcatattcattttgtgtttgccatggaaaagactccacctaatctttaaggtataaatgtagtattcagttgtatggaactcactaaaatgctctctggattttctaaaccctgtacccccaggttctgttgtgaccc

SEQ ID NO: 45375 - DNA, 960 bp, Homo sapiens
ccgtgcatagagagttacagcattaggactgtgtatttgccatccatgagctatgtcttaaaaatacaaaaacgaataaagaatattctacctgtaaggctcatacatgcatggagtccacagttttgcagtaacctgttaaagttggcactatgatgccttttaaacagatgttaaagggatgttaagaaacacggtagcgatcactcagctagtgagctatagaacagtgatttcagcccatgtctcttgcttataaatccaagacctttacactgcacccaagctgcttttaataataatgatttatggtacagagttgtggtttgaactgtagtgtaaaccagaggtcaatgacctttaaaaagtggcttgccaaaattccagtctttttccttttgacatgcctggacaaggtcagaattggagcagatcacgacaagcttgtccctaaagggtgtgggaaacagggttgttgagcttatgccgtgtgtgtgcatgtgtgtgtatgtttgtgggtgggtgtgtaaccctactgaagccaggactcacataggccagtctcagagctatgttgcaatcaaaggacttagttaaaaaccccaaaacgtcaattcaaaacaactcaagttctttattagaattgctccaacattttaaaaaaacattaaacccaattttattttggaaaactgtgcatatttaatatatacaacttgatgagtttggggataagtatacacctgtgtaaccatcaccatcattaaggccataaacatatcccttccctcctcaagtttcctcttgccctttcctccttctctttcatctttgtcatctcctctttcttctttttctttatatcctttttcttcccctcctgctcttttctctcttctttaaattttttgggataagagtacttaacataagatctatcctcttagcaaattttaagca

SEQ ID NO: 45376 - DNA, 1790 bp, Homo sapiens
tggcaactgttataataactatattctcattgagtgccgggtggtgatttacaccagcaaagcctgccagggctaacggatgttctatgagaaaatctctgggggctctgaaacaagaatcggagtcttacctttgagcatctttcctcactggactcctagtgattgcattgattatttggaagggcagagatacagcccagaggtcagccacatccctgtgaattttaattactgctgaaacacagtgtttcagataatgactgagttttacatagatttggggagatgtgatagtttgtactacctcttgggattgctgtgaggatcaagtatgactatgtctattaagttcttaccatagtacctaacacatagtaagcactcaataaatggtagctcttgttaaaaataaatgccccatctatgggttggaatgtatagttggtcctagattgactttggctctaaaaggaggctgtatttcaacggatgctgggtagttagtgattttaatgccctggatttccccagaaaattacataagcaaaggtaatccagggtctctgtttgtcctggctgatgttccacacgtgtaaatatgcttagctctcgcctgagaaatacaggcttgattcagtgggaagtgtgtctgcacttttcagcccccactcctcctttatgaagagaacctgtgtgctggtgggaagagctccaatttacctgcaaaccaggcattgagagcacagagcattcctcctggcttgctggaggccaagtggaatgacaagagaggattcctcacaaatgccacccaaagacatgatctgaggaagagttagagtggactgtcttcctaggaaaccagattgctatattataatgacaatgacaatgatattattagtacttgctgaattcttcttaaattcattattaatcttttaaatgaaactcagatataacgaatgctgcttctctgccaagatctgggccaagccttttatctgtttgatcttttctgatcctctcaatgaccccgttatgtggatattatgctcccccaccccccaacacacacacacacacacacacacacacacacacacacacacactttttttggacaaggaaacagattcagtatggttacatgacctagccattaaggtcgctcaattaattggtgaactggagactaacccagttttttcctgactccaaaagccatgatcttgccatagtcccatgttccctactgggaaggttgtgggattgcatttgttcagcttccttagatgctcccaagttttcagtacatgacctcatgcttcttggctaccagtcaaggaatgaatcagtcctcccccagccttgattgatcccctgccttgtgttgcaccacaccagttagaatgaggcataaattaaaaagcatgagacatggtccttggcttcaaggaaagagctcccttgaagcatttagtgaacagcacagtacagtatacaatcaaagcctagcatggcagcaacagaagcaggtgccaggtagctcacagcaccaacttcttgcatcccctgccagacatctctaattctttacggcactctttcctcatgattctggatatggtctcagaatccttctcaacacagcacctcagggaatcacaaccactggagctagtcacacactctcctctaggggttgttcttattcaaaggagcagatagctggggacccatgaggctttaagaggagtccatgaaggctttaagaagatgatgag

SEQ ID NO: 45377 - DNA, 741 bp, Homo sapiens
tttcatgcagcttaaatatcttacaatcttctgcctcagaattttctttatgcttctaatattctcagcaaaccttttcatggtggaaagtaaaagggcaagctcagcccagctccagttcaagggattgcaaattctgactcagtaaagcaagacttgatgaggtattccttgcacacagcaaccccccactgagcacataacctttcttgtaccaaataatgaatccacatgtatgcgctggtctgatgaaggcagaatatcttattgtcctaacctccgcaaaagacacaagggtgtgtcttccattggccccatctctaaatcacctctaacccagaagtcccagtctgtccccgggcagaggtcaggggaaaagggctcctgttatctggctttgctgatacgccaagctaatggcatgaagctctcttggccttccagaatggaagaaacagaacaccaatttaaatcatgaaaaaagtcagtgaatctatcatcattaatcttgctgtcagttttaattttggggacattacctcactcaacaccagttgaaaagagctgccaaagccgatgatgtcatcatcactagccgcgtctgaccctgcctgctgattctcagagcttggagcaagttaataaatcccctggcgcttggacacacagtggagttttattacaatgaaggtataacccatgatgttgtttcaattaaatggcctgagaaaatactttctt

SEQ ID NO: 45378 - DNA, 1132 bp, Homo sapiens
gctggcagggacatttcagatatagcacctataaggaagaaggagaaatcaggaaaaaaacaaaaggcatggattttatcaatttttgtaatttttttgtgccaccaacataaatagatgcctaaataataaatagatttgaagaaggttatttggtttttctttcttcactagtttttggcagggggaagatagtgtttctaactgtggacctgctgagtttgagctgcttagcaaggtagaagtgtccagcaaacagcagcaaaagtgggctgtggcatggatgagggtcagggttggtgttgtggatttatgagtcatgcccatgcaaggcctggtggatgaggtcacccgaggagggagaatgtggtttctgagactaatagcttccctctgtatattgatatctatctgagtaataatattcatttctagtgtaataaagacccactcagcagatggtatcacatcataaataagtcaaagcaagcccaagacatgatccttgccctctgagaggctgtgattcaactaggccctcctggtttgatctgagccatattttcttatttattgagcaccatctattagctatgcactattctaagtgctgagaataaagcagtgaacaaaataaacacccctgccagcatggagcttattctctagcagagggatgtggacaataaacaaaacaaacacaaacacaaaacaaatgaaatatttatgatgtcagatggtggtaagtgctatagaaaaaaaataagcagggaagaaaagagggatgccagatgggagaattgcaactttaaatcaggggagctttcttgagaaactggcaattgaggcccctggtaatccctggtttcttgggatgattgatatgactggggatgaaaacatagtgaggctagttctgatcatctcaaggcagagcatgatgcaaggctgtgcagggtggggtgggagggagggagtggaggtcttaccagcagcacttggggaagaccccactcctcggggtcttctttttacctctgcttttggagacatttgatctctgtcttcttcatcttactacaattccatttgtgaaatttcttcctttccaaagctctttctcatcttattt

SEQ ID NO: 45379 - DNA, 753 bp, Homo sapiens
atactggtttcttttaaaattaagaacgtggacaagccaggcagaatgggaatgaacacattttgggaaatatagccccagatgatttgtcagggtttctgcagctctaaatgtcaaagactgtactgatggaggagggaggcccagagaggacagaaactttacccaaggtcacggggctcattagtggcagagctaggagcagatccaagacctccagatgctcaggctcacgttcttctctctggaacttgttcatggtccaaagccctgggactcttctcagctgacagagccctgtattggccttgacctggcaaaaggtacacagccagggttgcagctctacagaaagctctgtttactccctctgactgcactgaaccctgaaccatgtcctaaaaccaacagttgcttgctgtaatattcctacattcttactgagccctaacaccacgttcaacactgggaatttgggtgggcccagagtgcctttagtattactgttataattcaaaacatccaaattattattttctccatgagatgaagccaggagagtgctgttaagtggagagaaaagtgtttgttacactaggcgttccaacaaaatgtcctcctttgctattaaatcatagcttttctaaatgaaatgatattttgcaaactttggcagtgaccaaagtttggacattgtgcagggtccaaactttctctctctctctttcccattttgtgctttttctccatgtg

SEQ ID NO: 45380 - DNA, 1373 bp, Homo sapiens
tcctgggatcaggtctggcttcataatttgtgaggccagtgtaaatgaaaatgcagagcctttgttaaaaaataattaagatttttcatgacagtaacagcagagcattaagtgaggcatgggggccttttaagtgtggggctcagtgcaacttgttcaggttacacacccatgaagctggccctggtaggggtgactggaaagtaaacatgcatgtctctgatggatgagcagtccaaaggatgagacccaattcattgacttcctacaggactgacaacagttggattgttctttaatgattcagaaatcaagacagaatttttctgggtctcaggtcatcattaaatatagtttgttgttgcataattaaagaattggctttgtgagctctgagtaacaggatgatggcttatggagagtcagtgtgtttggaataataagcccaagaaaatgatacttttgaagattaaaacgagtagagttacttctcatgattgcttcccacaaactcctgaaaatcctctaaatactcaaacaaataaaactaagcatgctacctgaatacagaaactgttacagctgcagatataaattattctggtagtgcaggataacctgttttaagggaacccagtggactaccagtgcaatgaataggtttagaggttaatttctcagacaattcatgtaaattctgaatgtgattttgaatgcagtgttggcaggtatttgcgaacggctggctattccacaggttcccaaatttcagtccctaagcttggccagtcccttcctttacccctgttcaaatgtctcttttccatccaaaagtaacgaaaagagagccaaggatctgacagtggattctgttaacttcattgttgaaaaaaaaaaaaataccaagaacatgattctgactttcaagcccaactgacaaggagggaaactctagtgaatgtgctggcatacacgtactggacttttatgaaaattaaaaacaatcctgtggcctttggaaatgaaagccaattgagtaatagcactgtgtaggaaagattttgttctcaaggtgagtatttcacaactggggccgttcgggggcccatgtgtttcacaagtgatgtgtgtcatcatcattaactagtctggtgtatagaaagatcactgaatggaaacatgggtttttattcctatctctgccgtgaagtcaggttcctagctctctcagtttttcatctgtagaatgggggagataatagcccatcactaagagttattgtgagattcaaattagcaacatatataaaagtctttgtaaactgcatgttgttttacaaatattgggtttattattactctaattgccattt

SEQ ID NO: 45381 - DNA, 1684 bp, Homo sapiens
tcacaaataaagctgtcatgaatattcttgtgcatatctttcagtggatataagcagtcatttccaacaatcaaaaaagtccatcataaagaaagaaaatatggaaatgcaaagttaattttacctttaaatatgatgtaaaaaatgataacacattccatctgtgatagagttttataaacacaaaaacatgagaagatgttcccaaaggtcaacccaaatctggtggaagacctgagaaattcacagtgaatttcatggccacgattttatatctggggctatagccctgatcaagtgttctagctgacccgcatcaggtaggacagtgagcactggcaggaagtgaaacaaactcaccatgtctctgtctacaaggtgggagggtatttggtagagggcacaattcaaaggcatccaaggaagaccctggttgaagagaaaggaggaggagttactggcagccgaaggctatggaaattttgaaacaatccatgtcagtttattttatgatcattcctcagagtttccatctcacattgggtttttctggggcagattaagaaggggaatcaattaatgtgaatctcatgttaccacaaacagttggaggtcttaattgggccaggagtgagcaggtggtccttccccagccagctatcctttcacctgttagtcaaatgaggagagggcctctatcgctcattagcaaccatttgtcacttcgcacagagctttgaaaggatttctttgaactttgtttgggattgattttctgcatatgctgagctgttactgacaaactctgggcaactgttcctctgtaacaaatgcattaaaaaaaagggtgagtggattttaatagcctccaaattgcatagcctagaagggtgagattctttccccacccccaattcacctcgcaaacccttcactttctgtcactgcattataatgaataacaagaactttatttttcttaagggaactgtcttaaacttttgatttttttaactgcctctggctccagactaaaattgattcataatgacgtttaactacaaatggactttgtaccttgaccttgtctcttactttacaaggaacattcaggtctttgcattttcaagggctggattggagcactgcccagatggtcctagaaaccttgtagcctcttctgacctctcttcagggcaaggggctatgactagcttgctcaatgcattatgtatctccagtatgctccacagtgcctagcacagagatgatactcaataaatatctcttgaattaattagtcaattcaaaaaataagtattatgtttgccttatggtttaaggataaaggcgtatggtaacttgccatagccagggagaatagctattgttcattagttcctccaaaaagttattgagaggagccagttttatttatgtgcttatctatgtgtttgttttactgagtataagtataaaacttatttgttgtgaaaattttagaaaacatatagttttacaaagttataatatcccctcccacagagcagggccatattttaaaaaggggtggtccaaccagaagtaactatcttcacccacatttctgtcaaagatagacatagaagaactttttacatgagaattcttattttattttattgagacagtctcactctgtcac

SEQ ID NO: 45382 - DNA, 614 bp, Homo sapiens
aagctcctcactctgaagcatgccttccattgtttttcaggcggatgccacatcaaactcaaactcttcaactgatccctaaactaactgtgggaagaaattttctgtctttttctctctggatctgaggatatgttatattctattagcagcctctctgatttttcatctaaagtccttcccttgccttggatattggctaacattttccactggtcagaaactttgtttatacagctgatcaagttaatggttcatctcctctgctccgcaggcactccaattctaccgtcatcataactaggactggttattttgtttggcagagttatttcagtaatataagataaccaaattagattggtgatcgattagtttgttcagtactcatcccagtaaataaaaccaaacaggctccaaatggctgaaatgctattgcagcagagatgcagtgtgaatcaaaacttagagacctcagggaatgtcataaaatcctactctgcaaccagatgattgtcccataataaatactgtctgccaaagactcacacatttcctcctttttcggtggtatgggctagcattctatgctacatagattagaaataccacca

SEQ ID NO: 45383 - DNA, 663 bp, Homo sapiens
ctcaatattgtttacccatgcatttattcactcaaaatctgttaaacttctactgtatgccaggcaatgtgccagacttacaggtttaggtaagaataaaagacacacagagaactctcaggcagatgaaaatgtgctctagaaatagcacaacaaaatgctatggtagcacaaaggagaaggcagccaactgtctccaggtgagttatgcaagtgtgcattccaggcagagggaacagtatgtgcaaaggccttcaaagttgaggtcatgttcagagacttcccagcaactttgtataaaaagatgacccatgcatgggaaaagggagatagggaagagaaggtggtgaggcccaaatagacagtgggtcaaataccgaaggcctaatgtgttttgttaacacattaacaaaacactgacctttgttcccttgggcaatagggagccactgaaagtttgataggaaagaaacatagtctgctttgcccagtttgttaagacagcagtccttctgattctgagagtataggttttctctgcaaattctcacatgcctcccatttctggtggtacatctcccatgtgttagctgtgtgtctgggagcctttggaatgagaatgctttgatagcttcacccatactatctctactgactgaaaat

SEQ ID NO: 45384 - DNA, 1308 bp, Homo sapiens
gactcatgatcatgatggaatttaaagtgaaacaattttacatgagtaggtacctatctagtatttgtggaatgtttcactcctgtccaacaggaaaagtatcttattcatgtggggttaaaaaatattgataacagaaggctcagttcacacatgcctcctcatcaatgagccagggcacataattagttgaccagaaggctcgctgggattaattagcagctgtgtgtgaaaagcttggttcagatttgtagcacgaaggataggggttctagaatggccacttcctggattcacagttcaatcacgcaggaggatctcagggcttggctgttgaagttgctgggggctcttggctcctatatggaccggtgtgggcatgtgcacatccagctaccgccggcagagggcagcagtacgctgcgcgtgttcaatttgcatcccagattagcaaatccccaaggacctacataagaaagagggtgtcccagcactaccctaattccttttcactgggtatcaagactgatctgagtcattgcaaacacagaccttttacattatgttggactttggctcatctgaaatagagaaatgaatacacaactaggagctgccatcacagacaggaagtaactttaattaaatattgtgaaagttgaaaagtttttacagcttgaatttttgcaaaaaaaaaaaaaaaatttaacaatctctacagtagttaggttctctaacaattgaactgtacagtgtgtgtctattcaaaaagttttgataagaaggtgaaaggttagtagatttagagatgacttcatttaagctgcatcctagtacaatgtgaggccagggcaatgttatgcaatccagtcatccagaagctgtattttttcccccaacactgaaatcttaatttaattcttcatttcattttcttcttaaagccatattctgtatttaggggaacatcttttatttgtaaaacttttgtggagaagaaagaggatcagagggccagaatgtcttttcatctaatcaatagaaatagaagcaacaaaacacaaattatacacattttaaaggctctttggactttcaagaagagttctaaccactgcacatggctgacagatgggtagtgtctgttgtcaaggtctaagccggacaccttcccggctgaccgttcattccttcagaaacagttaaggggctcaccagataaaatatggctttaacttgtgtacatcttcaggccagcgcttaccacgcaaattcagataacctttctgagtaccgagaagcaatgcg

SEQ ID NO: 45385 - DNA, 725 bp, Homo sapiens
ccaacatcagagcattgttgagaggataaaatggcataacagatataaaagtaagcacagtgttgcctggcacataagtgcttgctacttttattattgcttaccttacagcaccaaacacacaaaacacaaaaatatgagttgtttacctgtgaactaatttttatcagcagcagagttttctgcaaatcgctcaagtccaaattttcaggaattacaaaaaggcagtatcctcacctttggcaaacgctcagggtcaccagggtgccgaggaatgaccttctgtaacctctggaaaccataatcgatggtgggttcgttgagcgctgcaataaagaagtcacacaattagtacattttcaagaaataaagctgaacatggcttgcaacactaatggtgtggaaataaccaggaagtccaaagtttaactgatacttttgaattggatcacaagatggttgtgtgaatgatctcttggctaaactttccaccatctgctttataccacggtggggagtgacccgcccaaaagaacattaggagtaggtcttgaacagtgttcctttggccaaattctacactccttacatgatcataaatagaaagtaaaatggtatttgatgtgaggtttttagtatccactttaattcagttgctcaggtaaaagcactcaagggcttgcctggtggtatctatacattgtaaacagcaggagaattaaaag

SEQ ID NO: 45386 - DNA, 859 bp, Homo sapiens
aatgttaacatgagtccctggtaaaatgttgtagccctagattttttttttctggctaaaatatagtatttgctaattttttttctaactagggtttaaagttgcaagtctagagtgcttctgactgttagaacatgaggctggcttatgaaggtccagttataagctgggacttggcaaacttgaagtattacccattgactaatacttctattagtcaaaactgtaaacttctggtcaactacatattttacatattactgcatgaagctctagcagaagttcaccatcctaaatagcctttaaaggcttcacaattaacaagagatgatttactctcttgaaatataaaagctgacttttcccacccaaaagccaataaatctttggtgttggtgaaaggccattctctacctgtagcaatcaagttatgcaaccctcaggcaatgacttttcattgaactcagacctgactgaccacagcattcacaaacatctcagtccccagtgctcaactgacagtgcagcctgatcgccacgatgttgcaatagaaggaaagaatttcctagcaaaatgctccaaagcttcaataacataagaatccacacaaggccatcttgagaaggaagcaagtgatatggtttactcttaaatccaggctggagtattcttcattcattcatttatttattctgtcaataacttttccaaaagagcctcctcaacctatgccactcaccagccttgattccaaatctatgatatcagattggatttttttctagttagaaaaagtattagcaaatactacattttgaccagatcaaaaacaccatcctgacctgacaaagaccccca

SEQ ID NO: 45387 - DNA, 586 bp, Homo sapiens
ctaggggatattttgttgaagactgattaaaaataatttcttctaaatgagacctgaccacaaaatggaaccattaatgggcagggacgttgtcaccaaagcggaaaccatgcctgattgcctcctgtacctcccaccacacaagcattttcttctttttcttctccttttcttgttcttaatagctgagtaaataagcagccagcgaggcctaatgttttcggccaaaaacagagtccaaacttctcagagaaaacatttggcctctgtggttttgaaatatgttccagaacaccgagttcagtgggggaacattgtgaaaaactcccatccattggaatgatgctggggaatgttacagtatcagaagtttcaattggtccttttcctgcagccccataatgagacttgtaaaacacacacacacacacacacacacacacatgcacacagacacacacacacacacacacacacacacacacacacacacacacactgctatgtggaagttctcatgggaaaaatgaatggcaagaaatcctagctttaaaagaaacagctaatctgctagtttgattattct

SEQ ID NO: 45388 - DNA, 1151 bp, Homo sapiens
aaagttccagcccgtggggtttaatacactgtaaggagaaatgctggaatagagtggccatctagaaaggctctacaatgacccagggttggcgccatacatctccagaagagaatagtagaaatggcaaaagcaaggcaagtgttgttgcaagaatgtggtcgaaggaggaggagggggaagaagggaggggagaggagagaaagagaaaagatagtagaagagggagggggaaggaggggagaggagagaaagagaaaagatagtagaagagggagggggaaggagggaaggaggaagagaggaagggaggaagggaggaaaggaggaagggagggaggggggaaggaatgaagggagggaagtgggagggagggagggagggagggaaagaaagagaaaagactgtttcaggtgactagaaagactgatcatgagtcacaaatgaatccagggcagtcatctgacgaattgaatcttctgtctttcaggaggtcacattaatgcaaacagaggccagaatgacacataggctagtcatcattctaactagacagtctttagggaatctttagggctaacttccagagtctaaaagtgtactgataaccattcattcacttcatttagcaagtgtttattggatacacacacacacacacacacacacacacattccggaggcactgtgccaggctctgaggacacaagagagaaaaaagcagtgctcctttggatcttaaaatctagcaaggtgaaaggctatataataattacagaaagaagtaattaattccagttgtgatatatattatacgtggcatccataactggatccaaatctccccagaaaagcttctaaacagaacaggtctctcttgacatatgcatacaagacctctaacataacttccagaatcattctgggttctagaatcagggaggcaagctgagcagattttacctaagagtgtggcagtgcctcttctaagcagaagtctgaattcctgggaaaactgtgaaccatctctgaaatctcaactgaaatgggaaacagaatagtggggagggcagggggcgccagggaccctgaaatgggaaagaaggcattgaaatattctatgcagcacaactgctccatgtttgggtca

SEQ ID NO: 45389 - DNA, 667 bp, Homo sapiens
agaattcacaaatctctacttggcttcctcaaaaactttacctgttgggaccgaatgaccagctgggtttgattaggacagcaagcacgcccccatcctctcattggagatctgggatgattggactcagctttacaccaaaggaagttaagtccctaatagttaatgaaacgaggtgatttcctttcttgcacctgaaataacctgcctcccagagcctgtccaatagactgtctccaaaagcaaatagatccagcaaagagtaccttcaaagccaagctttcatttattgtcaagacagaatgaaattggtcctttttatgtaacacatgagttaggctgacctagccattcatacatagcaaagtagtgattcattgtgttggcttttttcccctctcctgtaatgttacaaaaagaatctaaataactcaagggctcccaagcctcttgatgagagtacttagctcacatcaatggtaatgggacttaaacctaggcattttaggcagaatggatttctttgttgggtacttttcctcctcccctcaacccccctccagcttgatttcacaccagttatgtgtgcaaacccacaataaatcactaggaatgtaaaatacactacacttccccacccccacccccaagttggcctaggtcattt

SEQ ID NO: 45390 - DNA, 1036 bp, Homo sapiens
aaaaaaactgcttcaaagggatattcagcattgattttattgggcttattttggggagcactcaaactatgctttttttgacttgttggccctaaaatgcaagaagggttaatcttgattgcaaaatcaagaaacaaagatacaggcctattgtgcaataaacagcccacatttcaatgaataagtaatatttctcacaaacccaagttagatagtggatttatttaacctcttggggtcaggtaataaatactaagtgaattattcagcccaatggctaatcaatacaattccatgatatattttttgtgtttcataaaaggttgtacactaaaggcagtgagcaattatggaaattgggccagagcgcctctcaattcctctctggcttgaaaccccagcaggccaccttgacagcaaatcgattagtgctccagtgaagcggctcagtgacccctgacctgcttccagcgaggcctgacagaggagagagtattttatatttattttattgaattaactccatcttgcctgtaccatcgctttacacacattaggcagcaagctacaagctacttcattgtcgttgttttccattgctcttgctaaccaagccccaccccttgccctgcagatttctttgtcctggttttcctttcacttttggcctcaatgcaagatttcaatccaccctgagactcatgatggagctccaggtaataaaaaccaagagcaaggcacaagatcctgctgcctgatgcttcctgcctaccttgtccaaccaggacaatgccctatccccatttttcccctcatgttgagaaacaaagaccagtcaataaaaatctggcttcacatggtgctctttggaaaatatatgcaagagaacatcaaggattaggggtatttcctactagaaaatcaaaaaataaaccagaagccactggttttctctatttttgtggcctaattacattattgactgattgaagccatcagaaacagggggaaagaaagagaaagaaagagagagaga

SEQ ID NO: 45391 - DNA, 2473 bp, Homo sapiens
aaatgttaagagcacaaagctagagcctaaaattctaagtaaaagcccagaactgagataccaggaaagagaacgcatttcttacataagcaatggcacatgttttaaatatagctggtcctccccactcccactccttgctagctaactttgtatgtacctgatctccacataaactactagcaattctgtggtttctcatcatctcccaaaccgcaaagacagggagtctactctgaatacaaaggccatctttcaacttaaggaacagagagaggaaataaaactgctacctctgccatcggccgctcagcctgggtcacgactgcagcaccgacagctcattcttttgggcatgattcaagattcagtaaaactgcacactccgtattttaaaaaataaaaagacacacagtcctctccttccctttcagactagtttcctctttactgcagactgcgacgcaaggccatccactaatctttgatgcctgctcactgcacaggccccttcctctctccccgcacctcctcccacaacgcctgcagatctcagatgcgtttgaactacagtaaccccaacccagctcgcggcaagcaggcagcgcagcagcagtagcagcagcaaccgggccgccgccgccgcggggctaagagattacgttcagcaaaaactcttccaggaaagaggctcgagagctcccctcctatctcgccaagggtgctgactctgtcgcgccacgccacgtaccaaaaggctcgcgaagaaaaacgcgggcgaagttcagcatccccgaacagaaagggaactcattccagaaagggggttcacgggtctgagggtccttgggtggggaaagcagtattggagggagaagacagaagggatggcaagacagaggaaaccacggggacaaaaaggaagggatgaggagccctcttactataaaagggactgacggacgggatgcagagcaatgggcccccctcgaaaaatggactggcaggcccttccgcacccccaaacaacctcgcaccacctgaaagcggggagcttgagtttggggctgcgtagatcaaagcagggtaagacgaagggaaagagggaggggagcttggaagcaaagtgaacaaagaggcaaaagaggcaaagttggaaatggaaacgagaaagggagctggaaaggggccgctctggaagggtcttgaaaaaggcctagaaatgggatgctggggaggcaaagggggacagccccgaggaagggcatctcaggaatgtaagggagcgctccaggccctgggaagaggaagggatgggagggcggggaggcagccgaggcccgggagctggaacagagggggctttgcgcggggcccaggaggggagagcagggtcggagggaggcgaccaccgcgggaagagctagaggatgggagggaggggtgctgcggctgaagaggggatgtggactcctccaatgctagggagaagagggaggtgaagcgagataaaaggaaaggggcgaacagggagaagaggaaggagcctgcgacgcgatgggggaggggagggaggccgtgggaagcggccggggggcgcggggatgggaaggggccgggcgggcggcgtggtcacctcaggctgcggactccctccctggggagcggcgctgccggcgggcgggctccgcaactccccggctctctcgcccgccctcccgttctcctcgggcggcggcgggggccggtacggcacggctcacagcggcggctcttctgcgccgagcctcggatgttgcttctggggaggcggaggcagcggcagcggcagcggcccggcccgtacggtcaccatcgtccgcggcagcaggcgctcgcgggccgagccccttagcagccggcgccggcgtcggcggccatggcctcctgcgtttgctcctcccgcccccggcgctctgcggcggccgcggcccgacttccgcactctgcgcctgcgcgcggcccagccagcgcggcgcgcccctcccgcgcgcgcccgcgctcactcacaatcgcgcccgcggagtgctttccgcaccgcctccggtgcgtgggcgggagacataagcctagccaagcccatacagcccggctcgggtggctatggagaggcgtactgcagagacacctggacgcgcactgtgacaggcgccattctgacacacgtgctctctcactcccaaacaccacgggccgcaagcgctcacacccacactcacctgcagggaccacgtgggagaatttgaagggctgatcctgtcccggtgcattcgcagtagcaatgatgcgagaattcgttttaacctcgtcactgactggactagactgtaaactccttggcgtctgggatggctcagccgtgcccagcaccaagtgcaggcactcaaacccctgtggagtaagtgactggatgaatgaatgcattggaactgtt

SEQ ID NO: 45392 - DNA, 1810 bp, Homo sapiens
ttttttttttttttttaattaagactttctgaagaaaagggcatacttttcactgaaaaagtttgagttttttaaatgagcagatactcatgcattactagtgcagccaaaaattatcaaaagtagggaagaatgcaaaatagcgtgtgcctcttaactaaagaactgttaagatacaaaacttggctctttgctgcctttcccgcactgccaagagggaaacatgaattagttacattgccgtggtgctcactgggagttcgctgtatggaccagatgggtactgctccgaatttccattcaagtctgacattcttttgtcagcgtttgtgtaaccggttttccttgcattcagaggaaagacagcatggaagtatggatgggaaggttgagacgattggatactgtatggtaacctcgatcgcagctctcctatgagacttgcttcttggattctgagtcacttaagcttgccccttctctttcctgaccctcttccgtttccccttagattggagattctcctcagattctaagtctctgaaattattagtgttggcagcccctgggcccatggaggggtctcaagtcttcagttctcaaagatcaccttttaagcttcattcggaacatgacacagccacacgagtcctagccctgaatctcacgaagacctcagtacacctggaaaaggcagcacacccagttacgacactactagagacgtcacacgcctcagcacccatccgctcccagcccagaacgagcgcacgcgcagaacgagagagcggccacccagggatcggcgctatctgcacagcggttacagtctcggaaaggcctggcttcttcgtggctttgtggagatcccttacagcggccatttgattagcacccgaagagattcaaaggaagcagttgttccgtccccaacatatttccgtttcaaaccacccacttccggtttttcagccggttccggtcccgcccttcacttccggtcgctttcggtctctcagcggccggtttctgcgtccgctgccgcaggttccaccgcgctccaggtgaggggttgcggggcaccctggcgcgctgcccttggagacgctgttggggctcggggacagtggctttgcggcccgcgcggcgtggcttgcactgcggcgggctggggatagtgtctgtcctagtctgacgcccaggcccctagccccggcccgcttagtcgcgggggccgctgtcctcccatccagcagtctagcctatttggagggctttctgtttcccagtgggttttgcgtccccaaacttcattcctccgtcttctcaggcttgtccatccctcccctcaacctccttgttgaaggcatcccggcctttttggttctggagcctccacctgcctcctaatgctcccctaagtcagttagcacagcccccgaccctgcaccacctcgcagttgttgctggtgtgcggttctcgccggagttcttagtgcttcacggttatcttttgctgggattgttgaaagttaacctcccgttaattcccaaagtgttacttttactgctatactttaaaatttcttcatttgccactttttaggtttgtggtcccgggcaagtttaatttcttttcaggattctcatttgtataatgaggacaacagctgttggttcaggattgtgaagcttcaatgagataattgtttagcatgtttttattccatcatgaacaccatttgtattgtgttttacagtttacaaagtgctgtcacaggtgttacttcataccttaacactactcctg

SEQ ID NO: 45393 - DNA, 684 bp, Homo sapiens
ttcttaagtctgtgtcatccaggaagaaaattcaatttaaacaggagaaatttaattagacataaaaataacttgaccttcatactgggtataaaatttcagaataaatgattgcaattagctgtgaagtttgtatacatgatgttgaaatagagaattactatttgaaggcctgccatggacaattgtgcaagttgtttactgcacgtaaccagggactgccatttacaccatagtctatgtgaatggtaccctctggagatgtgcaatacataatttgcatatccttttatcctgactattaaccctgaaatgtttagattgaggctggtcccattctagctgtaggaatccatggctttgaatgaaagttgagagttcagacaattatctaagaaaggtaaatatgtgttttgtacaatatgactcaccactcaggattccatggcagtcacagatagtagaccaaggcctcagaatcttctcaatgcaacactccagggaattgctatcaacaaatcagatctgccactttatctaaaacacaaaagctgtttaacatagtgatcagaagcctaggctggagctataatgactgggttcaaatctaagctctgatacttattaaactgatgacctttgaatcagaaaggaagcattttactgcaaataatagaaaccaaa

SEQ ID NO: 45394 - DNA, 2534 bp, Homo sapiens
ggtctgcccttgagcttctcttccagaggagaaccgtgactctgaccaagggggcagttctgggaaactgtgggagcctgcagcaaatgacagaaaaggggctgactccagagtgaccctgccaggccttctggtgagaaacacgccccttgctatggtgaggccggccacagcctgacactgcctctgctggggatgagagcatggggaagcaacagcattccagtgtcagcctggctctggctgtgccccaggccctgttcccactgtaagctgacactggctgggaggggcctctcatctcctctttgagggctccagggcagagtctgttctcagatttgagcagcagcctgtggatgctgcagagagtgtgaagaaagcaaaccaacctctgtgggcccagtgagtcgggtagggccctctgatttgtgtctgagaggttggcgtttgcagtagattttagtcttgaccttgtcgacttggcaacagggttaaatgggagacagtgaactgtatctggagggtctggattggggcctgaaggcctaggggttagcccagttctctctgtaagctgttttggggccaggggccagcctttggtacctgggcctcaggctcctcagtggtaaattgaggaggtttgtcgggccatgtgcacttggaggttccttccaacctgagtaatccccactcaccatcaagtaatggctctaaattcatttgctctgtggagataaccaatatggaaaagattggcctcaaatttaacttttttttataggcagtaaaggatagatgagaagtaacattattccaaatagaatgacaggaataataattattacagtaataacaataacaaaacaatgctttcaaaatagtcactgtaggccaggtactctaatcaagattttacataccttaccttatttattcctttccaacactcccctgggtggatatcatggtacttgtttaggagacgaaactattgaggtgcagagaggctcagttacttgcccaacagctcattgttcaaaggtagcagtgctgggatttgaacccagggtccacttgattctaaagcctacattctcacctcctccgttatcaggtaggtgagaggtgccttctactttctgctgtgaaagtgcagatacagaggagcagcagctgtccacttgcttctccagtgttcatatgtcataaatccctcagggatgtagccttagacttattgttcctaccccattactggccattccctaccatccccaccaaacccatgctccttctccactcaccacttctccacaggtcacagtggtctgtgcctcagagccttcataggtgctggtccttgttcttgaaaccctagtcatctctcttacttctggaacattcctactcggcaaggttcagatgccgtctcccttttaaaagatgctctgattttcaaatagccacagcccacttttgcttctgtcatagtctgtatcatgttctgtaattatttgttttagtcaactctcattcaataaatatttgctgagtgactctttgtgcttggcactgtgttaggtgctggggaattttctcctgtccacttttcctgtcctctagacacccatcacacaatcaaactcatagtttttttttttttttttttaacagagatgtgccttatttcccccgaatcccaggtaactgacaaagcctaatacatagaaaatgctcaatagccacttgatgagtggatccatgacccagtacttatcttacctttgaataattgcctctttctttccatcctctactagattcttagactcttgtggacaggggttgggacttattttgcttttgtccctgttgcttagcacagagaagtaatttaatatggtttgttgaatgaacgattatgagaagtgtgagttctgggagtggatatgctaattctacaagcatatgctaatttggggagtggatatgttctgggttctgggagtggatatggtaattctacaagctaattctacaagcatgtgacccactgtgtatctagtgccaatcattgcttgggtgggcaccatgaaaagcaaataccatgcagatctcacaccctcaggatcctgagtgcatggtgaccgggcgtatacacacaaagttgcaagagaaagattcagcaggggaagagcccaggtgccaaccagacagtcaccttgtccagaatctctgctggtccctggccctgtcctcagccgcctgtggctctaatttcgatgaatgacttccttcccttagagggctccttgcctctggagagaaatgaacatcacctgtgaaagaggcttgcagagattattgttccatctaattgaatgtgaattaaagtagaaagaaagattggcattcttactgtgcccagaatcattgaacttatgactgaaagatgccacaactgatcatttggccttgttctcatcttctgtctgcagaaatacattgtagtgggccagcctcagaat

SEQ ID NO: 45395 - DNA, 751 bp, Homo sapiens
tcctggataaggcccttaggacctttgagcctccgttttgccatccatgtgtgaaatgtgaataataatggtacctgcctcacaaggttgttctgagtattaattgggatagtgcataaagcacttggcatgatgtctgtctcagaagtggtctggaagtcccctttataattgttacataacaatgttataattattacataattgcctctctgagagtcggctgacttccactaatctacatccctggtgttacccactggtttgatttccacagtttgcccacctctgagatgaggaatagattccaataccctccatctagcaagaaaaatgatgatgggcacactgggagcatttccttttgcacttgccttgtcctgttgctgttttagagctatgtgctgcgtgccatttgcaggtaaggccattgccacagcaagattgggacatcaggcacagggtgcctggctctaggttctccacctcattgttgactttggcaagggaattttagaggagggctgccatggtcgcattcttcagcacagcaaagagaagagaaaacagtgcgactcttgccaatttccttgagctccaagggaaagaaacagaaacaagtaacatgagtaagaacactaaaatgagtttggaagtgtgttggaatgagctgaaagcctttggggcatgcttcaggaacaataagctgttcctgtttggctgcccaggattttttattaggctgagagta

SEQ ID NO: 45396 - DNA, 1544 bp, Homo sapiens
gttatcagcttctttatctgtcaaataacgggtagaactagggaatcccaggcccctgcaaactctgaaatcctattattctatgattaaaagaaatgacaagcctggtagctattactcctatcaatgtttttgtccaatcattaaccaaactaatgaggttgtttctgtaatccaactgcaacgttcactttcagagaaaaggggaggattcgggaaaactggacattcctggacattgctgggagccagacactgagttgatcatagtgtgctgtcaacagtgaaagaaaatctgagggatcctcacagaaacggggcgcactttggaatgaaggagcacttttggtgagtcgaaaactattagctgactgcagtcaagatgaaatccactttggaaatgtttgggtgtttttttaagtttggctcaatcacttgtttttcactgttccttatgtaatcttgtgggatgtggcgtcagaaagtcataaatcattcatggtgctttggggaaaaaaaaaacaacactgtgcaaagcagatgcaacttaaaatgaaatgagagaagtttttgggtgaaaccgaaaagaaaagcgtaactcgcatggtttgtagccaacgctgatcactaattctcgcaatctctatatggcttggtcatttgtttccagtttcttgtgcttcactgtaaatggagagtgagtgaaagatatagcctatcacaactgcattgcatttttccaacagtcttagaaaagatgctgtagtagcggcatttttggaaatgattcaaactggcagatttttatttcctgcttgaagaaatccagaaagccccattttgttcaaaaaatcccttttacgacatgcttgtcactgctgttcataatacctatggatcaattaaactctctttgtaaaatatatgcttcctcaaaacctacatacaaaaacacaagtagcccctggcagacgtaacccataaagctaactctaaaacatcaacaccttaataaaagtggtttagctgaattatttctgatgtggcagctagctacaatgaggtttctaataaacagataaattatgttttttaaatactctttcatattcattaactcatttcagctttacataagtagcaaggagagttgggtgttcattccttaattcattcctaaaacaaactttattgactgccaagcactatgtaagagttctaaagatacggacaagataatgatgcccagcctgggcagcatagtgaaacctcatatctacaaatatatatatttttcattagccacccatggtggtttatgcctgtagtcccagctaatcaggaggctgtggcaagagaatcactttagcccgggaggtcaacgctgcagtgagcaatgatcatgccactgcacttcagcctgggcaacatagtgagaaaaaaaaaaaaaaaaaagatgcaccgggcacagtggctcacacctgtaatgaggccaaggctagtggatcacctgatgtcaggagtttgagacgagcctggccaaa

SEQ ID NO: 45397 - DNA, 1211 bp, Homo sapiens
ggcaacaggagtgaaagccatggcaatgaccatcgtggaggtggtttcacctccttccatctctagacagtgtgcaggcctgtccccagtggaatttttctggttaatttagacagaaaaacaaatggagataccatgaaatgatgaggcactccatcattttttttgatgatgatccattgcttcattcccccagaatgaatcaccaaaatagtatttgattggaaggtcagtggaagtacaaccatcagctttttaaccccacctctttgtttttttatgcagagggcagaaaatgtcttctggacgacttactgtcttgatagtgtcttcatactggaacagaaacacaacctaacattctgtagcccttctgggctattggggtcttctctctagaggtaactagactggtttctgcctttctgtaaaatattccctctgaagattcccaggatgcttggagaagtgctcagacccactgatttctaataccagcccctagagccacaataaaggcctgaagcttggtggggcttccaaaagccatcaagtccacctctctgcccttgggaagaacctcccaccaccaccaacatacacatattttctttcttcaaaatgaaataaattccttattttcttggctatcccagctcaccactatccaatcagatgacacaagctactgaagctctgtagagctgtgggtggcctccttcacaattttcttccctgccaactaattcctgaccttaaccttcttaggtgtcagtgcagcacctattattcatgacttcattgacatttcttccaaatccctgaagctggtggtgactcattccctcttgtcatcaaggggcatcattgggctgtatacagtacatggcatgaagttcattttagctgttctctgaagtcttgcaacaaaggagctctgaaaatttttaatttgatgacctggaggcaaacatgaagatttccaatttaacagcctgaagaattaaattaaacaacctgtgtgggtcatgcagggacaaggagcctggacttgcccccttgggggtcagagtcctcaggtccatggaaagttggtctaacaaaggtctaaaatgtccacagcagtccaggccttccctagagggccccgtttgaatttattcatgtacccaaatgcagtttgcacgaaaagggtatgtccttgtattttc

SEQ ID NO: 45398 - DNA, 3219 bp, Homo sapiens
agtcaaatctcctggctagtgaccctggctctacctcagacaaatttctccctctttctgggccttctgtgttctcatatgcaaattaagagcattagactagatgaaaggttaacaaattttttctgcaaaggtccagggagtaaatattttaggctttaccggacagacggtctctgttgcagctactcaactctgccattataacctgaaagcagccatagacaacacgcaaacaaatcagcaagctgtgttccagtaaaactttatttgcaaaaataggcactaggctggatttgatcgattaattgtagtttgcagactctgaactagatgatctctagagttttctagttctgacacttctgtagtctctgatcctgacttgtggcagtgcagcccagagggaccaaggccctgaaatgtcagctgtaaggaacctattgccataggtattttttgctgtttttttgttttgctttgtcttttgttttttgcagtttttttgtttgtttgttttttgcctttgatgactttaggacgtgtggttgggaaatagatcctggcagtagcaataccaaggaagcttgggaggacttttgccccagtaaaatctctatcagctccctgccctggatctgtgatgtgaacagtgacatctatcttgagaaggtcatggggcaaacggctgcatgcccaccttcaaacaagactgcaacttaaagatcttttccagagaaattctggaggcaccatagatttttgggcaaagtgatagtggcaagcccatggccagcaagggtcagccagagccattcaagaaggcagcacacactccccttcaccctcgattctgtagcagcatgggtgggttttggcagcctgtttacactgtcccaccagaatagcacgaaggcataagagagaatggatctgctctctagttcagagacagcaggcctttcggattctccgtccggcaccctgtgccttcacaccccagcccccgcctcactccccagctcccaggctctccccaaacatgtgatgtgcattcagcccctgggtgactttcaacccctgggtgacttgccagttaatctttaccagcctgctgcaaagggctgccactgagctctctctgccttaccagggagtgctgtatgactggcagttctgggttgggggaatgcatgctcaccagagagtgacaagttgtaattaccagagagaaaacagtcctacccagagggagctgaaattcctcactcttgggagcctctgacctgctgcctttggaggtagaagagaaggctttgctgtagttagtgtaccccacccagaagaaagaatgcatctcatcctcccaccagggtacaggtggggcaaaaattcttcttcgagtccccacagaccctagtgtacctcctaaagcagatgcctcactcctccaattccttttttgtgtttagcctcatttactgggtgttgtgtatttcagctgtgccacttgttagtcctgtggcctcaggcaaatcgtttaaccactctgggcctcagattcctcatctatcaaatgtcaataataatagtacctacctcataatgttatcattaggattaaatgagataatgtacagaaggcactttgggcccaacgcctggcacctagtaagtgctaactcctaacagatagtattactattactctgtgctgagcactttacacacattttcacatgtcatcctcaccatagccctgtagagctaggaactattctgatcttcatttcacaggtgaggaaactgggcccagagtggttaagtgacttgcccaagaacacacagctaataaattagtggaactgggacataaacccaggtgtgtctgatccaggctcttcatcacttcactctcctgaccagggtcatagtaaacattaaatgacagaagtgcaattagaatccaagttagctctcaactccctcagcagatcaagtgctggcctggaaggcaaggaagactaacctaaggtgctccgctggggaacctttactcccagacagctctccctttccctcccctccctgacctctgccttactaaggagcctggtcacattctgttctctgctgttatttccttcaggctaacattgaaccttctgctgcctttttctttttttaatctcagtctggtgcagagagaaggatgcaagctttggagccagacaacaatgctttgaataccaatgctacttactcactgaatggccttggccatgtcacagaacctctctgaacgtcagtttcctcatttgtaaaatggagagaattcctccgttgcattgttgtgaatttgagtaaatgcacatagattgcctaacacagtgcctggcacatagtaggtactctctgaaaggtgctttagcattatcatcatctcccacagcacctagctcagtgttaggttattgtttgcttggtttcattcatctttggttcacccacggtacttagcatggtgcttacacagagtacatgcatctctatatgcctggtcgaattgaaagctagagagagcaccatgaaaaattgcatgatcacaggtgacagatctcctcccatagatgtcttaagcagatccttgaatctcccatagcttcagtttctctacaggtcaacttcagtggcagcttcccctggagggttcgcagaaatgggagttctgcaacatcagaggtttctaatgcaataagatggataatgaaaagattcttcttccacaagcgtcgagtgagtcagagctctgtgcttgactttgccccagggagtaccgagaaaatgaaatatcgtctgtgttctcatgacacctaaacaaatggtcaagtccatgggtcaaaaatcagccagaggggttaagaggcatctctagcaaaggaaggggaggagcagcaaggaaagcaccattagcaaaggttgctgtgtggggtcctgctacacggctgttattaaggctaatacctgttccccttacagtgagatctttgttttgccttcacgaaacacactggtaaatgacaacaagtctgaaatctgcaaggattttgaacttgtcaatctggctcaataatttcttccacatcctgacacctgaatcaagacataagttctcatctaggtaacaaactattttctttcacaatgaggataaaccat

SEQ ID NO: 45399 - DNA, 1481 bp, Homo sapiens
aagcacccacttaacatttcaaatccaccccacaaacaccccactgcatttccccctccttactttattttcagcctaacacctgtcatcacattacacacctcatcatttgcttatttagtatactgtctgtcttctgtcgggagaagctacgctcctatagggcaggagtccgtctattttgttcagttgctatgttcacagcgcccagagccagggcagagagtggagactccgtaagaatcggctgaataaatgagtgaatgcctgagcgaatgaaaggatgaagagaagccagattttactggggccaaagagtttgcacggggcgaggggagccagatgaaggatgagggctggcctcagatccgactcaagtccctcccacctgcccaatcctagaattctctttccctcttttaggtgctggacaagttgcatatcccgttaaatccggggcccactccgggagccccctattaaaggtaagcagcccccaacccacctttgacacggaagagtgactagcggggaaaataaccccagcgggccgcctaggggtgggtgacccgcgatctccacgcccaggtcccgccctcgcggcccctgcccccgccccgccccccgcagagggcgcgccctgggagcggcgggggacgcggctggcttcccggcttgcggggtggcggcgtcggggctgcgggcgccttggctggacccgcattgccccctagtgccgcgcggagtcagggcgccgggctcccccgcctgatgtcaccgccgtgcagtcagcccagaagcggctcattgaaagcagaccctcttcggcgctcgctgggcggaggacgcgccgcggtccgcagacccgagcgagctgggcaccgccgggcgcccccggccctgccgccccctcctccccgccgctcccccgcgagcccggccaggcgcgcctgacgtggaccattaaacttggagctgccgcctcgtcccctctcctcctcctcctccctctgacaggcgagcgagcgactcggtgcaggcaggagacgtgctgccgggctgggctgcccgggggagatgactcctcgccaggagggcgcctctgggaagaagaccacgggggaagcaaagtttcagggcagctgaggagccttcgccgcagcccttccgagcccaatcatccccctggctatggagggcggactctaagatgaatcccgacctggacaccggccacaacacatcagcacctgcccactggggagagttgaaaaatgccaacttcactggccccaaccagacctcgagcaactccacactgccccagctggacatcaccagggccatctctgtgggcctggtgctgggcgccttcatcctctttgccatcgtgggcaacatcctagtcatcttgtctgtggcctgcaaccggcacctgcggacgcccaccaactacttcattgtcaacctggccatggccg

SEQ ID NO: 45400 - DNA, 490 bp, Homo sapiens
tggaagatgccagactcacgaattgaaaactcaattgagcaccactcaagaagcaaggagctggctgcttgagcagattctgccagggaaggagcccttttgagagggagccaatgggccctggtcagtcagaggcataatttaatcctacccttgaactactgatctagagggagaagctgggttatctttaaactgtactaaatctagaggtgttggaaccagcaactaggacaaggcaggggctgggtgaactttgacccacttgccacagggttgggaatggcactaagccagaagcctgggctcaccaagtgattcccagaatctgaccaggaaagcccttcctgtcacctgcctctgtcaccgccttcccaccccctcgtcttgaggaagacggctggcaccttctcttctctgagacacccttgttagctcttcaagactcctgcttgagttgctgtactagaaggaatagggacttgaaggc

SEQ ID NO: 45401 - DNA, 433 bp, Homo sapiens
accacaaaaaaaaaaatcccttcaacctaagcaggcccaggaactggcgtggctgtaaataaataaataaggcatcaaaattaagagaatatttttggcccctgttcacaaggactggctctcaaggactcaggaagccacagaggcagggtagaaaatgggaaagaggaaaacagccagagctctgcttctctgactcaccccaggctcaggtggacttggaacactctgtcctggagctgctgactgtgttgtcagagagcatccactgtgagtggccttatccagcgggtcttcaagtggggtcctcagcgcagcagcattgacatcacccagaaacttgttatagatgacaaatcctagatcccaccgcagaacaactgaatcagaaactggaggtgcaacccaagcagtctgggttttcccaagccct

SEQ ID NO: 45402 - DNA, 1075 bp, Homo sapiens
gctttcaaattaacgctaaagctattcataaatgaaatgggggacctggctatgactttgcttctttccagaaagcaaaggctctttaagcttgaagacgttgaatgcttgctgtaaatccaggaaagaaatgaatgagcacaatttaaatctctccagcctagagtctggccacgtgagggacacgggagctacattgcatcaccatattatccgttattgagaaaggagccagcaattagcacaaaaatttagcttaaccacgttaacatctctgggagagggattcacattctctggctttctgcaagctcttccaagctccagctgtccctggattctttggctttgcgtcatgaagggaattgatttgatcaattacattgctgctgtctaattagtaagcatggccacactggcccatcggtttcacagagattaaacttggaatcctgactgcagaccgattttcatagctgaaagtctctgtaccttcatcctcaatccataccagttccctggagttaatcataacaggactttgacccagggctggaggcatgttctctaagtccagacaacagggcttctggagtcctcctgcattacagcacagattattttgtgaaagctccgcaggttaagaagctggaccttttcacacatgctatgcactgcccttcaaagcactttatgctcaccctttcatttgagtttcctggtatctcaacaaggaaagaaaatataactctcatttcaacatgaagaaaggaaccttcacaaaaatgatgattcaaagccacaaagcgtttttcaacagaaatcagtcatcatgttttcaaaaagtaacttttactgggttagttaacgttttattacaagaagttatatgcgtgttttcattgtagaaaatttaaaagaatcagaaaaacaaaaaaagatagtaaaaagccaccccttaaacataaccactgaaatgttgaaaacatatttattcagccatttttctatggcatatcaaatgtactattttgtaacctgttctttgtctcttgacgtattatgaacacgtttc

SEQ ID NO: 45403 - DNA, 1067 bp, Homo sapiens
ccctctgctaccatcctgtagttaagtacatcctccaacagagagcagtcctcttcttgcctgaatagagaaaagggggccctaggaaaagaaaagccccaactccattcccggagaacaagggatcatttggggaagttctgaaaacattgtgttaggatcacaaatcttctaacaaatcttacgcagaaatctgatataagatcagcccatagtggagtggagagaagacagagcctcctcagcctcctcctcttcctgagacacttgctctggcctgccccaatcaccctggggttccacagaatgatgtttaaaaatcactggtctagtgtaagcaaatggaatttggagtcagtagggccttggttcaagtcttggctctgcatgaccttgggcagttcatcttgcctcttctggtctagcaaatggacatgatcatcacagcccaccaggacacacaaaggattcaacgagatcattgtagtataaacaccgaaatgcaaatcactgggcagatgcaagttataatttggaccttggatatttgaagccacaaggcaccaaaggcatttcctgagctgctcagttctgatgatctcattcattactggtgtttggaggtcacccaggcagcatagagaggcggtagcagcctcctgtttctttccagaaggaagactggccaagtagtggcttacatcccctagagggtgctagggtccagatctggccctagccagagtctacattttgctggcctttccaagtcacttccttgtagccaggctctaggaggacccagagttcatcaagagcccctcaggcagacaggtcctctctgttctgatctcccaactagcagcaaagcagccctactatttcctctccagccacccagactgctgggtcattgtcaccactgaagcatgcacaggaataaatctgccaaccccagtcaagaggccagtggcttggcaagtggaatactagttaattttccagacctggactcaaattccacctctgccagttagtagctgtgtgacattgggcaagttacatca

SEQ ID NO: 45404 - DNA, 1181 bp, Homo sapiens
tccgtctctactaaaaatacaaaaaaattagctgggcgtggtggcgcgcacctgtggtcccagctactcgtaaggctgaggcaagagaatcgcttgatcccaggaggttgaggctgaagtgagtagaggctgtgattgcgccactgcactccagcctgggcgacagactgagactctgtctcaaaaataaataaataaataaataaataaataaataaataaataaataaataaatagtgaaacgaacaccacagggacagacttccttttgtccttttttctcttcgtgcagagtaacgcggagtcttgccgtaacccaagatggcaaccatctctcaaatgtcacgccgtacaatgacgtcacacagcgactatgcctttcctccctgagagtttcgctacatttcccaggatgctttgccaatagcgacgctattagtcgtcatcgacggaagtgcacctgactgagcggaagtaggagctctcagaggctaagaaggtggagaccggagaagctgtgaggttgtgagtaaccccgtgggtctaagcgtgttggctgtgaggaacaaagctagggaataatctgctgggaagcgcgaggcatcacttccctaactgtaggagctcaaactcctgtgttcttccagtagacctgggagcgaagagaagcaagacattgctgtggaggcgaagtctccgtattaagatcttgctggttttttaagttttcttggcacatactagggcaaattcagactcttgtcgtgatacaagggtcgttggcgtgattttgctgcgactagagcaatttacgttcttgcaaatctgtcgcaaatttttgcaaatgtctgggctgctgatgctctgactcagcttctacagcagtggttcgcaattggctgcatatcagaatcacctgggatgaaaacataaataaataaataaataaacctgatgcccttgcttgacgcgacactaataaatcagaatttggtcagggtctgagcagtggtattttctaaagtatctctagtgttctcttgggcagctagggttcagagtcacgctttctaatgcctgactctggcccccacggtaatcctgattagggtcacctgcgccagggttccccttccagtgtaagctgagtgggctctaccacacgcatttgggttaaagt

SEQ ID NO: 45405 - DNA, 1521 bp, Homo sapiens
ccctcccacctggtggcacacctgccccgcaggcgcccacctggggccgggaccgccctctcccggtctcgcgcgcctgccccactcggagcgcgcgccacgcgccgcgcaggaccagagggcggggccccgggcagcggggaagcgagggctcggggagagggggccgcccgggctcactccctccctggggacccagcggaccggagggtgctgggggcgggcgcggtaccttttggacagatccatgaggaccccggagaagagcttctccccgaagcggaacgacacgacaagcgcgtcctcaatgatgtggtccagcgtgacccgcacctccgagcccgggatcagttgcgacaccgtggagtccccgcccgccggcggcacgagcgccggggctacgggctgaggcagcggcggctcctcgcgctcctcgggagccgggggctgctccggcggcgatgcaggagaaggtggaagttccggccctccctgaggcgcggctgccgccgactccgccacccgaacggacagtttctcctcagcctccagctccggccccaccgcctctgggctgcgggcgagctcccccggcggcggcggtggcggcgggagcggcggctcgtcggcctgaggagcggattgctgcccgtcagtctcgccatccggcacagacgcttcagtggccgtgaccgggagggggtcagtgccggcctcactgccggggatgggctccatctccggctcggcctcgccggcgcccccctccccgggggacgctgcagtcgctgccgcctctgcagccacggccgccattttcttcctagcttctccctcctccaactccggctgcagcggcggcggcgacagcgctgcttggttccctgggccttcccctccctcccgcgaacactttcgtcccgccctttccctgatgctcgtttctggcacctcgccattggttgcattctacacccctcccgcacttttgatattccattggccagggatggacgtctatcatctagtcagtccatccttcccacgcagagtaggaacttctcattggccagatgtgttgtcaagtgtggaatctgagtggaggaatagggggcggaatcaaagggggcgggggaagtcacaaaagaggagccatatactcatcgcctcttgctattggctggaagaggaaataaagttttatggttggcctacgctcctgcccattatcagccaggtctttggaggtgggagaaaggatggaatcatgtggcgtgccacttctttcaaaggcggccgaggggaggagtaacaagggaatgcgggaggggaaccgcttcccaagaatctctgcgcagagatccttagaataaatgttatttctaggcgcggacttcttgcggccgcgtgtgggcacgacaggcttctttgggaaagacaactaaagtttgaaatacaatcctacagacactttttgagtgcctactatgctagtcactgcactaggtgctggggaatgga

SEQ ID NO: 45406 - DNA, 579 bp, Homo sapiens
tattattcactaatatgtactgcccttttcctaaacttcagctatcaattatcaggagtttggataactaagagggaaagcagaagctttgggcttttctccaggggtatttcagtaggattctaagcatactcattccacacccctttgtgtatcattctccagagtccctcattttctcagtatttctgaagagtaaatatacattgcaccaataaacagatggttttgtgctgagtcactgtccacaggtgcccttagcagagaaggcttcctgtgccgggcagcaggaagtaccaatgcaactggaatcacttctcccatccacccccaaccaagacaagaagaagcattcattaagccattcaaaaactaaactttcattaagtgcttaccatgagtcagttaccatccctccaccctcaacctctgaagctcacaggttgggaacaacagatttagagcaagtgcattctacttatcttcagctttcttatatatccctaaaaaaaaaaaaatctgcccttttcaatcttccttagaggacaaattggtctaatattttcactgtgatattat

SEQ ID NO: 45407 - DNA, 1691 bp, Homo sapiens
tctgagaggtaagatcctcagccaagaacacattgtagtaagaaataaggacttcaaacacaactctgactccaaagtcagttctctaaaccagtatgttatacttgtccacagaacattggcttctgggcctaaaatattaaaaactaaaactgaataaagtattatagtcaccaagttgtacgcactagtttccgtcgctgtggagggacctattttctccaactaaaaacagtaatagctcccacttactgagggcttacgtaagacactgtttagcgctttacttacatagatgttttcatttatacccgcatgataccccactgaagtcggatcatctcgacttaacaggaaaaactgaagctcaagtaaatttttctggcgaggaaatacagtctgtcaatttgggtactggaagcagctttccctgctcgcagtccggggattgctcaaggtcttcgaggcaccgccacaaaggcgacactctcatagttatcccgactgtttccctgaagacgcaggcctggcctggcagggcacgagtgccatgaatgggtctcaggacagtggcttttcggtcccccgtcctcgctccctcaacacctgagggctcatcacccccgtgaagatatatccaataattaggagccttcgactcattttctcaggttccccaactccccgtcgcccgcaagttctaacaatattttcttacccagccccgccgcagctagccccaagtccatccgacagaatccaagccaatctcgtaatgtttacttccggcttttcgcctaattccggcggccactgcggtaacttccggatgaccggcacatgcgcactaatttcctggcggggccgggggcggaggggggccctccagtgctcctgcgccgtgggaaacgcgagaactctagctgctgcgtatcgcgctatttacccggcttgtggggagtttcaagttgggcggctactttttggcttctatttaggagctttcttttagaatcggagaattttaggaagttaaaaaaaaaaaaaaaagaccagaacagacaagagcttaagcctcaccaggggactatgaaatgaatggggaagttggtgacgtatcagcttaaaaaaaaaaaaaaagcagttaaacttggcactaattagtagccaggctgtgtaacatgctggggatttggtgaacagtgtcttccctcagatttacatcagagtgcgaaagacaccgaaacaactattcagatttagcagctgtgaaaagttgctatgaaaagaataccaggtgctgtgagaacataaggcatgttatcattagaaaaaaatacgacaatttccattttggagaaacagtatctatgctatcccatcccttctttaaaagtatacatgtgaaataaaacactggaaaataaactaattttcgtggtagaatttcttgtgatttttttttttctttgtgctttctattctggttgttctccccctcccccccataacgtgtatcctttttgaatgtaaaagtaaaagtagctaccattcctgcctcaataaaatagcccaacataatagaatctatttttttcgtattaagaatttgcaatacctggagtttaggaacataaatattaattttgcttttacagggcagtagatgaagaaacagtgtcagagactag

SEQ ID NO: 45408 - DNA, 888 bp, Homo sapiens
aagactgccttgaatgttcacatttccagagaaaggtgctcaggaagatttctcagtgttccgcctgccaggtcagtttacagttcaaagaatccctttgttcaaagggtgagcaaatccaggcctcgtgtatctgcagcaatgaaacaagggagctttctgcctgatcttctccccaaaggcagtctctctttttaaatgcctgcacacatgttatttatttatttttggttaacgtttaaattgaggttttggctgaaactcagcctgcgcgcacttgaaaagccaacaggctcattgggcagccgataaagctctcgggatttccccgcggggctgcggagagtacagacaggaagcctggggacccagcgcctgaccagaacttcctcgggggaggctgcaggggagcaggcgcatcctgcacagaacgctctagagcgcgcaggccaaagcaccaggctgctcctgacacgtgctgcaagagggtccccgacccgggggtccagaccctgcacgcatgatggggaaggtggaggcttccccctcagctccgcggagagaagctgacactgccaggctggaaccttccattccggcccagcctcttcctccctcgctgtgccgaggagggatctagaagggactttccagagagggttagcgtgcagggtgtggaaatggaataaaagcatatgcaaataggccttagctgccttcctctaccccagcaaataagagtctctccagaaagatgctctttctccaagacgcttgaccgctcttcctttcctggatggcaccagcagggccgattggagtggtaaaccctgggccggaaggcatgccaaagggtggacaggatggacaggagacagtagcacaacg

SEQ ID NO: 45409 - DNA, 656 bp, Homo sapiens
ccttcagtaggccctattagtatcttttgaatttattggtataaacacacacaacacacatacacaacagcacccacacacaacacacacacacacgactcagagagttacctcattgatagatttaagtaagaaaagaaaactgcatcttttttcttgtggtgagaaagaactgaaatggggactaaatcataatggggctcttcaaaaatgctgaacaacaatatttgaaatttttatgcagacctccaaatgctgcaatcatcccactgtaaaaacttagtcaatttttttttctaagaaagaaagtaaagataataaagacctgttacccaattctgagcagaagctgagtcactgtgtaaacacacttcaactaccggcctgctttctcaagggtgaatcaattgctttgaacaatgaatgtactgagttctttccaattttatcctgcagaatagtaccactcatcattgttctgtgaaagcatgaatataaagagtcaatatcttctgggtttgttggctatcttctgttttggaatttgaatttgtccagcaggcctacaaaaatgagcaacaaaaagaaaaggagagttcacatggtgccatgaaggcacaaacgacaagagactcggagacctggactccttctgt

SEQ ID NO: 45410 - DNA, 544 bp, Homo sapiens
ctaataaagaattaaaggagccactgacaagcaagttaacttcaaatgaataagatagactagatgcactagagaacagctagagaagtggaggaggctgtaatgcacagttacaggaaggatcagaaagcagaagggaactcagctgagatctttttgaccctcacttccttggcccttatcatagttggacaaggctacacacaaaagtaccagacatttattagggagcctgaaaagagggtaaggtgattggacattgtgtgcaggagggaaggcacagactcccacatctccaagatggaaacaaacaaagccaaccgggaatttccctgtgagtcagggcagtatttgacacaccaccactgttttatacctgcttgttataatctttgttgttgaaaggcatgtctacagcctaccatgcggagaatatgattacatcttcccgttactgcctggattcttgcccagcctcaaggccattattctgaccattagttcttgttgtacttaactgttaatggagaagaaggtatgagga

SEQ ID NO: 45411 - DNA, 2912 bp, Homo sapiens
gctgggattataggtgtgggccaccgcgcccagcctgccataaagattttatgattttttagccattttttttaaaaattgtgcatatacattcctaattttaggaattaggaataataggaactaaaagccaaaaggagaaactacatttataaactcacacattacagcaaaaagtatttttaaataaaatcacttgttaaaggttataaattgccaatttatattcactaggtaagcttttattttcaaaaggaacaaaggcctcttccccatttgagccccagtttcttaaactgacctgattatgtggctaaggtattattgtgaggtattgatgttttctcctgtttttccttccccttcctccccaccccttttccccctttccagagttttgttctgtggcattgccttgggtaagtacacggcagggcaaatagcagagtgacggcaaatctttcagattttcactttttcaaagtaagagagaccgaactggggccatgagaacagagacatccaactactgtgtaattcataagagtttagaaatgactccttgtgcaccctttttcaggcccttttacaaatggacttttctcacttgtgatgatctgggagagtgagagtgaggagagtctaagaagagttcaggctaattattttcccactaatctggcataggagaggctcacagagattaaattcattatggtaaatacaaagagtaatactgctttacactcgggtctgtagactgagattcacactcaccacaattattcctgttaacagtctgccacatacctttcattttaagcaactgaaaaattgtaccaacttttctctttaaatttgctttaaaagcaaattcagaaaattggtagagggtcaagaaattacacagtccaactccattatttgataaattgtataaaaagcaaactaaggcaagaatcaactgacttccaaagttcacgaagagagcactctggaagttgataaaccaccaaaccatataaattccaccacctctttatctgtaattaaaaatcaaaggttgacttttttttttttaactactcactgtatttttagaaagatggggcagaaccactgtagaactcctaaaccccacagaacaaacagtacattctggaatgatacgccggccaatccggctggcagccgattgacctgacccaggcgagggttgctgcaccgagtatttagtttggccccctactgaatgaagacactttgttaaattctccaatgagagacgcttagaggtaggggcgtggaagggggccggggaatttgaggccagataacgggaagtgtgagccgattggccggacttctcactccacggcccagccgtttacggatcgcggaggccatccatcaaaagaattacaccaatcagcggcgaaaatgcccccttctcgcgagaaagccccgccctccaatatattcctcgttagggcaggcgcggccccttcggctccgagctgaccctgatcagggccgagttgtctcggcggcgctgccgaggcctccacccaggacagtccccctccccgggcctctctcctcttgcctacgagtcccctctcctcgtaggcctctcggatctgatatcgtggggtgaggtgagcaggcccggggagggtggttaccgctgaggagctgcagtctctgtcaaggtgagtgggactgcgcgggagttgaccgccaggtgcgggtggggagctgggttgggggcgcggggcgaggagtaggtctggcccgcgcccttttccacactaaactctaccgctgttgtgagcacaagcccaggctagtccgaggctggaggggcggagccggatccggcctcctgaggtgcctttcgtgtctgccgacccagtcccagggactagcctggggaggaagaatggaacccctgcagttagaggttcctcacatgactagctctgaagacctcctgccttcctgtctttagttggtgtgggagggaccttccatgtatccagggcttagcttgtgcccgggacatggttgtgttatgcacacttaaatcaatggaattcccaggttcatctttcagactaggttagcaacaacccaccgcacccccccgccccaatacgtgctcctaatgtcaccttttaagtttcctttcctaacaacaataaaagttaagtaatattgagtattgtgtgccaagcactgtgctatactctttaagtggtgaatcatcttgttcagtcttcacattcagcgacagatattgttaccctcattttataaatctagaaagaagctcaagctcattattattgttcagtgttttttaagcgtctactgtatgtgctaagctctttacgtgatttcattttaactcacaaatctgtgaggtaggtcataaaccttatccctactttatcaatgtggaactaagtacaattaagtaacttgaacagttcattttgttaatatgtggcagaatacttaactaccatctgcttttcactttcggtatcctgtcttacggtgtttattcgtggttatctattgacagtgaataacttgaacaagtatttcttgaagatttgcattttatttttctaaaaagcatggttccgaccgggcgcggtggctcacgcctgtaatcccggcactttggaaggccgaggcgggcagatcacaaggccaggagaccgagaccatcctggccaacatggtgaaaccccgtctctactaaaaatataaaaattagctgggcgcggtggcgcatgcctgtaatcccagctcctcgggaggctgaggcaggagaatcgcttgaaccagggagtcggaggttgcagtgagccaagatcgtgccactgtactccagcctggca

SEQ ID NO: 45412 - DNA, 1838 bp, Homo sapiens
tctaatttcaacctgttagtttaattatacacttaacaaagaaaaagcgggtccagatccaaagagcattggtgaaaagaaataaaaggagtactacttattttatgcacacacctcttcaccacctgcttgaccactccacaaacatgcaggattttcaagcttttagatgagaaaactaatcacctgacatcatctctaaattctctgcccgttattctatccctattttctttgttgtcctttcctatatttatctatttatgaattacgcttccgtacaggagcttaacctctccactgcaggtacgttatctgttgtcttcctgcctgtcttcagtgcacggaagaaatatttgttcctttagcaacctagttaatctgttcccagctgaagcccgtcagagaagcagaagcagcagtcttagtttgaaaactaaacacgaaaataggctcctcaaatttccacaactcagcacctgccctgaagaggcgggggctctgaccagacccaaacctggtcagtgttatcctctttctctttctgccagccacaggagccgtcgggacacccaacagtcgttcagggaaacggggctgggggcgtctgggaagaggaaactgaacacaagccccgagctgccgctaccttgaggatctcgcggccgcccaccgacagcgccacatgccggctctggaggccgcactggatatcctgggcgcgcgtgcctggcggcacctgaacttcaatgaacacctcctccaaggtctggtaccactggccccacggggtcccgcacggtaccaccccactccgctcctcaaacggggccgacataatccagtccctcccggccgcggccgcaccaggcggagccgagcgcacgcgcggaatcccacgcttaggctacgcctcggcctctccgctcgggtcactgcgcatgcgcaggaacgcaagctagcgctttggtgtgcgtgttcgtttttccctttgaatggccgtttacggcaccggcaggccccggatgaaagaactgaaatccagaaaagttcacatgcaacgaacaatgggacagaattggaaccagtgaagccggaactcactacaccgtcccctaagtgacgccaaaatgcactttctaacgtctccggagggaagtgcgcttgcgcaaatgctaggttacacttgagtaactccgggaatgactgggtgggtggggcggggaacagtaacggtctcctattggatggcagcctaaactcgcaggccagctaattggacgcaatcagaacccagcattctttcttcgtgttcctgtgcgggattggtgtgcccaggggtttggctttccaattggctaacgccggggtgggtggggaatgtggggagatttgaatttgaaaccggtagggagtgataatccgcattcagttgtcgaggagtgccagtcaccttcagtttctggagctggccgtcaacatgtcctttcctaaggcgcccttgaaacgattcaatgacccttctggtgcgtaagggggaaagagctgggggacgggagacgccctaacgccctttgcctctttcagctcccttcttgggaggcaagcaggaggcgattttagggtcgggctggggctcattcagttgattgatttttctcaaatatgctctaagcatctgttacatgccaagcactaatcaggatgctaaggataccgcagtgaaacagtctccgccccgtggggcttacattcaggcggggaatactgtcaataaacagcggtaatggagaaactacagcagggcgaagggaatggacccgagacgttggtagcta

SEQ ID NO: 45413 - DNA, 1383 bp, Homo sapiens
gcctagatccctcacatgtgcatttcacaatagggttcacactgctgtgagaatctaatgccgcagctgatctgccaggagggggagctcagggggtaatgcttatgcttcctggctcaccacttacctcctgctctgcagccgggttcctaacaggccttggatgggtattggtctgtagcccggaggttggggacccctgctttagagcacccttaggcttcagcttctccaagctctgttgcaggtgaagtcagttcctttgaaaagaaatgaggagctccctgttttatggcctacttgtcttttccgccctcctttccccctcccccgacaatatccctgagccaggactagagctgaaattggggacaatggcagttttctctctgagtgacatcctctgccctaggagctgagttttcagtggacttgtggggaagagatgaggaatagcctcaggccctcttgagtaacctcctggtgtagaaccatccccctcatgagccagagaaagagtcatcggggcccagcattttcaacacactgtgcccaaggtgagcccctgttccatgaatggggctgactggaggaagggatcccccacctcacaattgcatttgtccaggatataactgcagccacagggagctggggacaaaatgagaaactctgatgtcctggtcctcctgggagggaagcttctgactcggagttgggggaaaagagggccctgtgcttttggctgtagccgtctggcgtggactttgccttgctaagctgggagtgggaagaggggaaggagttttggcttaaacactgcagactctctttttcaccaaatttttgcagattttcttgaatagatgtttcttcatttgctatttttcccttaggtcaattttcagaggctttaactggttaatattttataacttttagtttcactagggagcaggtcagcagaactttcatgctgtcatgccagaagtccatctcagcaattacttttgagttgaacttttatcagaaaaatagctttgtagctgaggaggggcaaggagatttaaaagactgtatctcctttgtcacagctgtttcatgtcattttgtaattcagtcttaaagcctgtgtctagtagtgatttttgctgttgagtgtgataatacataaacaactttggaatttgcccgcaacattggtaacacatttcactgacatactctttaataattgtttattacctattatttctttttacctaggaagtatcaaaactccgctgtcagcttgctaaaaaaaaacaaagtgagacaaaacttcaagaggaattgaataaagttctaggtatcaaacactttgatccttcaaaggcttttcat

SEQ ID NO: 45414 - DNA, 3251 bp, Homo sapiens
ctaacataacttttagtttcaggctgctctctttaaatgtatagacttagccaccacacgaagttgtatattgtctatgttaagaatggcgtttgattcgcatagaccctaccatcattaaagaaaatgattaaaaaccatatccaaacatatgcccctagaactgtacccaacttttacggggaaagtatcaagtcagattttcaaaagcagccaagttaaattctttctgttcctcaagactaggctgctctgagaatcagaatgctaattgcatatgcttgcccttaaacctgcttcacgttgaagaatgaagaattaattttcttttctcccatagaaaggtaagattacatcacgtgttgcgactagaaactttaaaccgaattcccagttaagagaaaaagtagtaagatgatcttggctgctcccccggccctcttcccgccctcttctttgttgtcccctgattatgcttgtttagcgctggggcagtcctcaaggattccctaaataaagccaaactaatgaacagtaatagcctgtgtttaaaaaaaaaaaaaatcggaacataagaaacctcaggctgtcttcgattactgttctagagaaactttatgtttacacgaataaggaaatgagtttttgttgggggttgaggaggaaggaaagtcatggtgttctgacgtggaaaacttctttaaaaggctgcttagtctttagtttgaaaataaaccaaaaaggtttaggagtcggggaaaggccctaggaaaatccagacagtggtcacgtttgtggacgacgtttagagcttgctatcctgggcacacaagaacccttggactgttcggtgcaaagttggcaaatcctacacggcctgtgccagggtttactttctgcatcaatttcacaggcgtccagcctggctgaggattttttgcggtttttaactggaagggaaataagtcggcatcagcacttagggctgcttaacttttaaaaggtggtagaacgcccagccttacacgctgctgcttaaattctcggtgctcaccaaggctgggctcgtgtggcccaatcctgcaatccccgaggcggtgtttcttaaagagtgggcttgattctggttaaacccattaagaagtcggaccccgggctcgtttcttgttctgtaattatgggtaaagtccaaggatctgcgttttgaagaggtacctaagtagttcatcttccttccccctacaactttttatttttaattagttaaaaatagttttacatttttgatatctcacacacaggttttttctttttttaagcatcccaggaagacaaatggctcagacgccaacccttttatttttattccttgtctttttctaaatctttcaaaacccccacctagagctctagagatgtgtccattatgctctacccacctccgcccccgcccccatgactttaaaatgctttttattccactttttatattgctcagtcgatcctcatgcactgcgcagtctgcaaacttgaaactcaaggcgatccacttcaatcttttcccgagtcaagaaaaaaaggaaaaaaagtagaataaaaagcactcaaataaaatctccgaaacaaaacctgaattcactgcctaaggtcagggcctttcttttgtgtgtcgctttaagcatcggcgcgtgggctgggggcagaccgcgcgtacccgccctctttctggggcgtcggcggagcgtggccaatcaacgggcgcggctatggcagcggaagccggaagcggcgagcggggtcgttctgggcctaggggaggcgggccgagggcgtctgagctgaggcccgcgtcgatcctgggttggaggaggtggcggccgctgaggctgcggcgtgaagacggcgggcatggtggggcgggagaaagagctctctatacactttgttcccgggagctgtcggctggtggaggtgagggagtcggcctgggcgtctccggtgggagcgggggcgccgagggggacgagccaccggggctcgggcggctttgcaggcgtattccgcccgggtcagagcctccggccgggagtggtctcaccgccaccctcccagccccggatccgaggggggcgccaccgagtttgtttatctcagcgcacacgggtcagtgtttttttcttccagccactgcggcaggaagcaagtaggtggaggttttactttcgagttctgtctctgctcctgaggacgaagaggtttttcagaattgtttgttttgattttggttttccccgtttattcatctttggttcgtatttctcgatcttacaagttcgtaggtttgagaaagaacaggaaaaggtgacttctcacaaataacagtgctggagatgacaacttattgaactcttaagttctcagcactatgttatgcacttgacgggcattactttaatcctccactgtgagatacttgttattgcctcattttgtagacgagaaaacgggcatagagggtgagacattggcccaggttcattccgtaaggttggagcctggaattcagatacaggtttgtgtgactgtcttgggctttgaaccactacggagtttccctgaaggaagattatggtgatgattggaagatccatctctggtgcccccctcgcccccgtcccatcctgctccattccacttaagggcctccagcattaatctgtccacagaacatatccaaccctggggataagaacactactaatgcccagaccatgtcttttggagagagtagagaatataggagatggctgtttctgttattgcaaagttttcatgcttccaaatttacttagggttttcaaatcactttggttctttgagggtaaagttaggataaatggtctattaaacctctatgttcctaggtcctccagaccgtgctgagtgcatgttacatacgtttacatttatatgtatgcatttgtatgtgtacgtgtgcatataaagcttaatctactttcacaaaaagaagttcagtataaaaatgaaaatagcttttcgtgttttccttcattaaaaatgaaacaacgaagagcttggcacagacttactgctctcaaaacctgtagaattaaagcttactgactcatgagaacgagaactgtctcatagttaacgttagagaagcatcctggagtggttgttgttagtaatactgtctgtggagcacagtagcgtcgcagtagaagtta

SEQ ID NO: 45415 - DNA, 741 bp, Homo sapiens
aaattcatttaacagatgttaaaatgaaactgtacttcacagagtcagtgaagtacacagatcttaattcattgtttagtaacttttgtggattgtataatgctttggcttctatttcaagttttcttttttaagggggaaagatactgttgtcattttgagaaaggtagatggcactttttgttttccttgtgtaagagaaacggattgttatgaaagctttgaactttcctggagttcgagagtacactggtcctctaagtgcggtctccaaatcacgatgatcagcatcacttgttggaacttgttgggaatgcaaattatcaagccccaccccagacctttgtgatctaaaagccctccaggtgattctgatccacactgaagcacgagaaccactgaccttaggaactgttacctgttcctttgcttccgtagagtgaagtaaaaagtgaggaactcagaagaaaccaaattatctctcttttagagtattttttcaggaatctttaccgtatttatcctgtgtaaattgttttctctgactgtatctgtactagacttggcatgttttctcctctttacagttcaatctttgtagagctgttttcttgccaaatttcaaagaaaatattttgttggctgaaatccttgttttcatagatcagttggtttagagccaagttttgcaacacagcctgaatgaaattgctttcaacttttaaaatgtcttgaaattgg

SEQ ID NO: 45416 - DNA, 633 bp, Homo sapiens
tagccattgtcatttggatttaatcctacagattcatctaagggttttataattttagttcttacatttaggttgttgatcaattttgatttaatttttatacatgggatcaagtagaggtccaacttcattcttttgcgtatagatatccagttattccaacatcatttgttgagaaatctgttctttcctaaggaactgtcttggcatctttgtagaaaatcaattgatcatacatgtaagggctagtttctacattgtcaattctatttcactgacctatatgtttaactgttttgagaacctccagataaacctgggtttcagtaccagagtagctagcaacgatgccccagtgggaaatgaaggggagctggacatgggtatatacggtatgcctttcactggatacttcttttacctggcagatggactaatgcctagttgcacaattcatgaccatatggtttctcacatggaaaatttgtttatattggcagatgccctgtggctcttgtctgactcatatcctgtttatgccttcctgggagcctgaccttgtgttccaacaagggtcccagagaagagctggcccagggtagcctctataattcttcaaatggaaggtgcaaa

SEQ ID NO: 45417 - DNA, 666 bp, Homo sapiens
tctccacaacgagaaggaagggttattttcctgttaccgagagcaaaatgtgtggacagcctttccattaacagccatgtttaatcacctagagtggatagtggtagctctttcttggtcatctcagcaaactttttcatctcccctttcttgataatgcactaaggaccctgaatacaggaatggccagagttggggtaaggccttggttctgttatccatctctctagcaatagaaatagaaaagtctgggctcatgacctacacaaagaccaatcgaccccttaagtgatgtcagcttatagacattgagagaatgaggcttgcactttctgataagagtatttgttttggctaaggtccctatgtttcctgtcattctgactaaccgatttcaattagaggacatgacgcataagtgcaaggagaaacagtgttgcaatgatgaaagatggttgtggggagagcatttgtgtcccaacagcatgaagtcactcattcttctcctctaggtcctagatttttgcaacctccccatcaaatctgtaacctactccagtattccaccacattaccaagacatttctgtttagtaaagtttaggctgagttggatttctatgacttgtaattaagtcatgttatgttggactgcacaggtagggaa

SEQ ID NO: 45418 - DNA, 347 bp, Homo sapiens
gttaaacaccagggtggacaacataaaaagatcctgtctctaccaaaaattaaaaaaaaaattaggtggtcatagtggtgtgtgcttgtagttgcagctactccagggactgaggtgggagaatcccttaagcctgggagttgtgcaatcagggctgcagtgagtcctgattgcgccactgcactctggtctgggtgacagagatcctgtctgtctcaaaataaataaataaatagttaaatgaagaaagatcttcaccacactaattttagcagatacattttttaaatgtggattatagttttagctgcatttttcagacctcaaagggaattttcatatttcaa

SEQ ID NO: 45419 - DNA, 971 bp, Homo sapiens
ctctgtactgccataggggcagggctgctgaggccctgggaatctaactttcaccccaatgtgtccaggagacagcacatggagtcaaaaattattctccagctttaagactaaatgtgatattccccattgggttttggacttacttgaggcctgttacttgctactcctccctccttgcctactcctttcttttggaatggaagtgtctgtcctatgccagtcccagcattgtattttagcagtagataacttattttgacttcacagactcacagctggagggaacttgccgtgggctgagtcatgccctgagtctcactcatatctgtttagatgagactctggactttaaacttttgagttggtgctaaaattagttcagactgtgaggctattgagatagaatgaaagtattttgcgtgtgagaaggacataaatttggaggaccagagtggaatgctgtggtttgaatatgtcacccaaatttcacacattgaaaactgaatccccaaatgtatatgttgatgatgtttggagctgaggactttggaaggtaatcaggattatacaaggtcatcaaactggggtccccttgatgggactagtggctttaagaagaggaagaggcttgagctatcacacaagctcttaccttcttgctatattgtgccttctgctctgtcctcaccagatgccagcaccatgctcttggacttcccagcttcccaaactgtgagcaaaataaacttttattctttataaattacctagtctgtagtgttcagttatagcaacagaaaacagatgaagatacacccattatttctttagaattttggtgattagaccagtaattattatgttcactcctccatccattcatctacactctgtgcaaaacaaacaaacaaacgaacaaatcagcaaaccaaccagcaaataattgactactactgcttggtgaaaag

SEQ ID NO: 45420 - DNA, 628 bp, Homo sapiens
cccatcagataaccccaaataatctaattttagggtgagctgattagcaaacctaattccatctgcgaccttaatccctccttgtcgtgtaacataacacagtcacaggttctggagatgacaatgcgagcattcttttggggagccagtattctgcctaccacactgaccaaatcacgacttcaaattgcatccctttactgcccacaatgtttggtttatgaaagcagcaactatgtaagcatggaattccaggccaagggatctcccttatcgatctcttaaacaacctacttccgcagtaaacatggctggtatgtttacaaacctcccagataccctttgatttttttttccctaccaatctatgtaatgcttctggttccaaaacttctatcctgtgagatgtccttgacacctccactcaacgcaaattactccagatttctctgtctttaacattctttcttggtatctagaatttattacacatttctttctgcccaacagcaactatttcatagatttcttaattttctctgtgatacgggcattttgctactttgttatgtattttttctttttcccttagtaatgtgcattttttttttttttttttttttttttt

SEQ ID NO: 45421 - DNA, 702 bp, Homo sapiens
tcttggaggaatgctcatgggagctagcagagtgagaactccctcattactctgagaacagcaccaaaccattcatgagggatccgttcccaagacccaaacacatcccattaggccccatctccaactttggggatcacatttccacatgcgtttcggaggacaaacatccaaactatagcagggcagttagttgtcctaatcaggtgtacacattgcacacaaaaggtcacagtccagaggcagctattatgaaacttagctgtctttatctaggaacaacactggggtctttttaaataacaaaagagattaaaagcacatcattgaaaatctgtgatgtgcaagacacatgcactggtaaaatatttcagaggcgatccctgatgttgcaggaaattaagaattgagagaaaacagtagacggtgttcccaggttattaggttactgattaattaggccttctaactctgtggttagccaaatcctgctgagagcacctgccttaatcatacggtttactcagggcactcttggagcacttaaaaggatggaagcctggcactgggatgtatgactgtcctatgctttcatgctaataaatgcctatatgttgagctgaatttgccttgacacttgttttaactgtaacctgttactgagtgtgtgagaaggtctataactcacatttaactctaaca

SEQ ID NO: 45422 - DNA, 993 bp, Homo sapiens
cagagagcaggaggtgcagtgttgactggagagattgtgtgtccgttgatgagattcagcctgttgtgtttagacattatctatctcatcctccttgtaaaggcaatgttactaattcatttaaccaaacaggagagagcttttgcctatgtggtatatcattgcttctcaaacttcagtgttcctaagtatcatcattaggggatcttgttaaaatacagattctggttctgtgggactagggaggggcctaagattctacatttccaaaaatgtcactgctgctagtcatcagtacatacttggatgaatggcaagatacttcaataactaggcaaacggcatcctggactgaaagtattttctactagaggaatttcaaagtgtaaatgttgaagagctaaatgatcccacttccttaaaatgtgttccctctcacagcttccctccccaacagtaagtagataaattcaccacttacgactcatcttgaaaatgtgaaagctgctgtgaaaatacaagcagattatctgaattggttaatgctttactaaactttaatattatactttaggtggaaatggcttcctggataagggtgagcccccaagcagtactttgagagaatgggataaaggaaagagaatatttggtgaggagatagagtcatgagtgattaggtcacagaagctgtctaagacatataaaaccaaaatttaaacggctggaattgctgtgaacacataagggactatagaccaaggactgaaagagcaagatgggggaaagtgtccagaccaaacatagaaaaaggtccagaggaaacacggtctagggagagaccctggaatttcatccactgcacagctgaaggtgttacccacacaatggtgggaccagtcacttggcgagtgacagcccagtggtaacaaggaggatttagcaagcagattttattacttgcaacaagtaagaagaacaccaggaatagct

SEQ ID NO: 45423 - DNA, 2529 bp, Homo sapiens
taaaattataagatgttatctcacttatcctcataacagtacctgaactattgactctaagatatcaagaaaagtttggtgaattaattgtgacaatcttgcatacttaatagtaaaattaatttattaatagtcaaaaatgtatttttggcaagtaggatgttcataaaaacatgagaagcacattaggaaatactatacatgtagtatcatatatagtatttatatatagatataatatatatagatattttatagagagagatatttttttatatatatatatgtaaaaacacagaccttatccttaaaagggttgcatttttagtggtgagacaaaatttattcatgaaaatcctttaggaaatgttcaatggtcttcaaagaagaattttatgagatatttcataaaatcctctaaaaatataacatgtgcactctattagaatagtttatcacgctgaattttaattgtctgttccttgttttcctctctccactacattttttttaaaaaggcaaaaaagtccattgcctagcctgatgactatacatattaggcaccaaatagttgtttattgattgattatacacgaaaacaaaatcatatgcttattgtatctggtatatagcagtttttgctatacctgtgtaaatatattatctaaatacagtaatccccaaatcccatggttttgctttccatggtttcagttactccagttaacattaaccacggtccgaaaacattaaatggaaatgtccagaaattaacaactcataagttttcaattgcacactgttctgagtagtgtgatgaaatcttgcatcatctgccccatcctgctcctttccttcctgtatgtgaatcattcctttgtcttgcttgctcaccctgtagacactacctgcccattagtcacttagcagccatctcagttatcagtagttgggttcaagtcacccttattttacctagtaatggctccaaagcacaactgcagtgatggtggcaattcagatatgcaaaagagaagccataaggtatttcccgtaagggaaaagtgaaagttcttaacttaaaggaaaaaaaagtcaaaaagggttactaagatctatgataagaacaaatctatccgagaaactgtgaagaaggaaaagaaactcatcccagttttgctgtcgcacctcaaactgtaaaacttacagccacagtgcgtgacaagtgcttagttaagatagaaaggttattaaatttatggatgaagacatgaacataaatgcgttttgatggacagcaactgggttcagtagtatccacagtttcaagcatccactggggggtcttgggatatactcacctgcgtataaggaggcactacagtacaattatttatttagtacacttacatagtttatgccttatgtataaggtcagacttaccagaacattgtgatgtttacttcttttttttttttttttttttgagacggagtctcgctctgttgcccaggccggactgcggactgcagtggcgcaatctcggctcactgcaagctccgcttcccgggttcacgccattctcctgcctcagcctcccgagtagctgggactacaggcgcccgccaccgcgcccggctaattttttgtatttttagtagagacgggttttcaccttgttagccaggatggtctcgatctcctgacctcatgatccacccgcctcggcctcccaaagtgctgggattacaggcgtgagccaccgcgcccggccgatgtttacttctttggaaaaattatttatcatataaacatttttgcttcaacagttaaaccaatgcttctcaagttttaatgtgtaaaattgtgctataaaaaatctaaaaaccaatgttgaatactaaatattttacatatacatgctatatatctataaacaccaatttattcctcctacgaaggaataagggctttacataaattgttttctttttatccttacaacaaccttatgagacaggagcggttattaccaccactttacaaatgagaaaaccaaagtaagttagcttaggtcacaaagttattaaatggtgcaagcaagatataaacatagaggacaaactccagaatcaattctttcaaccgctgtggtacagtgcaggactcagcaaactcggagccacaccaaaccacatccagccgctgcctgtttagtaaataaagttcccctggaacacagccatacccatttgtttgtctatggctgctttagagctgcaacagtatgacttcaatagcagtgacagtctatatgaccctctaagtctaaaatatgtactgtctgatcctttacagaaaaatgccacgcctgctctagcaaatcatatatatcattcagttttgtgaattaaatgattttgtcctataattttgaaatgtattttgtatccttaatataggatataaaatgcagctgtgttgcccaaatttttctcattgtatttccaagtagtagttgagcaaca

SEQ ID NO: 45424 - DNA, 1132 bp, Homo sapiens
catcccaccactcagagttgacctcctttatgtcccctaaatcagaggccacaaaattaatgtacataggacatattcggcccctagataggttttatttggcctatggatttctttagaattttgaatcaagtgccagtctattcacatttcagtttgccacaggccccgtttctgccttctgtcttacaccagtcctattcctctcaggcctttattttatatgccaaacctctgaaagctctcacaattgcaaaaatatcacggatcttcctatgtctatttttttcttgtggaatacctctctgcctattgcaaatctattcatcccacagggtgtgacctgtggttcacgtctttggtgaagcttcctgccctctgaatttttatagcccttaatgggttgttattgttgttattattctcttgatgagtgactcagcatacatagcacatggattctatgactcctatgaatagggaaataaacaaagggctctgcagttttgtgctctgactcatagatgcaactaccagggaatttgctctttttagtggcttgtttcctgttctaatgagaaaaatggaaagcacagctcagaaacagactctacttagaaaatgtggatggtatgtctgtccagcatgacaatgtcaaatctcacattttgaaatgccaacttacaacttttctgccatttactctgacactagcatgttgagttgcactaacagttcctttttctgattattggtgatgcaatattatcagcttctcttggctggtgccacatgttgcagttaagtctctgcagctgtctactctgcggtatgtataggagggctttggtgcatatgtgatctgtgcagggatgcctttctgaccagaacctttgggaaaactgcacagtgagagacggaagaattgccaggatcagccttaccatgctttacaatctgtgtccaggagtggcactgccccacccactgatgaatcatcacactgatattatcaaaggagacattacattttcaatgtcatgttttaggtttataatttaattttcagctctggcaattccagaagcatccctagggacatatgaagaggaaggggctagcgtgtactcga

SEQ ID NO: 45425 - DNA, 982 bp, Homo sapiens
ccttgggacttaaaaatttccttttttttttttttttccttccagcagaattctagtttcagttattttattggaaatccagaaagggaaaaaacaaaaaaacaaaaaacaaagaaaataaagttggtatgaaataggaagctagaaatggcagtaagtgaaatctggtgttggttaaacatttaagaaaattattcttcccctcccctctccatgtccacccaaagtaaataagtacaatgttcattttcatctgttgtaattgggaaatttacaatcctcataatgtactttgaggttgagatataaatgttgggttaattccattgcatttcacaaaatgcatttataaaacaagctggctctgggcacgtaatggatttatgtaaagcgtatttgtgaaacacagattctattagattgagtccttttggcaaaaggtctgtagcgtatctgtctcctcggcagagttccaacacacccaggtactcactgcttgttaactgagacatgaggaatgaagcctgagggaaggaaggattttccttagcaccggggacaatgtccttagattgttactgccaaccaagttgcattcatttgtcatttaaggtgagttacttaaatttttctcctttctctccagaaagcggcctctcaataaatctagcattggagcgtttcttaagtaaacacaaactaaacatgcgagtggaattctatttctactcccactctattactcttacatgctcaaattaactttgtattttataacccactctactcctttcttctccctaatccctcacgtaaaatcacagagaatgcctggaacagacataaaaacttactaagagctccagacctagccaaaggcccataattttgctgttaaggaagtgaaaagtcagtggtaagaatagtgaaagaggtagctacaaaaagcatacattcatatttgactgtgcttgatgttgat

SEQ ID NO: 45426 - DNA, 753 bp, Homo sapiens
taataaaaataatgaaaattgattttaaaaagagcttaaaatttattagagatttaagagttctctgaagcatttttcagaaatagcattgtttgcctgtgtcatggaattattcattcagtaggttaaaaaattgcataatatggtcaaattttcagtgagagctctcactcctaacatccttagtgcaaggggtctgctatttatgtgaccgttcctgttgaatttatcatgggtcagttatgaaaacacaggaaccctgctccaattattcagaagtcattgacttggagttgctcaatttgcttatacaggaaagagttgttaaacattatcctttctgggctaaaaatgaagttgcagtgtgtacagaagtttgccaatgcacaaaaggtcacactgattgatgggctttgaaaattggccatttatgtcaagaaggagatgatgataaggtttattattctgtgaaagtcttccaagtggtgaggacatgtcaatagcacaactttttctccttttgctttatcctttgaaataatgagtcatgaaaccagagagttggcatgcagtatggccggcttcctcatgcacttcataatgctgatctagtagtggttggcaaattagtgctcgggtaccaaatccagcttcaagcctgtttttgtagataaagttttattagaacaaattaagaaaatcccattcgtttatgtattgtctatgctttcttgtcccacaaagacagagttg

SEQ ID NO: 45427 - DNA, 758 bp, Homo sapiens
cttttcagaatgtgctggtttttaatattcagtatctggtccgtatttaaaggcatacttattgaacttttatttttgcatccccagtgtctactttccttggctccatctcttccaagccttcagccaaagcagtttgagtgaggattgagcccttttccagaggtgggtcatgtgacctagggctaaaccaatcaatacgctacatttctctggccatagggattggttctggggtggcatgtgacaagctaggcaaacagctaatctgagggcttttgaagaaaccactgggaagaagtctttattcctgttgaacttgcagctgaaaggttggaaggtctggggttgccacatccactttgtctgttggagaatggagccaatctaaaaggagatagagaaaaaagaaatcaattcttgacactgtctctcctccaaatcaagtcacactatgcctctggaatttttagttacataagtcaatattgtttttttcttacatcagtctgagtcatgttttctgagagagaaaacaaatacagccatccaatttcaaatagtagtacttttactaactttttttttttactacctttatgggtactgccagttcaatgcggtttttctctaccattttgtgtctctcagttatggcatgtatgctgttcaacctcattttagagttattggtaaacttgcctcctaccagatttgaatggacaaaaatttctctttaaagctcttcattggcccag

SEQ ID NO: 45428 - DNA, 718 bp, Homo sapiens
aatcaccttactttcagctgaagcagctaaggttctcagaataagtatgctgagcatgtctctgctgtagccagatagaactagaacaatgccctgccctgctgattatctttgtaagaattctgaaccctgctgagtttatggggcaacattcctatggcctgacttgcagcttaagtggcttctgaatcgaacatccctcctccagtggttgagagacacagactggcacttagtaacaatgcagcaatgatatatttagtatcaaccatgagccaggcttttgctgaacagtttactatgcagtaggttccccacaagccccaacaatcctatgtagtagaaagtattagtttccctaatatgcaaatgagaaacctgaggctttaaagatgaactgacttggaaaaatcacatagctagaaatggagagagctggactttgacccaatcagtctggctctgaattcacttctgtaaatgcaataatatattggggttcagggaaaatttttacatagcacttttgaggacatcttgagttcttcagacctcttcacagacatgccatatcatagaaacagaaaaaaatttgcaaagacacttagtgtctctgaaaagatagaacaggcttaaagagtacctgactcaaaaaatttacaaaatcccactgctcccttgatagagagatcagatggaacatgaaataaagtacttc

SEQ ID NO: 45429 - DNA, 646 bp, Homo sapiens
gctgtgtatcaatgttttcatccgctcctctgaatacccatgagtttatttactggggaggtcaattttctcggtagaacaacagtcgacacctggtttccctgataaccagagttgcttttttgcacacagcgctacgttgagaccatttaagacttttgctgtatttcaaaaacgtttgctgccgcagacttcgtgagcaaagaacaacatgtcagtctgctctgttagtcattagttgtcctggttagctgagtggtacactgtgatgagattgtgggatacggggtgagagagagagaggaagagagaaacaggaaaaaaggcattgacctttggagttgaggcagcacaattatttgtatagtacatttcttttcacagccctgctaggattttcccctgggaataaagccaaaacaacagaaaataaggggatccccctggttgcaagctgcaaaatggtacttagtgttaaggaattttatgtatttgtttgtttgtttctttggtgggatttaaggttaatgactaagtttacttgtgattgactcagagaaaagggaaaaacaagaaaaagaaaagaaatcttttgttggagcctcaggtagcttagccagcctccgcttctcaaagctaccactct

SEQ ID NO: 45430 - DNA, 709 bp, Homo sapiens
agttttcaagatagaacggacacgtactccagcccttcatgatgctattccaagacagataggactgaaatcaccctaagccctacgagtgtgtcccacaaataaggaatcattcacatcacctcaccaatttcttggctcatcccaactgcaaagctcactccacactttcatcccaagggcctctagaagtttccaagagtgtcttgcatgctcatatttaacccaatctgattttacaagcttagtcccttcattgaaacctgctgcctgagaaatacacttacagggactcctacagcactgcccctactgccaggatccatgccaaggttgtgttcccccgtgccagcagcaccattggtgctcacgctactgaagtcctgctgtgtttacacagtaaaggagagaacaccacactccccagctttatcaacgggtccaaagttcctttgagaagacaaaccttcactttttgccaatagtggctctcccatacatcaaggttttgtcccagcgctgagctgtcgaacagacaccacagagtcctttttgtatcctcacctctcctcacccttagacaggctctcaacccagggtagtggaggatgcttacaagttctttaagctcagccagtctctgaatcccagtttatactcagtcaggacccctaccatttagataagcggctcttaaagaaaatccttt

SEQ ID NO: 45431 - DNA, 576 bp, Homo sapiens
ggagaaggccagagataattcaccaggccatctctaaattacaaagttttccagtgtgtatataccttctaagctatgtgtctacatgtaagtgtgcattcatctgaagacacaaatgattgattccatctaatctataactaaggtttgggtcctggacaccttcctccagagcctcagtaaatttgcttagcctagatgggtcctggtgccgggggtgattacccttatcttttctccagctaaggtgtggaggtctggggagttcctttagactcccagtaaaacttgtttaatcctaaatgggtcctggtatgaggagcatgagaatttcttcattatcttgtgaaggttcaaggcccaggaaaggcctaggcaagactcttggtgagcttttgttacattccagcctttgtgtaagtgcgctggctctttccgcctttaatatttaacctaaccattcattcagtgccaaaacagttgtcatggaggcctgcctgttcagctggtggtgagacctggcctgccacactgctctctttgtgattattgtcttggggtgattttttggtttta

SEQ ID NO: 45432 - DNA, 1098 bp, Homo sapiens
agccaggtgaaacaattagggagaagggatattctgattacttacttacttcagtgatcctctgaccacaccaagtggcgactttccaggaaagttctgattcagcacgctcacacccaagccccgccttccaccctgaggaggcaggtgggcagcctgtaaggcgccattccccagcacccgcagcgggcactgtggctgcacgccgccctcggaaagcaaggctgcaccagctgctccacaaagcccctccctcaccagccctcgcctcctcccggcaaatgttgggtttgccatctggccacgaggtggcagcctttcccatgaaatctgcttggaggtgggcccggcgcctcaaagggatttagggaagtcgccgagcagccagagactgcgaggagagccctggactcctgaaagaggcccgtggaatcggttccaggaaaaagattccaaagaagaccagtcctgggaccagccagactggactgcgagcctgcctccaccatttgcccactgagtacatttccacctggacttcctgagcctcacctttcccatttgtaaaatagggataaaaataactgctgtatgggattatttggaaagcctaataaaaacaatatatgtaaagtccttggcaagggcccagcatttaacaaatgcatattaaatggtaagctattattaaaggaaaattgtggaatttgggggttatcgtctttagattaaaaaaaaaagcaaaacaaacaaaaaaaatccttcactttcactcccaaccacacctttctagctaagcctgggcttcttatctaacctccgaagcctgggtttcctcccctgtgtagtggagatgatactgccatctggcagggttgctgttgtaaacactcagcctccctcaaggggatgtctactgattggcaactaacttttcttattctcagccttcagtgagagctgaagtgtgatcccagcctgaagcttgacctgttcaagagtaaggagctccacccaccccatcctcccacttcaagagctgcgtaaagccctggggacttgctcttctagaaggctccagggaagagaggacagaag

SEQ ID NO: 45433 - DNA, 5996 bp, Homo sapiens
cagttgatttcccagcactgaattaagcacggaggaccgagaggtaaataaaaaaccatctcttctgcctcggctctcgtgttaccaaggtttcttccaccctcattttctctggcttaggacgtgttttcccatcattggaaaaaaagagtccacagtacatttatgaacctcaaataatgcatgactcaagaaaggggacattattggctccatcatagaacataactgtgcattccccaggatgtgtgggagggacggcatgaggtagggaggtagagtcatggagcaggaagcaaaatctcagcagaggttctcaaagcctcagtttcccctgaagaatgcagatgcgaacaggaaactggacttgctaacatatctgttcctttgttttatatttaatttctcctctttaccatcttcatggaatatgtgactctggctctctgaaacactctaaaacacgtgtggataacggcctttcttccctgcagttgcagtggagaaaagggttcaagtgcgcatcgtttttaaaaacaagacagcctgtctcaggctcaggtgattcctctgggccaccgggatgtggcctttgtcattagaaaggcttggcctgtggtcacttctgcactgcccaacactgcccaagcctgtctccttcaactccacacgcgggcagccagacgcagccccaggagggtggccaggagagggctgggcttcttgtcttcagttcggattcctgcagttcagtcacctgtagagtaacgtccaattcagcctatcatgtggctgagccggttttacctttaatctctttcacgtttgccctcagcctcgcagaatgtccgggatgattcacgcgccatcacatggggcaggcagtcatctgttttattacctcaccctgcttgccgcttctgcgagataacctgggattctttcgttgggggtggatgggaggtaaaaagagcgaacagacctaggccttaattcaggagtcaattcctgctctggtctctctttcttgcttcccaggccaggtcaaaaggtccaaagaagcaagccatttggaaaatgccagggtttgggtggctggactaaaacgaaagtgggacttggcagtctaaaaggtgttttctcttcacaatcaatgccaaccagtaaaaaggcttggttgaaaaataaggccaaaaaaaaaaaaatcagcaattaggaggactgttgcaagcaagcaggcataattttcagaaggggaaaggacgtggatttgtgttttgaacagaaaatacttcaaatggtccacatttcatagaggtgtgtctgctgccaggcacggtgctccgaatgcaccgcaccacagcccctgagatgaaggcgtgctgctgagtgccaagccctcacatttctcctcctgctttgccctaaccacaagcccaaaggagtccatattgttatgtgattttttttcaaatcaaagactgagacttcagtgaagcaagctgcccaaggtcacacagctagaaaaccgggtgggcttgggacccaaacagcctgattctagagctcttgcttctcaaccaaaaaactatgaagcaaacatcaacagagatgaacatttgtcagtatcagtcatgttccacatcccaaccatggggaagttctgaggctgcagagtgatttaaaaaagaaagaaagtctccaatctgggtgacagagcgagactccgtctcaaaaataaaaagaaagaaagaaagaaagtcagccaggcaaggtggctcatgtctgtaagcccagcactttgggaggctgaggtgggcggatcacctgaggtcaggagttcgagaccagcctggccaatatggtgaaactccagctctactgaaaaatacaaaaattagctgggcgtggtggcgcaggcctgtaatcccagctactctggaagctgaggcaggagaattgcttgaatctgggaggcagaggttgtagtgagccgagatcatgccactgcactccagcctgggggatggggggagactccatctcaaaaaaagaaaaaaagaaagtataggttaataactgagaacactgcactagagtcagacctagtctgtcttatgagctctgtatcccaggccaacaacaaagcatcttggagcctcatctgtaaaatgggtataataaatagactttcctatgccagagggttgttatgaagattgagatcatgtattcaaagaacctagcaccaggttggctttgctttggggctactgctctaatcaatagtgggtttttatgtagtaaaggcttgacccaaacagaggaagtgtagagggctgtgggaattcccccataaaggaatggggaattccaacttttgggtgttgagggccagtctgaggctggtgtccctggactctggtgcctggtatttatggaatgaaggagggccaagcactgagccccgaggcctggcctcagggaaggaattaactatgaagaaggcatttggaggcgaggctcactctggtgggtcttttctgtcaagaggagatgagaccacaaacatgattccctctctggctcagcaacaccctggtccatacagcacagggtgctggttcttctggaagaccgtggggctcaggcaagagaagacacccaactgggcttcattcgaccagtccagcttcctgccatatgccgagggcaaaaaagggttaaattcccactcagtacacagatgtaagaggagatggggaagtgaacagccagttgatcattcactcaatcatgctagcttgctttttgtatttaatgctacattttaaatttatttatttatttatttgagacagagtctcgctttgttgcccaggctggagtgcagtggtgcgatcttggctcactgcaacctccacctcccaggttgaagtgattctcatgcctcagcctcccgagtagctgggactacgggcgtgcaccaccacgcccagctaatttattattattattttttagtagagatggggttcactatgttggccaggctggtctgaaatcctgacctcaggtaatctgtctgcctcaccctcccaaagtgctgggattacaggcgtgagccaccgcacccactaattctacatttttaatttctcaagaaacattgtgtctctgattgttttattctcttgaacatttttcaagatggaattttgctttgcttactttcttctttttcatagccccacttctcccaaatccataacacacctacctcaaagtatcacaggaaagaaagcctgtgaagctgctagccacagcctgtcacaagtaagtcctcaatttagctaacaataacaatggcattactattacttttacaaagtgttttccctgacaccctctggaagtcctcccaggaaagcggatccacagcgctcctaattttagggaccctgaggggagccagctacatttccaaatggtggggaagggtggagggtgggcgaaacgtcgtagggagagttgaatagaaggagacagatggtgcctgtgttgggggaagggaccagagatcctggaaaacttatgtttcccaattcgcaagaatgtttccatttaaccacttcttgcctgactcctgattctacaccacagaaaagcagggagtttttaagatttggggccacctgtgccgagagcctggctactccgggtggagagagacaggagcgttttaagtacaggcagagcggtttttggcccagccccctaggtctgggacgcaggtgaggggcggtctctccttcccctggcaggggcagcgtaagggtggccggcggctgggactgtcccacgagggggcgcgtctcgggccctaggacccgccctcgaggcgctgcgcgcggggaggggacccgggaacccaggcgcccggcgctccgcctcccgtttccggggcagcgcggttacctgcaccgcccgagccgcacctggcggaggcagaagtcacaaacccggcgagctcagagcggtggagcggagaggagggacggcacccggctgcagggaggagggaggcggcagcggcagcggcggcgtggagggcgcagcgcgccgcgcggcggaggagggcagacggcggcggcggcggcgctcggctcgctctgcccggccggctgggcgcgcacccgggctcgcaccgcgccgctgcggacgcacatggcagcgtgagaggccggcggcgggaggagcgggcggcgccgggtcggggctgcagggccgcatggacagcggcgccaccccggccggcccctactagggccccccatctgcgggcgccaccccccggatcatggtgcctcggcggccgcccgggctaagagcggccggctggagccgctgagcccccgctgcggccgggagctgcatgggggagcgccggcagcgcttgggaagatgccccggccggagctgcccctgccggagggctgggaggaggcgcgcgacttcgacggcaaggtctactacatagaccacacgaaccgcaccaccagctggatcgacccgcgggacaggtaggaccctggaaccctcctccgtgcccccacacccccgcctgggcccccacctgcccctggagccgccggccgggactgggagggggcaggggagctctgcgtgcctcttgagctctcttcagttcgccaccccctgctccccccaaccttctggagcgctgctcccgcctcagtgggccaccgagaggaggcgcctgccggggagctggcccaggctgccccaccgccatccccagttggaggacttaggccccagccggcacctgcccggagttttgaccttaagctctagccccgcccgccccctttaggaagagaggtcgggcgggggcgggggttgggggagcgacctagccgggtgaagccgggtcttcccggggaggcttccacccagcgtggggggtgggcggatggggatggggaagtgtccggttagagggggtggtcaagaccccaggattccgtgggagaccactggagagagggcactcggcgcagaggaaggcaacctgaggtgtgctttttgacaggtgccttggaagctgctgagaacagcacaggggcagccagggggccctggaacccgagggtggggaggaagtgaagaagcgggggagggcagatgagggagactggttatccaggaatctggcagcaacttggaagctgttaggatggagatggaggtgagaggcctcccggaaagccttgcccctcgcctctttctcctctctttcttccctgatcggggaagggggcggcgaggctcctcagccctgcaccagcgggacctgaccttggtgggtaccaggccgctgtaggttgagataatgtgcagaggcagatggagcctgagatagctcggtgtggctcttacctctccagactttctcctggttgtttggcatttctttgctcacatgctgcacacacacacatacattcaccctctccatgtatgtcctagagtccccggaccacgatgttgttgacacggtctgtgggcagagtgtcttggggaatgcggactttaaaccttgtctgtgaccttgggggtcaggtccctgtaaagcaaccaaggtgaatttcttggactcttcatcttgtgtggtgggggtggaggtgtcccagaagtgtatgtagcaagatgtgggtcaaaaaaagaatataagcggaaagaaaatgagagttgagattctcggtagtttctgggagcacttactttcattcattcattcattcgttcattcagcgcttcctggatgcctcctctacactcagcaccatgctgaatgtctcatgaatgtaatctggaaggtaaatatttagtgctagagagcatctcttaggcaagctgcttcaacctctgagcctcagtttccctgtttgtcagatgggggagcccaccat

SEQ ID NO: 45434 - DNA, 610 bp, Homo sapiens
caattaattaatgctgtgagacaaaaaattgcactaaaaatttctactccgtgtgtgtgtgtgtgtgtgtgtgtgtgtgtgtgtgtttatttgccttggatttttccttacctgaatcatggagatgcccacccattcccctgaatttaaaagaagtaagtcaaatggtccttcagtcagaaaagtgatttcttagccaccaaggacaaaatagcgtctctggttaccaaccctaaagaatgtcttggcacattcctccctctggggctgagctgttttgtgtgctggccggccaggagctgctgggggtagggaatccagttttcagcttcccctttcaccagggggttggaagagcagccaagcagccagccttgccaactctctccccttctcacccaggggaagactgggaggccgaaattcctgaggatggttgtcccaacaaccggagagggtccagtgggcagcttgggtcctgcccactgggccaaaggctccagcagcaccacaggcttttcctgagtcaaggccagcctgggaaggtgacaggcccttcgggaatcaggtgctgtggatcaggtctgaacagcaccttggagccgtgctc

SEQ ID NO: 45435 - DNA, 2781 bp, Homo sapiens
aaaacaaggataagaatagaacctacctacccctgagagtcatggtgaggatatgacatccaacatagaaagtcttagcgcctatcatgccttcatatgggagccctttccagttaggccaacctaccctcctgtgcattggtaacggtagaggaactaaaacccctgtttcttccttgccaactcaggtctcttcctggcgggccatggctcacctgagccacactgacattagagctcgcaaaccaccttggcagcactcattatatgaatcagtaaactcccctcctcccccagtcttatcaggggcaagcccttctttggaatttctggagtgaagcgactcttgccagtgagctggcaccagggctgtgtgtgaatcagggtaatgaattgcagttgtcatggcagagctaaaaaggctgatgcaggaactggaggtctctggaactcatttgtaactgctttgatatcatgtcccctcactcagtcttcccttttgcgctgtttgagagctgtttgaggacctgctgatttgagcatggtggtgttgcaggaagggcattggcatttatcacgtcccacccagcggggggttggccattcactcagcaggtatttatggagtgcctactgtgctcagactctgttgccagagcggaggatcagagcaaagtccctgctgcaatggggtgtgcacgcgggggatggagactgggaaatagttaaatagataaatcgcattatgactgggggtttgatgttctctagagctcttttaggaaggtggagggacagacctggtgacacctgtcgacagtggtggtgcggacctagatttgaagccgggagaccttgaggcctttagtaggatgttatcaagagcctattgtggtgaggtgggctaattgctgggagtgcaatggtgatacacaatagagtctccaactcgtagaatttactacaaattagtgagaggcacagctagtcaaggagctgtgcaaatatagtagaaataccaggctctctgagtctgtttttcttcctctcctgtttcatctggacacgttcagtcatttaacaaatatttgttggatagtgtacctgtaatatgccaggcattgttttggcactgggggttcagcagggattaaaccaacaaaaatccttgtcctcatggagcttactttcaaatgcagtgtttgtcaaacttgaggaaacatcagaaccacctggaggtcttgttaaatactcagtttgagtcagtggatctggatggggcccaagaatgtgcatttcctgcaggtccccagatgatgatgctggcttgacccaactcataccaaccaactaatacactgactcattgactccttataataacctaggagagggtactcaattatccccgttttgcagacaaggaaactgaagacaaacgaagtaacttcgtcctccctatgctaagagggctaaagaaaatggtctcatgagccaacactgtctacctgcatcactgtgattatgaggaccatatatcatgttcttttgttttgctgaccaaagcctgaccagtagcaaaatcctgtgggtttttcttgttcattaagaaataaggcacaggaggccaggtgtggcagctcacacctataatcctagcactttgggagtctgatacaggaggatagtttgagcccaggagtttgagaccagcctggacaagaaagtgggatctcactttcttgcccatctctacaaacattcaaaaaatgagctgggcatggtggtccacacctatagtcccaactacaccagaggctaaggtgggaggatcgcttgatctcaagaggtcaaggctgcagtgagccatgtttacatcattgcagtccagcctgggtgacagagtgagatcatctcaagaagaaagcaggcaagcaaggggaagcagccaatctaaggggattccagaagaccgaagggacttctctttcattagaatgtatagaatttgtattttcatggccacagcaggatcagaggaaattgccctccctgtttctcagtggaactgagccaggactcccctgcgctgagctgctcgggagaggaagggtccctgggctccttcaccccaggggactttccctacttcaactccaggaagtgcagggaggtggttttgaggaaaagcaaatccctcctctcatggaatcctcacttcagccctctagggaggccttatccaccgctattcccctagaccactgcttcagctttacatacctttgtcacttgctggttctgtgaccttggtcaaagttacttatatctttttgagccttcatttcttcaccggcaaaatgagaataaattagaatccatctcatagagttagtaataatcacattagacatctctcattatattcaagttccactgaccaggcagttctaatggcagccattacagtccccataatatatttgataactttctctatagttacagagttactgctcaattcgtttattttgaggaccagattttttggatgtaaaccacttcttgtttctctctgagcaaaatgtcccctggaaaaactggtcatgcctaagaagatagacttcttcctagtagacaatgacttttgctggacaggaatattaagaagtgtcttaatagctcaaggagtttcaaaacaaatgtaagtggtttatttctattgctgatataaaacaaacatttaccagcagccagtggaggaccttgggtttttcttca

SEQ ID NO: 45436 - DNA, 1235 bp, Homo sapiens
caccatgcccagctaattttgtatttttagtagagacagggtttctccatgttggtcaggctggtctcgaactcccaacctcaggtgatccacccgcctcagcctcccaaatgctggaattacaggcatgagccactgtgcctggcccagtatttttttttttttttttttagtagagatggagttttgccatgttggccagtctggtctcaaactcctgacctcaggtgatctgcctgccttggcctcccaaagtgttgggattacaggcatgagccactgcgcctggccaacttaggaacatttttaatatcattcccaaatccttgctggccactctgaacctccacactcccttctccaggccctcaccatcgcctcacgtcttcttggcattaagattcagcttacaaatgaagtttagaaacaccttccccacctccccagcccaggctccatagcatcctgtgccgtaatagaatggcataatttcctgcgtcttttctattcttggttaatggatagctcagtggctggcatgcagtagaagcacattaagccagggttgaatgctccccgggtccggagttttggattctgtttctggcccttcctcttagcagcaaaccacttaaccttcctgagccctggtttccttagctctgcaatggacgaataaggagtcttgatctcctttctacaaggagatgaggaggtgtctttggagctgggggaacaaaaggaacagttagtggttcccagcttctgctacatattagactcgtcagatcactggaggggacaactaaaaatacccatgcctggcccacccccaaagattctggtttacttggtctgtggtatggcctgagcatggaatttctagaaagtccctagttaattctaggttgcagccagattggagaagcatagctgtaggtaaatatctgccttccttacaaacatttgtagagtttgaatgagattaaatgaaagtaccttgtaaaggggacaagtgccataggaatatgagatattttaaaacctaatatgtatagttttacttggaaaaattgagatgattcaggaagtatttaaaaaatagttgcaggaggtggagaagtaaatatctgggagatggccgggtgcagtggctcacgcctgtaatcccaacactttgggaggctgaggtgggcagatatgtgaggtcaggagttcgagaccagcctggccaa

SEQ ID NO: 45437 - DNA, 1941 bp, Homo sapiens
tggtctgcagcattcctgcttgcccaatagaacatccttcagaaagaatgtgtgtttagggttcactcactagaagtcaagtgggtcttcagtctgagccttgcaagcaggaggtggctttagccgtgcatgggttaccttccacttctgcagcacattggttaaaactgaaaccaaagaaagccatcccttctttgagaactgtgctaggaaaaggcagagcagtgaattgctgtcaccctacatggatcttacagacaaataataaaaacaagcaaaataattacagattaggaaaatcagagcatgctggattggaaaataacaggccttgtcactggctccaaaggtcagaggataaagttagaaagttctgtagtcagaaaaactgagtttgcttttagctttaaataaaatacatctatagtgatgcctcttcaactggagttttcatcattttgcgcaggagttcatggcactttattggcaacaagcaatgtttttttcttgaccttggcagaggagctctcaaggcagtgtcatctgttggccacgtgcatctgaacttctaaagagagtggctcaaatgcaggttccaaggccctaccccagtcagaatctctggaggtggaacccagactccacatttgtaaagagaacctccaagtgattttgatggaatcttcagtttgagaaccactgatcaagggaatagatttgtgccaaattgcaaatcaatgtagagacccagctagaatcccttcagcctcctccacaacctggcccacttcttggtcctcacatcaaaacaatctcttcctttcttcagtctttcatggactttcagttctccagtatgctcaggggctccctctccaagaagaagtcttcaatctgcaaaccccacctggtgcccctttacctgaagaacatagaagagtcccacatccactgcctccactgcccccattcatgcctcagcacctccatccctccttctcccaccccagcctcagagcgaggttccagaagtgtcaccaggggccacacagtggtatcctccttgacctcctgtagcacctagcagtgctcccaactcccttcctttacagggtcatcctcatccagaggaggtggggcattttgcactcttctccctctttgctcttccctaggggtgtcctgtgtccccaagccttcaaccacatcctttgccatgaagcctccggtgcccatttctgggtacctactggacatttctgtgtctagacaagcaccgcaaacaacaaatcgaaaattgaatccagtcctggtctcaaacaactttgcctctggccttttttgccattaccgtgagacggtatctctgtaatgattacaacataggcatggttcccatgcttaaggtccaaagggtgcatagtggaatgtagatcttcctcacacctggtccctacctacccagccccctctccacaggcagcccctatttccagaaacatccatctccattccttcttccttcatctagctgccaagttctgccaccctttcttttgcaggctctgacacctcattccttttctgtttattcctatagaagcttagtggaaaatagacccctctccctctgtcttagaaaatagagacctctccctctgtcttagtagaaaatagacacctctccctctaagtagaacatagagacctctccctctgtcttagtagaacatggagacctctccctctttgctcttccctaggggtgtcctgtgtccccaagccctcaaccacctcctctgccatgaagccacaggtgtctgtttctaggtacccactggacatcatttctgtgtctagacaagcacgacaaactacaacaaatcgaaaactgaatcccattctggtctcaaacaacttcgcctcttgccttttctgcca

SEQ ID NO: 45438 - DNA, 1203 bp, Homo sapiens
aggttacagtgaccgagattgcaccattacactctagcctgggtgacagaacgagacgccgtctcaaaaaaaaaaaaaggaacaataaccaagattttattgagtgcaaagcacagttctaactgttttatatttattagctcaactaaccatcataccaaccttctgagaaaggtactaatattgtcgttatttagagatgaagacgtggcggcacagggggattgagtaatttgcccaaggtcgcacagctagaaagtggcaaagccaggattcaagctcaagttgtctggctccagagcttgtggtcttaaactgccatctactttgaagggttgttgtgagaattaagcatggattatcttatttaaggcatttagcagagaagcaaggctcatcataaatgctttaaaatgttaatggttattacagtatcacagcattagtttgcaggtgaccgcaatggacttcatggccccagcctatgcctcctaacccttcagctcagctgctgcaaatcatgagagatgctgagttgaaaatatcacagagccagccttgagctggactatcacttggtacaggagacgtcaggggtcatgtggtgccaaccgcagcagctgcccactcagggtaggtcatgggtgactggtatcctaagtactttttttttttttttttttttttagagtctagctctgttgcccaggctggattgcaatggcatgatctctgcaacctccatctcccagactcaagtaattctcctgtctcagcctctcgagtagctgggactacaggcgtgtgccaccacacctggctaattttgtatttttagtggagacagggtttcgtcatgtttgccaggctggtctcgaagtcctgacctcaagtgattcacccgcctcggcctcacaaagtgcaaggattacaggcatgagccactgtgcccagcctaaggacattctttctcagaactttgaaagtaaattgctctgaatgctcatggcagttcacagggcctggtggtttctgcctcaaacccctgtggcaaactcctgtttgtctgtgtgattcctaccctcttgctacttgaagtgtgggccgtggaccagcacgtcagcattgcctgggagtttattagaaatgcagaatcccagccgggcacagtgctcatgcctgtagtcccagaactttgggagg

SEQ ID NO: 45439 - DNA, 5301 bp, Homo sapiens
atgggtgggtcacctgagttcaggagtttgagaccagcctggccaacatggcgaaaccccgtctctactaaaaatacaaaaattagccagacgtggtggcgggcatctgttatcccagctattcaggaggctgaggcaggagaattgcttgaacccaggaggtggaggttgcagtgagccgagattgcaccactgcactccagcctgggtgacagagcgagactgtctcaaaaacgaaaaaaaaaaaaagcagaatcccgggctgcaccccagatcccctgaatcagaatgtgaattttaaccagatccccagaggtacttacgcatgttaacattgagtagcactgactattcaatactacttctgttgtttttctttttttcttttgtggctgcctgtgcctctttctagttcagatttagggcacactacatacttgtggtatcaataaacagtggacttttacaaccagctataaatactatctagagaaaggagcttcgcagcttattcccagagccccatgtgaaataagagattgaagccgggtggggcgatggagctcaattgataggggttcacacctgcagagaaaatgcaaggtcctgaggtctcagtgcatctaccaagaaggtcaggtgccaaaggtcagagcagtctcaggctatgcaggaggtcaccagggctacagaacacgggacagcggatgagggccagccagaggtgggagcactcatggcagggtggtgcctgttggctctaataagcaatgaggtggcaggcacagaggcaggatttcagtcctcagagaacagagggaagaaaaggacaaggaggaactggagtctacaataagtttcccaggcagggagttgagctggcaaagtaagtcacaggctgcctgggagaagtattgatgtgagggggccaggcatggtggctcatgcctgtaatcccagcactttgggaggctgaggcgggtggatcacctgaggttgggagttcgagaccagcctgaccaacatggagaaaccccatctctactaaaaacacaaaattagccaggtgtggtggtgcacacctgtaatcccagctactcaggaggctgaggcaggagaatcacttgaacccaggaggcggaggttgcagtgagccgagattgcgccattggactcaagcctgggcaacaagagtgaaactccatctcaaaaaaagaaaaaaaaaggaaagaaatattgctgtgaggggactagcacaatgatgccttgggccaaggctttggttgggtgagctgggacccctaaacataaaccctggccccagccagggggaacctgagcctggagcagtcctgggaagccagaggtgggctccaggtgtgggactgggtacaggtggggacaaggagccattcacgggctgcagagagagtctgagaggctcgtgaagcaactaacctttcctggcatgagggtggcaggaggtgtggccagattccagagggctttcccatcagggattaggacactgccctcgccaggccctggctcacctgtgcacagcattttatcggaagcacggaccttgccccaacacattcctgagataacactcccccgcccgtctcagaagacactcagtccgttggtgtgagggaggctgctgacaccccccagattcatttccagtttgtttgacgttggcatgtatgtctgtgtaacatgactgaagaacgagtcattagtgagctgtccaaagtccctttgggaacattccaggaaaataaaccaatattccatcaaagccacaaataactttttttttttttttccattccttcaaagcaggctttctcagagtgtggtccacagacttcctgctttagactccccagaggagcttgtaaaatgcagattcctgggccgccaccctaagcctactgaatcagaatcccagtggggcttctgggaactgcatttttatatgctacccagatgattctaatacaccttaatctcgaaaacctctcactctctttgcccctttgcttgatcgttcctttgtgtcaacaccgtgtgcccgctgcgctctgatactacctccctgtgctgccccacctggtgaacttcagctgaagggccacctctccctgggagccttccttgccatctttgtcccatcttgtgtaggggcccactgtgttttctcctaatatgaatctaccacaaagtagtagtttctttctgcctgactgctcccctgaatggggaagcatcctgcccagtctctccaggcccagcagaaagttttgcctataattggtactaagaaaggaatcagtgcaagtgaagggtgctgagcggcaacggaagggctacagagtaggggtgacgaatggtcgcttcccgttaagaagctgtcaccttctgactcctctcctggtgagtctgaactcctaggtcaagtctggggccagagggcgagcatcagacccaagaagaggccaaggctctggctggcaggaggcacagcccacctgtttgggactgcggtgtccctggtgtaagctcagatccctgtctgtatttcagggagactccatagcttgacattcttcctgctacagaaaaacagatgaaagaacagttttccagtcccagggctgaccccaaacccaggacagctagaatgctcaggcctcccccctcttttcaggcaggagaagctgaagaatagaactattggaccatgaaactcccaagagtccttccccctcagcgtttctcagaatttgcgaccacgattttctctgtgaggctcgcaattgctatttgccaaactggtaactgttgacccaacagaaatcaaacaaagataccagcagccccagacaggctgtcttcatcgcatcagtgaagggagagcaggtgcctgggatcgaaaggacattgtccatcacctggctctgaaaaacaaaatgcatttccttattcttaacaagctgagcaccagaaacctgctttaccagtccagggtgcctcctggaagctggctcgcttatctgcatgtatgtgagggctgggggtgtttttgtggggctggctccgggcagggtggctttggaaaggagaggcctgacctagcgagactctagggtcagcccagactgctgtgacctcaggggactcagcccaggaggtccaggtgagggcagcctgccctctacgtctgcagtaggtgaagaaccccttggttacttgaagagaaagaaaggactggctgggttgtaggcagcagggccgagcagctgagggctaagtgcacagcaggccctagcaaatgcttctggaattgaattggtccaaggggagactccagctttagttcaacatgggctgtatccgaatccttctgaaatttgctgggattccatgagggagtcaggtattacaaggttttggcaattactgagtttcttttgtgcttttttctttatgagaatgttgtttctgaacccattccctttctcttcccttctcaccaaattacacttgatttgcctccaggaagaaaatagtacattgttatcatttggtcaagatttcatattcaaaaaagagtaaagtgacaatatagttcaaaaatcttgttagatgctgtggaaacctcacccggcagtagtgatagctgccacgtactgagggattttatagacatttacattttcacttgtcctcaccttccagatgaggcagctgtggcccagagaggttagggaacttaccgaggtcacacagcaagttggcaagagggttggggtttcagtctgggctctctgacttcgcagccaagtgcctgccagtgctgcattgtctcaaggtatttggcgtgttgatgtgacatcactcaccctccttgagttctctgacatttctcagagcgtttgtctgtgtgtcctgatttgagaattagttaagctctcgcactctccggggtgcagtgcctggaattcaggcactggaggaagtcctgcctccttcctggagctcgcagccagatcccacagatcctgctctgttggacagtgaggatgggaggtgtggcccaggggttggcaggatggtagtggggtgcagagtagacagggctgcgatgactctccagacccatgcttcttgtcagttcccaggcactgaacccaggacttcccccaccaaggcatcctgtcctatttcccccattgcctcctgccctcttaggatatacagctattgagaaatgtgaacacagaggccttttcagagagaaagaagtcctgctcctcagtattcccaggatcctagcttactggagagattaaaaggctggattatgtgggaaggagaggcaagtggactgggacagtttagatctaattgcctaatgactcctagaatatgtccttccagatgtcctcattttcattcagagtcactgcctgcctttgtgagaggtcatacagtgttgaatgatgcgttatcagtgtaatgcaatagcccagtgacgtcatgaaaatcctggctttctgagaacacgttcacagataggaatgcagtgctggagagacccgagggtcttggtatactgcacaattcagcttctattgtgtaactcctgggtttattggccctttgttgctgctctctttgataaagtatgattttttttttttaactttctgattagaaatcagtagtttaagcctgctaatcacctctttggcttggcctgcagatcatggaaagtccacaacacttaatctgtttgcaaatgttctcttggttccagaagttcagaaatgttaccagctcccaattttttataagattgtataatttttaccttaattacaataataaaggttctgagatctattacacagataccttttcttagtttactttttaaaaatttatttttaattgtggcaaaatatatgtaatataaaatttaccattttaaccatttccgatgtacagctctgtggtgttaactacattcatattgtgcaaccatcaccaccatccatctttagaacgctcttcatcttgcaaaactgaaactctgaaaacttctactttctgtctctatgaatttgacttctctgactgcctcatataagtgaaatcttagagtatttgtcattttttgtgactggctattttttttttttttttgagatggagtttcgctcttgttgcccaggctggagttcaatggcgtggtctcagctcactgcagcctccacctcctgggttcaa

SEQ ID NO: 45440 - DNA, 1581 bp, Homo sapiens
ttcaggccaaaggaagatgatatcaggtggaaacttagatctacgtgagaaattaaaagagcaccagaaatagaaaaaactaaaaatttcttcatttctttaaaagatagttgactctttagagcaaacataataatggtgtattgtggatgattttttttttaaaagcagaacagaaaacaagaaacaggtaagacaaatagacaacaaatggcaaattggtagacttaaatccagctatatcaataattcagtaaaagtaaatggactaaacactttaattaaaaagtagaaaaaaagaacaagactcaagtatatagcctgcctgtaacaggttcactttaaatataaatacataggttacaagtaaaaggataggaaggatataccataccaatactaatcaaaagaatattggaatggctgtcagcatggcatgcagagagcttttacaataatagggtgattcatcaaaaagacatgaccatcctaaatgtgtagacacctagtagctgagttcaaatacctgaataaatgactggatccagtagagcaagctttccagctctttgcaggggagaggacagatggagccatttcctcattccagtcctgatctcctttgactcgctggcaagggcagaagtgggcagaagcaagctaacctccatggcctcattctgtgcatagcattgagaccacgtgtgtcctccttgtcctctgagatggcaggccctggggccttctgataggagcccctaccaacagctcccacagggtaccccaccctagcttttcttgccatgaagagagctttctggaacctgccaagctcacgtgtgatgccagtcaggacttggggccatgctcgctgagattggcaggggctggggtcctggagtggtggatggcatcattgtcagtctctgggaactctgggtgtcctaggacacaggagaaggtggcagtgtccgccctcaggctggttcctggcattcagatactgacaggagctgagtcagcaccaggtggggcagtggggaggggaatttttaagcaataatgaaaagttgcctggaagaggaggagaagcttcctggataggctgtatctggtggcaaagaattccatcatttacaggcagtcccatttgcactgacattccatgtgagaaatgatttcttttcctttttaaaaaattgtggtaaaatatacataacataaaattaatcatcttaaccattttcaacggtagagtttagtgcattaattatattgttattatgccaccatcaccaccatccatctccagaactcttttcatcttcctacacccactaaacaattccccattccaccctgcccccagcccctggaaactactattctgtctctggctctatgagtttgactactctagatacctcatataaatgaaatcccatagtatttgtcctttgtgacaggtggtttcacttagcattatgtgaaataatacataagactcatccatgttgtagactgtgtcaaaatttccttcctttttaagggtaaatcatattcccttgtatgttgatatca

SEQ ID NO: 45441 - DNA, 1009 bp, Homo sapiens
tctcaaactcctgacctcgtgatctgcccgcctcggcctcccaaagtgctgagattacaggcatgagccaccgcgcctggcctgtggggagttttttcacttccctttccccaaaagtacttgcatgacctcggtgtctggtgcccctgcttgcaaaagcatctgttattccctcagtcagcacagctggcatccacctgtctgggctccacccctcatccacctgcagtaaagcagaaaagcctcattgaaagaatcagctttttctggcacgaacaggtggatgtcgttgctctttctgtcctgataagttggtcttgccccatggctccccctctgtagggtacttggtttcttccttccctcttggtgatatctcagtcaggaagaaagtcctatcggagagcttccaggagaccacttgattgcactgctgactgataacacaatttaccctgagcagggacctgtagttttgtatgattcttaggatttaacatacactgccctcaaggcccaagggacaaacagaaagcctggttatgctgagcccaagtgggatatcatctagaaggctttgaggttttcttttccaacgtgagcttattttcttattttatatatttaaaagggttctctttttctcgtgaggcagaacttcaaaggaagcattccagaccacacttccttttggtaaatcttaaccagtgtaaatgtttacttttgtgttgtaaatcctaggaggtgaggggagaaggaatgtccgaagcaagtgtcctgccagcaaaagttgaaacttaatctgctgttttaggcgtttgggaggaaggggagtgtttataattaacaagccatgctaatgaacctggagttagaacctttttgccaggttctgcaaatttctggacccactggaatgagagagagttaggaaagcctgctttgcttcttctgctgccagggaggtcagtgcatgaaaatggaaggaatgagcaaaacaataattcaa

SEQ ID NO: 45442 - DNA, 726 bp, Homo sapiens
ctgcatgggtgccatctttctgggccctccaaatgcggacagctcacctttgctgctaaaaacacctgcttcacctcccagctccaggtcattcctctgagatcttatggaaaagctctcagctaaattggacattaaatactagaggaatggattggttcacatactgggaaagtccagaggtcactgttcaatgcagggctccagttgtatcatcaggtcttagtttctctcctcctgactctgcctgctgctgtatcggcttcgttctcagtttgcacatgatgatcttctaggattgaagaaaaatgcaaaaagaggtctctcttattcatggctcagatggaagtcctgaggttgacttttactagtccatagtgggttgtgcaggaatgatttaaaatcaactgctcaccaaagcacgtggatggagaatctttagagaggtgggttcctcaggaaatttgcaatgctgtcaccaaaagaggcagaaatgggtgcttggtggcagaaatccaacaactgttctccatcccttcctctgctggtccccaggtcacagtccaggaggctatttggcgtgggtcacgagggtgcttggactgaagttgagcatgcctcttctggactggctctcccttggctccctactcttaaacattgttctgtttttctccaccccaacataaagggcatctggccaagggcaggacaggaggaaaagga

SEQ ID NO: 45443 - DNA, 522 bp, Homo sapiens
catgccagcctctgtccttctcatctcaaccccaaagagttagagttgctgtccttccttcacctgacgcccagggagcctttgcacctggaccatgatctagagggctgttcctccatcactcgctgtgtgccgtcaggccaatcaagcgcttcttgaagccttagtgtcctccactgtgtagtgtgtggttgggaaggttaaatgcaaggtcttatttatttggcccgatcactgccaagtcagggcccaagctacttcctgcttcctctacagaacctcctgggagtagtccagcatgcacggatttcacctttctgggaatcctgtgtcgcctgttgtgaaagtttcatttggaacgatgtcttcattcctccatatacatgatcatggatgaatgaatagtttgtgtgtttacttccagctgggtttaagttcatacttggtgctggacatacaatagctctgaaaagatatttggaaataagcttaggctcttccaaaaatgagtgctttttcttt

SEQ ID NO: 45444 - DNA, 1241 bp, Homo sapiens
actccatctcaaaagataaataaataaataaatgaaaaacgaatcactcacatttatcaagcactcactgtgtactcatgtgctgtttcatgcattatctcatgtaagcttcaaggagcactgtggggcaggtctgaatggtacctgcctgaaagggctgttgtgaaggccagctgagtaaatatataaatacattaactgcttggaacagttgctggtgcatagtgagtgctcagtatatgtgttcttatttttcctgttttgcaaatgtgacaactgagccacatagagtttacatatcttgtccaaggtcacacagctagaaaatgacagagcctggattcaaagccagtgagtctggctccagagccctctgctcttaaccaagaggcaggagtgacacattagaaagcaatggggacaaagtgcatccagacagtgcctgtccccaaaggtgtgctaagtccgtttttaaaatatagcactgtagtagatcaacaaacatatcttcaggctgaatttggccctcaggttgtccgttggctttacctactctaatccatgatttggttctcagaactgaaatcttaaacccaacaggcagcacacagaggggattagcagcctggattcaccccatgtcagtgagtgggaacagataagcatagagactcaagatggaggtgaaggaaggggatggacccaaagggcacaggtgtgtgatctcaccaacccagcagggcagagggaagacagaatccaagatttggcagtggggaggtgagccactggtttgtgggggcctagtctgaaggtagggagggtttggggtggaggaaccgtctggaatctcccctccagccctccctcctcttcttttttctataaaagaattttaggatgggaataactaggccaagaaaacttctgggtaagccagcccaaacagagtagggaaacaaggagatctaagggtggaaaagccagaattttgagacaggtgttcggagggtagagaacaagaggaagggaagtgtttacgagaagaagaacttgggaattccaggtataaatgcctcctccttcagagagcagattttgagaaccaaatccaattcagctactgtctcctaccttctcccatttaactttctaaaaagagagaggaagccaggtgtggtggctcacacctgtaatcccagaattttgggaggccgaggcaggaggatcacttgaggtca

SEQ ID NO: 45445 - DNA, 1588 bp, Homo sapiens
gtagctggtgttaacgaaggctctgctgtgtgtcatgtgctcagctctcctaacaaacttgagagatggttatttttatcatgcccagatttgttagacaatgagtaaaagagtctgaaccaaactgaattaaaggaagaaggacttcaaacgttgcctttcttcctgttcattctggcctccccggagctaaaggtgaagggactgcttagaaatggtgttctgcagcagccccaggtgaaggagcattatcaggaattgtgcaaccttagctatgggaactatgcgtgtgaaacagcccagggcgggaagaaccagcctggccattgtgcctgggctggggaggagaggttcggctgaaagtttggacagttcttggcttggagtctggagggccctttagaaagtgatcccgcccagccagccctcagagagagcaggccagcatcctgctggacggtaataaagaggttactgtgggaagctgggacttgcttgggaaacactaggaacatgaaagatagggtatgcattcttcagtcccgagagaatcaccacccagtattaaacttggcagaaggctttcctctcctcctctgagctgcctccttagaaaaggcacattgtcagaatgccgaatgcccaccgtggtctcatgtcctcacagcccgtaggaaagtaactaccagttacccactggtggttgcccctgagaggagggtaagggaggcttccagcccccggggtggctctccccgacaggtgtgcctgtgtgctgtttgtagggtgctcctggcagaacctacctgtctccacagcgacacatctggccgtttttccaggagggcctgttgagaaacattcaggaatgtttgtgctcctttagagatttgtaattaagaagaggcagaactcgttcttgtctggcaccctcccttcttgcccctccagcatctgggtcatttgatttcacaattggggttttcggcagcccgagttgtggaggctggaagcagggaccgactgaaccaggctggatggtggtgaattgcttcacccgagggtgggggctgggagttccaggcaggcccccaagtcctggccacatctgaaagtggacatttcttcccaggttgcatccttagcacttgcccaaggtgaaacatttcaggccagtggagcacccacagttcctgggggacggggggtggctggtttaaatggacaattcctctccttaactgccaggaagagtgagtgtgtgcatgtatgtatgtgtgagtgtgtctgtttaaatctttgtgcagccaaaaacacatctcttcatcctgaatgacacatctctacacactgaataattcatctccctcttggcatttgttccggagagaatcttgctgtccagatttcttgtaagttgcatagccttccataggcacttccttgtttcccatggaagagctctgggagtcaggatatcagtcagtcagccctctggcatttcccctgtgatcgcatcaaaggggaatgagaatatcaaacccaaagtgtttctctctcctttgccctctccttctagctttgggtc

SEQ ID NO: 45446 - DNA, 1879 bp, Homo sapiens
cactctatcacattgccttcctagcaattaaaactacctgagattattgccttttttggtctattttctctctccattctaaaatgtgtctgccgtgagaggggagatcgtgtctgttttgttttctttgtgcccccagagcctagaatactgtctggcattttaaagtacacaataaatgtttgttgaataaatgaatggatttgttagttttgtgcccatttcacaaaggggcaaagtgaggcctttgagagccagaagctctaggtcagtgactgtcctagtctatccaagcacagagcagctctggttagtgtctgctcaattcctctcccctcgcccaaacgtccctgagttgcggcctcgctcctgaccgaaatccccgcgggttctcctcgcagtgtctactggatcccgccaggaggcagcagaggcgccagcacccagtccgacgggacagcggaccggagggggtttccgcttccgggagaggctgaccgtttccgcttccgtccacttggcgagtgagacgctgatgggaggatggacgtactggtgtctgagtgctccgcgcggctgctgcagcaggtttggacgcaggagaccggcgggaaggcctgaaagagatggagcaggctctgactcctgcccaagcggcttcgggggcgggacagctaggcgaggaccatcctggtcctctcagagtggagcggcacggtccctgtgggaacaggaagggttgagagaggaagcacccatcatttcaaagcccgtgtgactgtgattttcagcggaatggagggtccccaccctctcccaggcctcccccaaaccagcgtcttcggtgggctggagcctggcatgttcagaacagttctctccctacaatccacctcctcttctgcatacacacgcgatttaggggatgcggggagatagacaaggggggaatacattcagagctctgggtcttggtttgcagctcagccgcagttcttcccgggttactgagcgagaggattcctaataagcccatggggtgattcattatcagaccagcggagcttgctctgtgccctcagcattcgtcgggaaggagcagccacaccatataaaagtgaaagcggccgggcgcggtggctcatgcctgtaatcccagcactttgggaggccgaggtgggcggatcacgatgtcaggagatcgagaccatcctggctaacacagtgaaactccgtctctactgaaaatacaaaaaaacttaaccggctgtgttggggggggtccctgtattcctagctactcgggaggctgaggcaggagaatggcgtgaacccgggaggcggagcttgcagtgagcagagagcacaccactgcaccacagcctgggcgacagagtgagactccgtccccctacaaaaaaaaaaagtgaaagcggaacagttccattaccttttatgcccaggtggggagggatggtaggaagatagttcacagtactctgtcctgttacggctgtatacttaatcagcagtcacaaagtacaagttagtcaagtaaattggcaagctctttacatttctgagccatttatttatcggtatgtatttatctttgcctcacttggttgtgataatcatgaaggtaatttctgaaaagtgtttttagctcagctcctggaacataatgtatgctcatttttggcaatttggttttggctgtagctatctcccagtaagtattctgaaatttcaggtgaggaactccccctgagttttgcagtttaagttggaagctttatttctttctgaattgacatgtctttagttttagatgttaaactacaaagcctggtctggtctagtctaggacctaagacac

SEQ ID NO: 45447 - DNA, 2770 bp, Homo sapiens
ccttcacatcactattttatagatttcttgaacaactatgacaggatctattcagttataaataattttttaaaaattttaattaacagatgaaactaccagataaagtacttagacaatgctctatgggtgcaagagaaagaacactgtattatgagtcagtccccttagagttatgaaccacatagcacatggttggtacatgcttggaaaagttactctggggctaagttcaatttcctcacctgtgaagttaagaccaaattaccttacagttatataggaatttgtagttttcacagggttttggcttgttgcctctcaggtgagttttacaggaaccccgataggcgggcagggaaggtgtcagcgccctgttttatagttgtggatttcttaacagttaaagagatcacatgaaacactgtaaaaacagcaaaagtatcaatacgactctaagatgagcatgaatccccacgttcctagtccttctgggaggctatacttaaaaagagtgacaatcacaatggctgggtgattaaataagtcaattactggaataaaaggtttttaaaagactaaacataaaaggaagcaaatgaaagtcgacctttctaaaagcatagtcagaatttaagtacatgcatagaaaaatatctacgggtattcaccataatattaatagcggttcgctccgggtgcggggaatacgggtgactttatctttcttgtttatctgcgttttctaaaacaaacatgaactagttgatattctaaacaaaaacaagccaaagcaattacacactggcagactgcatgcacgtacgtttgaaagctccaactgtaacaacagtgacaactcccaggaacccaccggcatttcaaggacacaagcaggaagcccggaaatccctaaaaacaggtgctaaaagccgccagcgcaacctgacagccgcgaccgcctcttttcaacctgaattcagggggagctgggagaggagactagtctggtttgacaaaaatcagaatcagaaattccctctggcacctcccagatctcgaagagaaagtgggaggaaaggctagggggcggcaggcattcaccatgcatgaatagggggatggggaggacggaagcctcgaactcgtggctcaaatggtccctccgcccccataccggacgaagcgccggcgaggagcgacgggcttggaagccgaccgcccagccaaggggctttcagacggggcccaagggtgccctcccaacctggcgggccccagcccccgtcttacagggtttcttggcatctttgatcttcatggcgtcggcccgaggggcgatggacggcctccgatccggggcactgagagcagaggcggcgactccggaggtggctgggccgcgcggcgaggcccggccggttcctcccctcaggccgggcggggccggcctagggcggggcggcggcgcctgaggagatgcccggcccagggggcggccccccacccccgcgaggggtggccgggaccgagcaagctggggaaggccgccggcctcgccgctccggggcccccccgcagccgctccaaacaaaaggccccggtccccggagccgccgccaccgccgccgccgccgcactgagaaatagcccgcccaggccgaacgcccacgtgacgcgagccccccctcgctccgcttccgcccggctgctggggattgtagttctccggttcgtgaggccccgctctctggctgtagttgtgcaggtggactacaaagcccgagatgcatcgcggcccctcctccgaggcccctcagcttccgcagatcgcctcagagtggtcccagcgagaagagggctgggtcttagtcacgccagcgaggaggcgaccaatggtgactgagatgggcgtgctggggaagtcgggctcagacctcagcaggtcgcggagagaagggggaatgaactcttcgagaggactgtcatggctgttcggccattctcagatttccccttgagacaggaaagctggtcgtcaggccatggaaagcgctacaatcagggctctagagctgtgcttaagatagacccttgagtacattggcggattaaaattattcacaaaggaatccttttgcttaatagagacaccttgaatgttagggtcggaatgatgacaatagcaggaatagaggtaacatctatggaacgcgttatgttcatgggactctgctaagcactttgtgtgatttacttaaattcaggggccttgtggaccacgtgcaattattcattttattgtcactcattttgaagatggggcacggtctgaggagttaaattgcttgctgagcattctttttgccaccgatccatattcccctggggccctccagcccagctctctccttctaaagggaaaactgactcccagagaagaaaatttagttgctccagttctcacagtaaagccaggacaccctttccccttgcctcctagagtcttagtcctccagctggaatgggagaagatggcattgggtatcttctcttggccttcacttttgttgcccagttagatggccaggaattctgtagtttttacaatagatggatagagggttggcagtagaggattgggcattccagtcaaagaaacccgcttaccaaagagccttactgccccttcttgcagatgataagccaagggatgtgaagaaggacaggagaggacacaagctaccatttattgagtacataccaaggg

SEQ ID NO: 45448 - DNA, 852 bp, Homo sapiens
ttggactttgttcaaggaaaagggacccaccaaagatttaaaagcaggggaatgtcaggattagaactgtattttggaaagtttactctggctgtggtaaagataacagcttaggcgggacaggaggcaaagaaaccagctaagggaaggcattctggtggtggaatgagagaataaatgtaagaatgagtgaattcatagcatttactagataacaagcttccttgtggcaggagcctcaccaccttttgctatggatgttcttcagcacaaactttcagtttttgtgcaagtcaatttttaattaacatttaactggcaaaaatgactagctaatataaaatcaagctagattctctgtccattctagagaagttgagcctttgtgagcaaggctgatctcgctcatgatacagaagtctgtctcttttaccttgtttacttttttcctgtttaccttcacagccactgatcctcaaggttagcagatgagtaagtttccaatagcagctgaactggagtgatttctatctggaaccaaacaaatagctagactctgtttggaatttctgcttccagagttatccagccacagagcctgttgcacaaggcaaactggcacttgcccagcatgcttaatagaattcttagtactcttacctagaagtcctattcattatttgaggccatgccagtcaacaccagctcaaccaatatcaatgaccaagtaacaatgaagacagctatttgttgagcacttactatgtagcaggcactgagctaagggatttacatgcattttctgattttttttcttgtcacacagaatgtttttattcctgctaatagatt

SEQ ID NO: 45449 - DNA, 939 bp, Homo sapiens
gtggtcaccaggtgattttattctcctcacatatgattccttttccctaggtttttgcctcctaaacaagctgacatgaggaggaaactagataccaatgccaattttgtagtgctagcattgcagaaaggaaaatctgtatagcctcctccgtccttccatctctgaggccaagcccagtcctgccctcttaattacctccagtgatttcagcagactgggactgttgatccaccctggcataaaaaaacaacaggcttggccagatctgatagggcagagaaacccgagcctttcccctgtgcctttcacatgggccccagctgggggttgagggtcatggctttggtggctcttagctgcaacacactagttattgcctgagggagagggggaaggggttctgtttccagaggctgctccagaatttcacaacaggggggccatgggcatagcaatctgattttggtagaaactgagttggcttggtaagcacataattgacccatagattgtgttatacgactataaaaatatcttagttttcttaaaaaaaaaaggcctttatttacactttatataaaattgagaaaaaaatgtttatgttaaagattgtggcggggcgcggtggctcacgcctgtaatcccagcactttgggaggccgaggcaggtggatcacctgaggtcaggagttcaagaccagcctggccaacgtggggaaaccccatctcttctgaaaatataaaactgagccaggggtggtggagcatgcctgtaatctcagatacttgggaggcttaggcaggagaatcatttgaacctgggaggcagaggttgcagtgagctgagatcatgccactgcactccagcctgggtgacagagcgagactctgtctcaaaaaaataaataaataaataaagattattatggtggtaat

SEQ ID NO: 45450 - DNA, 1034 bp, Homo sapiens
tatggttaataaactagacacctacagtggcttcttagtcatattgagatattactatctcagtggtgagaagaaaaaaaatcacttagaaaaagaaaaagcttaggagtgtcatctctggttattaggaaggattgtttttctattttacgttttctaaaaattctgtggtttttgtttctgatgtcggtaatcaggaagcaaaaagttaaagacaattgggataaaggatcttctgcgttgtgagcaattcgagatctacagctgtatggagaataaaaacttatagaaccgaatgatgcagactctggggcccaagaaccttagaagcttttcttgtctgttaagataggctaaagccatgaacaagtgtgccttagaaaagaaattttcactaggacattcacagcattcctgatgactgacatcgcttcaagttcagtgaattattctaacaggcatagcataagtacaaagtgacccagttgtgaatattcagggctgggacgccacgagaggaaattgacgttggggacaatctgtgggagcaacatattctcctatagatgaaatgccagggagaatggtgggctgcttctcaccagctagttttctgtatgtccccagaatgtctaatgttttctcacagtagagctcttaaagaaaagctctgttaccttttattgaaaattctggactcaaatgctataattaaaagaaaaaaattaatatgccctatactgacctttgaaatacttggatatagaagggaatagggcaagatctcagctgtcataaagttcatattctaggtatacatcatttttgttaagtcactagagattgcattacacgaactagataaatattccctttattcagtcaataagtgtgttatgacacttttttgcagtggtgtgatcatagctcaccacagccttgaacttctgggctcaagtgatcctctagcctcagcctcctgagttgttaggattacaggtgtgaacgaccgcacttggccctcttttttcttt

SEQ ID NO: 45451 - DNA, 906 bp, Homo sapiens
aaactttgatacatttatacgaccagatactacatggcagtggctctaactgctgatgattttgcccccccactccacctcccaggagacatttggcagtatctggaggtattttttcattatcacaacttacatgggagggagaggattgctactggcattcagttggcagaggctggaaatgtggctgaataccctgcaatacacagcatagtcacctacagcaaagaattatctagccccaaatgtcaacagtgctgaggttgagaaactgctatacattaatgggaatcaatgaactattgccacataggtggatctcacacacagaatgttgagcaacagaagcctgatacaaaagagtaaagacagtgtgcttctatttatgtaaaattcaaaatcagaacaaaactaactcacggagttagaagtcagaatagggttttcttcggggggaaatggtgactggaaaggggcaaggaggactttttaggtgatggtaatgttctctttcttgacatgggggttagttacacagatgtgttcacattgcgaaatcaagctgtactttatgatgggttcattctctctctctctctctctgtctctctctctttccctgtctccctctctccctctcttcctctctccctctctccctctccctctctgcctatcttcccatcttcccatctccccctctccccccgctccttccatatgtataatacttgaataaaagtttttccaaaatcccattgtttgattttaagaggtaatctgctctttctctctggaagtgtttacattttctttttgcttttgatattttgaaatattaatataatgtgactaagagtgagtttattcttacctgcttatccctctataagatcttttaatcta

SEQ ID NO: 45452 - DNA, 421 bp, Homo sapiens
taatgttcccacacatcctccttttattggtgatcttcatcccaataccaaggtagtgtctctccctccaaacattacctctttgattgaaccaatgaatcaaggtgttatatcagcttttaaggactgctacctgaggaagacctttgtccaggctgttgctacacctgagggagagactgagatgacagtgatgcaattctggaaggattacaacacaggtatgattgcatcaagaaccttggttgggcttggggtgatgtcaccaagaagtatgtgaatggcatctggaagaagacacttagcatttctccatgacttcagaggatttgccaaggatgaggaggttgcaaaaatcaacaagtttgtggttgagatggcaaacagctttgacctgggtgtggatgagaatgacactgag

SEQ ID NO: 45453 - DNA, 1209 bp, Homo sapiens
aaacccaaatatatcttgattttttttttttcagacagggtctcactctgttgcccaggctagagtatagtggtgagatcacagctcactgcaacctcgacctccccaggcttaggtgatcctcccacctcagcctccccagtagctgggaccacaggcatgcaccaccatgcctggctaatttttgtatttttttgtggagatgaggttttgccatattgcccaggctggtttccaactcctgggctcaagcaatccacctgccttggcctcctaaagtgttgagattacaggtgttgagcctctgtgcctggcctggattttttttaaggaggtaaaattcacatagtaattcaccatttttacaagtataaagtgtgtaactcagtaacttccaggacattcatgatgtacaactatcactactagttccagaacagtttcatcatccccaaaaataaatgccagacccattagtcacccccatttctacttcctcctagtccctggcaaccaccagtgtgctttgtgtctcaatggatttgcctactgtggacatatcatataaatggatatgtggctttttgtgtttggtttccttcacttagcatgttttcaaggtttgttcattgcctggaattattcagatattcatttttatataaacccctgtgtctttttgactttccaagtgcacttcgtcccagcagggctttcctatccggaccccagagctttggtgaaatgtgtgcacacagagcaggcaggggcacattgacaaacttctgcttgacagtttctgtttttgcaccctgttaacaatgctcttgaggctccactatgtaggattatctgtttttatacctgaaagtctccttacctcaactgctatcaaaagatttacatctttctaaggtgccaattaaatccaacaaggtagctgagtgtggtggtgcacgcctgtagtcctagctatgcaggaggctgaggtgggaggatcacttgagcctgggaggtcgaggctgctgtgagctgtgattgcaccgctgcattccagcctgggagacagagcaagatcctgacacacacacacacacacacacacacacacacacacacacacacattccaacaaggtaatgtgtaggaggaagtacccgagcttttcagtcaaatgtatatttgaattccacttcagagactcataca

SEQ ID NO: 45454 - DNA, 630 bp, Homo sapiens
agacagagcctggtgtctctccagggccacctacctgctcaaactcagggctccctgacagcagcttctggacagcaattctctgactttccatttcataactcagcacagtgctgcgacactcctaccacccacaccagccttctaccaaatcaccagccctgacagctaacgtcagcagagggcaaaggctgggctctgtttgggaaggcccccagctcagggcagggctcagctgcttctggaagcctggctttcaccttctgtccttgacatgtctgcgtaaaggcttaatctgccaagcacttcctccagtgttatttcaaccctcagtgactgccctaagaggtacatcctgctattgctcacattacatgggaagggggagggggaaaaactgaggcacaaagaggctgaatcacttgttcacatctggatttatgtgatagcaaatgcttcacaggctgccctggccctgcctccttggctctctgtcctctccacttggccaggacctgtggctccagggacacagatgttaggcggcccaggctctagggagaccaccagggtgagctctttcttctggtgtccactgtgcccaactgtcctaacctgcctggtctttat

SEQ ID NO: 45455 - DNA, 706 bp, Homo sapiens
ccagttcacgtacagccttgcaggacaagaccaggagtgtggacactgctccaggtgcagtgacaaaacaaatggctgctgagatgagcagacagagatgctaccaacgaacgggtgctggtgtccctccccacacctccctcaccctcacatgagattaccacctgctcaccggggcggagacagccctcattaatctcaggaagcaggagggcagacacgggcggtgcggcaacacagactaactagagaacacaaaggctgcctgcccagctttgttttcaaagcgtcaattccaaattctgctagctggcagagacaggggttattgattttcccttctggaatgcatgtcctacacagtcctcgcaaatagaaactgaaaaacagaggaaaacataactgctgagaaagacagggcaaggggacatttaaaaaaaaacaatccctactggtttttgtctttttcttattaggcttggctggattgtggcctgtcatctctcttgttttcccaattcatttcctttggttctatctctacgtctttccgtgatttctttttctttccctcctctctccttttcgctgtgcctttgcccagtacctagcacagtttctgcatacagtaggcatttcatactggagtggtgagtgttggtctctctacaggacagtctctctaagggtctctttcttcatccag

SEQ ID NO: 45456 - DNA, 454 bp, Homo sapiens
aatgaacaagaaacgtagaaaatcagctcagagatctggattttcaccccaatgatgccagaaaccaggatgggacctgaacaagttattcacccatctgaagtttcatttccgttttctgcaaagtgaaggggccaggttgaatgtcccctgaggtcccttttatctctaacagttctgtgaataaatatgtagttggcacattatagtcaagaggttaagctgagtaaacaagaaagtccaggttcagccatcaaagttccacggccgcctatcctgctattcatgtgggttcaggacagggccctcttctcaggccaagctggcagattcctagttccattcccctgaagatgtgagagaggatgggattgtctaatgaactcactacagtccaactgaggcaagatttctacatcagggtccatcaggatgtccatcttgcacccttggc

SEQ ID NO: 45457 - DNA, 1866 bp, Homo sapiens
atggggtggttgccgattggtgtcaaggaggattttttaaaaaatgaaatcatgaaatgattttatggcaatcactgcagcatgtttatgaactgatagggaagatccaatagagaagaaaaaactgaagatgcaaaaaagagcagttagagccaagttctcaaataggcaagaaaagatgggctcgaaagaacgacatgattcatgtaacagttactaggactcatcagtgctcattaaatgttatctattattatttctgatcgcttcaatttttgaataggcatcagggttacaaaatattattattaaaaacacatgcaaacagcttggactctaagactgcattcaattctagttctaccacttggacaaggcactttttttcttcgggctttttctctgtagaaaacgaggagtaatatctgcctcataaggctgcgggcttaactgagataatctgtaaactttaacacatggtgggaacttaaatattaacgccagtattaccactggtagggtgcatgagatcgcacgatggtgccaaaggtgtctctccaccgcccagcccagcgacactgttcccctagaaggcattgtcgtaaaaacaaaaaaaaaaaaaaaacgaacaaacaaaacaccaaaacacggaaactaaaagcaaatacttaaaagacatgcaggaaaccagcccaaggaaaaatttatgtggagccacgtctgcgcctgcgcctgcgccaagcccacggcgcgccacttgcacatgcgcagtagctgtaggagggggtgggcgctccattgggcgtttctcttggtttttcctttccgcgcggcttgggcggacgtctcgtgagacgtgggacttctcgcgggaactgcattcaaatatcccaggcgcttactcgagagctagctgagcgaatgggccggcgactgtggagttagcgtcctcaatgtggacgccctgagctcccattaggagccgctggctgcggcagcaggggactagcgtgagaggtaggggcaaggggcctggtgggaggtgggtgtggagagcggcagtggggagagtcgaacaggccctaaagaaagctaggggccggggtctcggccgaggcctttagctgaaacatctccttccccggaaccctggggtcttatacactgggttccgagccggtcttatcttccgctggaccacctcgccgccctcagggattctggacaaatatggaacgttgggtcggttgccgggtcctcaaaattataaccgccactggatctgcgctgtgcggtacggtagcctctagcccgaactaagaaatggtgcagatgggagatacatattgggtttcagagatagcgcataaggagtaatatctcattaataatttttataatgattacatgttgaaatgatgttttgagtgtatttgtttaaatatgtaaattaatttttcatctttgtttactttttaaatcatgatggctcctagaacatttaaaatcacgtacatgactcgcgttatatttctgctggacagcactgccccagccgtgtgtcagattctaccctaattgcttttcattcgttatctcatttaatcctttcagtaaccgattaggtgggtgttattgtgcttgtttttatagatgattaaaccagaaattaaataacttgtccaagttcatgcagccagtgagtagtggaggcggggtaagaactcaggcagtttgattcccagagtttcctgtgtcccaaatgctttgtgtgtgctatatttttgagaagcaggacaggaaaaatggttgcagcaccatggtttctaggtagattctagttcccatcacacttcgcgtcttaac

SEQ ID NO: 45458 - DNA, 984 bp, Homo sapiens
agtagagtctttgtgcaagtgacttaacctctctgtgcctcaactcctttgtctgtaaaatggggataataatagtatcattgttgggatattaaatgaaagagtaaacaatcaaaaaatgttaggttggaggctgggttatgttttgtttttcctgatacggagccagacattcataaggattcttgctttcttcaggaggcgggtgctgcagccaggcagctggaaacagggatgtggaaacagtcccagggccgagtggggacagccaatttcatcaagtgcccctgcccagcaggggaattgctgcttgagatttggaggctacctgctgaggcctgcctgccagtccagtgagtgggcccctctgggccaggcgcctattttcattatcaaggccacattcctgggattccttggtgactaggcgcttattacaagagaatcaaagtgccaaaggaaactactcatttgaggccgagacctggatttttcatttttataattggcccttgggtctgcatgtcctggggatactggtggaagggagctgttggacaaagtatctctatggggccccagtcacccctgggggagggcgggactggccccctgccagatctgctgcgcccatgcagaaggccctccagaggtcatgttgtccagcccctgccactgggcctgactcatcagcacctaggccagaaggacaggtgcttatctgagagctgacaaatctttgtagaaggagccaaagacttggaaatcccctctgcgtcctcccaaccagctatctatccagcccagcagttctcaactgagagtgaatttccctccaggggacatttggcaatgtctagagaaatttttggttgtcacaactgggtgtttagaaaagggaaggtgctacttgcatctagtgggtagaagccaaggatgctgttgctagggactgaatgcttgtgtccccccaaaattcctgtg

SEQ ID NO: 45459 - DNA, 1638 bp, Homo sapiens
caaatggaaatgctgaacttgaagaaaaaacggagaacatcagaaagcagcaactttgacccaattctgctccaataaattctcattgcagtggaatcatttgttgtaaaatataagttcatattaaacaaaatgcagacaaagaatgaggtaaagcttgaattttacaacttaacagcatgtagacatgggcggtttaattttaaccaaaatcaagttaaaaacattgttaagcaacaatggaatttgggccctgggagtcaggggtcaagggcaacagctggcatgtgggagtcaaaggttatggctgtgtgtgtctgtggttcctggctgttaggagacaagaaaatctgtggagatgcaggtgtcgggagccatgggcgatagttgtattttgagggtcaggggtcaagagagcctttggaagacttatgagtcagggtccacggctgacgggtgggtcgtggtagttgtgtcaaagggcagaggttggaggtcatgacccaccaacacacgccggttgaaacttgagcgcaagggacggttgagattcccggaggacacgcccctatcggccccgccccgtgcaccgcctccgtcgccccgccccgtccctcccagccccgccccgtccctcccagccccgcccctccagcgcttcgaatgcggacgcgaagcctggctgaggctgcgaaggacgagcggcgcagggaccccgcgggcgtctggggcttccgcggcgcccgcctctgctccctcccctcgggcgctgggtgccgaccggccggctggccggcgccgcctcctgggaagatggcgctgcacttccaggtcagtgtgctctgcgccgcgggcccgcgctccgccacgctgggaacccggcgggacgcgtctggagaccgagggccgaggacagcggcggaggccgcagggccgtgggccggtgtccccggagtcccagcccctgcctctgcccctagccggggaccgggacactggtctgggctgcacaccccaggcccgggccggagcccgagaaaggggcggccgagcctgggttggaggcggcgggtggagggggcgggggacaggcccagggctcgtcccggggaaggtgcggacgccggcagcacgctcgctgaccgcggctttagtgttgccagggcaggtgggagtcccagctgggccggctttggcgcgcctcgcgcggctgccgagcggtggagcagccttcccgccttcccgccgcgtcgccggcgcggctctatcgtcagcctccctccacacagttgagccccagccggagcgggggcttgggatccaccgaaggagcggcggcagcggttggactttaattggccagaggagacaggggctgcgtctggggggagttgcgagggagggctacgcggccgcctcttcggaggaggaaacccgggccgggcgcgggcgcgggcgcggacgcgaggatcgcagaggctacgaagatgggacgcgtgcttgtatatcctcgggctgctctgacatccccgttcagttattcagcaaacatttattatctccccactgtgtctcaagcattgtggaaagttctggggataaaggatgacatcttactatcctcgccctcatacagtt

SEQ ID NO: 45460 - DNA, 931 bp, Homo sapiens
tagagacagggtttctccatgttggccaggctgacctcgaattcctgacctcaggtgatccgcccacttcggcctcccaaagtgctaggattacaggagtgagccaccgcgcccggccctgtttgcagttttaacagcaaggcttagaaaggttaaattatttgcccgaggtcacttaataagtgagtggcagattccaaaggttgtgtccactctgttggaccagtggttttcaaatcgaaccatgacatttctaagaccccactactctctactcgcattcccagagcagcttgagaaatccctggccctggcagccacagttagaaaatattgcttgatctactgtctgtgaatatcagggggaggtgttgagttgagtctttatagaagaataattgggaggactttatgacaaattaggtatgtccctggaattagccatactgagattagagggcagagtccacaagactgccctttcttctcagaccaagtgcaagtttgggggtttcccaaaaccaccctcaggttcagtagttgactcacagaattcaccgaaagttgtcatactcagttgcagtttgttacagggacaggatacagattaaaattggtcaaaggaaggtgacacagggcaacatctgtgcaggtttcaaaactaagcttctgttggcctcaggacatgttgtgctccctgcatcaatatatggcaatatgcactaattattgcaaactgggtgagctcacctagacttcattatacagggtttttactggggcttcagttcttaggtatgattgattgattgtccacgtgtttgaaatcagtcctaggttgactattaccttgtgacccaaagtcctgatcctaaacatgtaattggtgtttctggtgtggccagcccccagcctaccactattgggtatg

SEQ ID NO: 45461 - DNA, 2653 bp, Homo sapiens
agatcacgccactgcactccagcctggacaacacagcgagactctgtctccacacacacacaaaaaaaggcataacaaatttaagtgactcaaagctttatgtgacacaggagctctcagaaaggaacagttaaattataacatgtccatattatgcgttagtatgtgtccacaactaacccataatatggacatgttataatttaactgttcattcctctcttgatagacactgaaatcgtctctataattttcctgtaagaaataatgccttggggtgggggtgtcttcctttctgaggctatcatttgtattcctcacttcttaaatttgtttgatatgttgaggcttaaaaaaaaaagattacgggtcttcagaacgccccaatgcccgcggggtgctggggtgcctcggagtttgtcaaggtgtagcttaaaacgttaattcccatgctcgctcccaaatattcgaattaaggcttctgtagttcttacaagtcacccgctttctttcaggaggaatgttaaagattaagagcggcaagaagtcagagtcggcccaccctccgagctctcttagggcgatgtccttgctaatttggagactgattcagtccccttttggcccccaagttacgtaaagataaggactttggagatgttttctcaggaaggacagagctgaaaaacaaagttccgtaagtctggccggtaactacatctttccttcctaacaaagaataagccgcaattcactctctctggcacctgaactttggggtaacgattaactgcgatccgaagccttcaggcaagtaaaaaattcctgaagtgattacgcctgtttggaggcttgcagggcactaggggatggggaaaggtgaatcgaggtgctctctggctcattcgcagccggctaacccgccatatcttacacagctaagggctgccgacgccattttgcagggtgggctgcgcagactcttggcgggaggccggcgcgcttgagcgggagaggacgtggaagggttggaggtggggagtgcgcgttacgactggaaagcacgcgtgcgcacaggcgacagcagcggaggggtggggccagtgtacgagtgcgcgtgctcggtgggagcccgcggagtacctggaaggaggtgggggcgaggtagaaaggagtggggttgaaaagcgcttgcgcaggacggctacggtacgggggtgggagggcttcggagcacgcgcgcggaggcgggacttgggaagcgctcgcgagatcttcagggtctatatataagcgcggggagcctgcgtcctttccctggtgtgattccgtcctgcgcggttgttctctggagcagcgttcttttatctccgtccgccttctctcctacctaagtgcgtgccgccacccgatggaagattcgatggacatggacatgagccccctgaggccccagaactatcttttcggtaactgctggggggagctggagcgaggccgagcggggcctggtggcggtgagggtgggggtgaggggcgggaatccggctgcaaccgggtctggtggagaccgccagaccgacgggaggcctgagcgggtgggaagagctgcctgagccctggacctggagggattggagccgcggggggagccggtggcgtgaagggggaggagacgagcggcctgaagcgtctggggcgtgagcggtccgaggcccggggcctgaggtaaagtggaaccggccgcctggaagttcggcctttgccggggatacgtggcggagctccaggcgtggtttattttctaacggcggtggttcataggcttctgatgccaggccccgggttggtggtcctggaggctgggttcaccgggaagcatgggcctgcttgttggagcgggtagatgcacagcctggcgttattctggcctcagagcctggagctgccggacgtagacttacctcgcgtgcttcggccagttactgggggtggggaggcgcggcgcggcgtgaggaggccgcaaccgctgggagcacgtggttgccacgtggttgggggagggaggggggtgtgggcgctacatccgggactcaccggcgtgttgccactcgtgagccagggatgctgtggctctgttgaagtgggaaatgttaagaggctggtagcactagggttctggaggtctttgttcagtgcttacagcatgtactgtgatggcagctctcatttttttgagccccttttctgtctcactgcggtaggtggagctagccccactttgcagatgaggatactggtgcccagagataaactcacttaacgaaggttgtacttagtaaaggcaataagagactaaatctaaaccaagacgcttgactccgtagctgctgcttcgtgaatattaatgaggcttcgttttagggggacgtcctcgcatgccgccatttgtgcggcattgaccaaactgcttttctaaatacaagaaacacgtagagtgttcggtttgagtcagatcaagacctaagactattcgcagaattttgggagcaccacccccctcgacttgcggtagtcctgccccaaaaaggagagtcccacttgggtttttgatctcagtaggattaattgcagaagcctaatctttgtacta

SEQ ID NO: 45462 - DNA, 550 bp, Homo sapiens
acttttgacacatcacccagctccctgagcctcagtgtcctcatttggaaaacagggataataacgctttcctcaccggggtgtttgaggatctgacaagatgtcacatgtcaagtgtctggctcttacttagtatttaataagtggttgtgtgttatgctgggttcttgattgcaagccatgtggtaatcaagtggaatttattggaaggctatcaggggctcatagaattggcagagaagagtgatgaagtctggaaaatggccagaaaccaagggcttgccagagagttaagcaacaggggccttagcaaggtcacgagaatgggtggccagcacgccaccgctgccgctggcctggagagcctccagccgctcctcccggccccaaatcactcactcaagggtccaagtcctggagggaacatgtggctaccctagcctggattatgtgcataccgtttggttgcagctggagaagagagggggagaactgggtgtttgtgcttctgtgtaaggggcaagttcatcacccactgtgccgtgatggc

SEQ ID NO: 45463 - DNA, 1218 bp, Homo sapiens
agatgtgtttaccaagcagtgaaaaagaagacatgacccgttttctcatagaacttggattctggtgggggaaaagacaacagacaggaggaaaacaaacaaacatggaatataatttcatacagtgctaagcactatgaaggaaaaaaataaagcaacataaaataacagtggaaagcaggaagctattttcaattgggtggtcagaaaaggtctctctgaagaggagatatctgatcatgcaagctactggtataacaacataaatagcattcctattgcgtaattgacctgggatttagaaaagtctgtttacaacttaaaatataaaaatcatccctatgaaaatagtttctactttaagaggcagtaaggtataatagaactagaaagactaggtttgaatcgtggctccactacatagaaggtagatacccctgtttaggtcacaagctctctctccctcagttcagtttcctcacatataaaacagacagaatagtgcctagcttataaagtttataaagtgaagaaagataatatatgggaaagagcttagtaacatgtttaggcatgtagtactcattaactgtaagttccctacatacttatagttcttccacaaattgagcactatatactaatggttctctgcgaagcactcactatttcactattgcaagtagaaacgtatcacatttttatcttccaaccacaccgaggctccaaagtccaaatcaccgctgactaaattcttgttagatattgatgctataaatgatactggcttaacaagattaatattatttttactaacctcatactcaccttttctttcatttcatcatgaactgtttccattttgaatccctaactccaaagtgtggcctccttccaatctgcttgtgatggttaattttatgtgtcaacttggctagactaggttatatggccagttgtttggtcaaatactaatctattagcagatattggtgtaagggtattgttaggtatgattaacatttacaatcagtagactttgagtctattacccaccataatgtaggtaagcctcatccagtcaattgaaggcctaagagaaaagactggggtttcccagagaaggataaattttgcctccaggctgcaacagggaaatcttgcctgagcttccagcctaatggcctgtctcataacattcaatcttgccagccccca

SEQ ID NO: 45464 - DNA, 2501 bp, Homo sapiens
cctgggcctcacaaagcactggaattataggggtaagcgaccatgctcagccaaaaatgtaggttttagtgtctataaaatactacagattctaccactgagcaacccaaaacgttcacattatcagacccagagtgctataggataattaagataatcaacaagaaatgacaaatccctaatgcttattagaaaacagacaagaggcaatgaattcaaacagccatgtctgaccttagacagaccgaccctgaacaaaaacagccttatcatatgcatggtcttttagctaatccttacctagccctggaatctaagactgaaattccttcttacatggagaaccaggagcaagtaaatttaaaaaatggatttcataccccccaagagtaagaatcagtaagaggtggcaattatctttctctacctcataaaaaccctttatgatttttaaagatgaggaaacaggggttcgggaaaataaagtaacttgcccagtatcacaaagtcattaagtagtaggaacaggactagaatagaggtttgtctgcaccaaagccagggttctttctaccaagctatctccctcctctaaaaaatattctcttatatcaaaagctatgataagttctgtggcattctcagaccactgtggctcactacacctattaaaagtaaaaaaagaaacaagaaaggcagctgtcaagaagttgtgctacttactgcccagcactatatgcactagagcttggaaggaggcactcaaactcaattcacgtgatcctcactgtcattccaagcaatcagtcctaccccagcaaaaggcttatcactaacactctcccccagctgaggctgcaaatgacattcccaagacaacttgccagtctattacatcatgctgctgtgttggctttaaatttttaactccaaaaattaaggggaatttgtttcaacctaaaaatggcagttgcaagttaaaatggcagttgtcactacagactggtgactagagcactggctttgcagtcatccagattatgttcctaacccagttctgccacttaaataaatgtgtaaccttaggcaggtcaattcacctctataatttcatatacaaaaatggcaaggtagataacttttccataaaagatcaaatgagataatccaattcctagagtccaacacatagaaagaacgtggaaaataaatgatacatactattattaacattggtatgattctcatgccacaggaatctgggcaaatcaataatccacatggtctgaattcctgattatttgctataacaatcaactggttgaatcaggacatctgaggcaaatgaaacactgactcagttcagcttggttgagagataaccaatagaggccctggcacataccaattgctcagtaaatatttatggaattaagtttgcagaaagtccactcaggaacctcactagctgtaagattcaggagggctcattttggcaaaaagaatggcaactttttttttctacagaatttggcaggtttttcttttcttattttcaaataatattaataactaaacaaaccatataccaggtgtcaatagtgaggtttctacaaataaaaccaacatggaaaactacaaaagcagcattccagagtagaggaaagaaaaccagtttgggaatcaggcaagtgtgtgattcatatgccagtaactttacagttatgtaaacattatcttgggccaaatagtcacgtcagactcagtttccatatcagaaaattggagataagaacacctacttcacagggttgtcataaagctaatatatgtgaagcaccatgtaacagttggtaatgagtgatttttaagtctctgatacctgttttcccttctagacgatggtagaaacttccggaatgggtaaattatgcctaagggcaactactatcttccctccggctttttcgaaaggtaaactaaaattcagccatatagacaggtcaatgggctcaagttgcaattatcagtgggtccactctgacaattttaagggggactctttcatggaacttcagagaccaggaaagaaccaggctctgttctctccaggtagcctaactattccttcccttctcaggcctgctctaatatgaggttgctaaaaggtgtgcaaaggaagagtcatctttgcaataaaccaaagatgcagcatataagcaacaggccttctttgagagcccaaacccaaattaaggcacgaaattttagcactgtttggagactggaggtaaaggggagaaatgttggcattaaaataatacttaaatgagtacagaggaaggaagtcttccaggctcattaatattaatacatgtttactttccattcacatgtgggacaaaacagagtaatgatttgctaatgccaatgagctgagtacttagttcattttactatgctgcataccctcaattatatactagcaaaaattaaaccta

SEQ ID NO: 45465 - DNA, 1172 bp, Homo sapiens
cactaacaactacaatttttccccctcttaaatttccagttctggaaaaaactcggtcagcccactaaaaagcaactgtaacattccttttaatccagaaaaatagagacaaaaatacacctattataatacacctattatacacctattataataacgcaaatatccattatacagcatcaaggagagcacatgcaataatggctgccattccaagaacatttttgttaaaagttacatcgcatgcacagaagctgcttttccaaaagtaaacatatattcattacactgagcctcactgaagcatcctgttcttgtaaggtgagacttgtaacccacctttatatacagaatctaaagacaactgggccttatattgaactcgctctccagttaactgtgttagtgaggttccagtacagttccccaaagaaagcaatttgaatcaataaccacaccagtgctactctgaatgtttgccaataagtaaataaaatgcctgactccaatatgaagaacattttcctccttcctggctccccagctccatttaaaaattgtaaacatgaatagaaagataaacttgagaacagcaaagtcacccatgccatcaataatatccctctaactcagtgcctaattttgcagttttcctcaaacaggacagtctcaaccagatgccaggaatttaatatggcttttcaaagatatatcaaactgtctggaatatgcagtgatgaaaactgaatattgctactgaaaccatatttaattaaacacatgcttgctcagagcttcagaaataaagctacaatgttttcttccttggctctcttagaagccaccccaacaagagagggtcaccagctgcactcctgctaacagttctatcctgagcaaccctttcccatccacccccaaaaagttttacttttatctgtggaattctctgccggcctcggcctggaaaactgggtggaccctgaggacaggtgtcagatctggcctttgggaggtggcccaaactgacaaattattggcagcataaagctatgatctttataaacttcagtttgaggctttatgccagtagtgattccctccccgctccttttttgaagaggggagagaaagcaagccaaaaggatgagtttcaaaatagaaaaaaatca

SEQ ID NO: 45466 - DNA, 481 bp, Homo sapiens
tcccaagtagctgggattacaggcgcccaccaccacacctagctaatttttgtatttttagtagagatggggtttccccatgttggccaggctggtcttgaactcctgacctcaggtgatccacccacctcggcctcccaaagtgctgggattacaggcgtgagccaccgtgcctggccaggactaaaactttaataccagttgttagtgccatgaaatgtgtcatcattgactttggcaaactaacaaccacctgtggacattccagcagccaggttattgcttcaccatctatcataaataaactgtgtaggctttaactcagaagaacgcatatgcacagaagtactgtgctttcaaggaccacttacttggaaagaatacagaatatcacaaaagagagagtactgtggcacagtggaaagatcacaggtttgttttgggttttatttcattctgttttttaattgaggcaaaaaca

SEQ ID NO: 45467 - DNA, 632 bp, Homo sapiens
cagcgagttgagttccacaaaacaaaacaatacagggtaattgcttacctggaaaatattttgtacttcagatccaccaatccagaatgaatgggggttttccctttcagactagtctgagaaaagacagcagtcaagcatcttccaagattctttccgtttactgtatccagctttcttcaacaaaatcccaaacatgcacttcggtaactgttgaaagacagaaagcaatccatacacccaccatggcaccagcggcaaaggacagcctccaagaaatggaaggaagggtcaatggaatggtggatctgaggcacaggaaaaaagttataacccctgagtcagctatttggcataaaatgcctgcagcagcattcctcacctctgtgttgaaaggatacaaaactcgtaacaaataatggaacatccctaatgttaatatttactcatgataaacagcatgcaacttccaaatgagagcagctaaaaaatacctaccctatcatccatataaattgtcctagaccattcagctacactgaacttccttatccattttctaagacagctcctccaccattagaaaaatagtttgtcagccaaaaagaatgatacgagagggctcaaatatc

SEQ ID NO: 45468 - DNA, 3229 bp, Homo sapiens
agttacaatttttcgatatgaagtacttctgttgtaagtacatgcactgtgtgtacattcttaagaatatgtaatatacttagtcgatttaagatagttaccaaaataacccactacaaaagttacagaataccaaacacttgactacaagtatgataaattatgctgaaaaggaaaaatcactcagtatgtgacatccctttgaaaacaaccccacgtgcacacacacacacacacacacacacgcatgcaaaaatcaaaaactatcagtttctttttttccctcctagttttcaagaatgctagagaagtccagttctgtgaattatgcaaaggacagcaaacattaagctgcctccatatttatgctactgtacttccatttttaaaacaagcatctcaactccccagacaccatcatccacagaaaccatgcagctatccaacagactttcagtgtcaccatttattatttatagcgttaaatgggggaagtggctctgatgtcaccaaccctacccagtggaatcactgactcaataaacattttcacactgaagaaaatctggctaggaaaacattttgctgggttaagtagattcttccacctctcctctcaaccctggggaagaagttgttaccgtgttaggaaagatacaaagaaactgtcaaggcttccataggaagaaatcctggacatgtccatttgctgatgcagacttcctcttcccagctctccagagcccaatttgatttccctcatgttcacgttggcaggtaatatctgccatattttatttcttccaccaaatcatccatcaattagcaaattcttcacttctagccactctctcactgtcctgttcctaaaaaccccttctggtttcaaatcctaaagcttcggaggagggtggagggtgtccacggaccgggagtctggcctggctgccagtggtttctaacagaagagtggtcgcttcccccgggggccaaggattcccctcttttttttttctttctgagaagaaagacctcgcggcagtgatgaggatggctccctccccagtcatctccaatttcccaaagcagctctggaaaacgtgaagttgcgccttctctttcctggaggatggaatccagagtacctgggcccttgctatgcaaacatccctctccgccgggtaggaaaccctttgtccgagaagccggacaccacaagggcccgggaaagaggcctccttatccgccacagcctcaaacccgaaagctccctgcccccccagctctgtagggcctatcctggcatccacacagacctaggctggggagtgggtgctgagacctctcctaggacgcggaggcccaggcggccccaacccatctccgtactccttcccaccatctcactcggcctgagtggggcttgcaagcgcggtgcgggcctgggccgaaacagaggaaagaaaaaaaaatccctttctaaaagaaggagaatggggtgctagagcgagtgcgacctaagtctacagcataaacgagcgagggtcgtccgagagctgggaccggagacgggaccagggggagggggagaagcgaggggcatggagggggccgggccaggaccggccggagatgtcgagggatcagaggagcccgcgccaggtccgaggccagggaaggctgggggcccgggtctgggtcgaggcgtctgggaagggccagagccggcctcgcaccggacgttgaggtgggcaggcccgcccggggccggacggacggaagcacagacggtccagcgggccgcactcaccatgagctcgatggtcttgtcctcaatcaccgagtcgggctccatggcggccccggcggccccgcctcgctctccccgcgcagcagcgaacggcccgggcggaggaggcgacggcggaggcggcagaggcggaggcggctatcgcacccactctagctgccagcccgcccgggccgccggcagctccgccctccccctcggcgaacgcagtacgcagatcggggactacacctcccagcaggcgccgcggcccgcagagcgttgtgggaccgagcctctgacaccaggttgctggctcttggcagcccgaagctgaactccgagctgagagtagcactggacggtgggcgtaggacgtgcagacctgaagagttaagagcttgctcatggcagggcctcgagagcgccacgactacgtgtcccagaaagccgtgcgcccgggttgtccttccggctagcttctcttgacttcctggcagcccaaggctgcccagaccgggacggaaactccgaggcaactcctcacttgtcggaggtcctgcgtatgcgacccatttccgcacatgcgcggtccatgccgcagtgctccctagacgcctaggtagctgcgcggcccgtccggcagtgtctgatggtaggggcagatggtggagacaggtgggttctaggtgcgttaggaaggtgtatagacctggggctcaggtgtgggaaggggccagcgagtgagagaagctcggcctggggaagaggctctgagaggatgggcatcccaggagtgagagtttcgagatttcttcgggaaagacggggttttgggaaatgtgctgtggtgctgtctgtatgtcacacgatctgcgaggagctgcgagattaaaggggacgtgcgtatatcgagcccctcattcattcgttcagaaaatggttattttttaagcatccagcttccgctgcgtaccgttctaggcgctgagaatcagctctgaacatgacagacaaggctcctgttctcatggagcttaattctggtggagggacgacagacactaaccaaaagagtggctaagaaggaacacacaagcggagactccttctagtgaactcagcctccaactctgtgtaacttaggtctgtccgtgccctctaaccaaatcccaccaggaagacacggatcgttgaacaagctgggtttattactagttgcagtgactgagaacacacattgaggaacgatagggcctctcggtaagagttgttagtgatttgggagagggtttaaggaagtgagagcttcactggattagatactgtcaggaagagagggtcgttccatgattgagcatctcagttcatcttatctagaggaagggaattctagattgaggctaaagctgtgcagataaagaaacagcagcctggccg

SEQ ID NO: 45469 - DNA, 706 bp, Homo sapiens
catgtgatcaagtcagccaatgaaatgcattctcagaacaactgctgagccagctgagactgctgcaagctctccttgacttctagcctccagcctaaagccatcctgcccctaagggggcctgaaaatcaaactaggtctgaggcactaaagctgagagagggcatgagaagaccgttgatcccttcaattaacttttacaactctctattaagggctttattttatatataagaaaaccgatgcttagagagatgaagtcaccggcccaaggtcacacagcaggttcaaaggattaggaattgaattccggccaatgtgggttcaaattccatgtatctgacagctttgccagagatgcctgtatattctgcaaaagtctcatctgggcctcagtctcccccctatatgggggaggatggatggtgaaatgatgtccaactctctccatgctctgatgagagccgtcttagggagtgggtgagtcttggaaagctaagggtggtccaagtagatgaggcccacgtgggagttggcaggcaaggaatagcataaagaacaagcggctgtctgtggcctccgatgtccctctctcccagcggctgaagcaaggccgggttccggcgcacgatgaggggagccttggcccagccttccactgctggctggcagtgactaacgcctcagcccacacccttgcgagcag

SEQ ID NO: 45470 - DNA, 2214 bp, Homo sapiens
gcgtctcccagtaaaaattttcttaggggaaaggggggagtcaagctgtaggtgttggctccctaaaacaactcaccacctcagaattagctcccaggagcagaaaccaacgtcctgctgccacacttctctagactcaatcagctctgccccacccactccacaaaagctctctgccgcgtcttcctctaggggagaggtgactgcaggctgggagactccccagctgtgactcagaccgacggaatcaaatctgttcccccaggctcagcattcaccagatcctgacctccccctctgaccagccccaacccacctttccaagccccacctctcagtccatgggccacccctcgcccaccccacttccctgtctctggctcatcttcagatgtgtccctagctcccaacccgtccaagcgcagccgagtttctcggtccacatcgcctcgatattcccacagcatctgtggtctctcttaaaaaaaaaagtgtgcccgtatcgccgttttacggaacgtccctggaaggtccctcgagtggccctctcggatgctgaggtcctgtcaacgcccctttgtctccccgtgcggcgccgagcgcagtgcaggacacacaggaagtgctccgaaacagggctagggtgggggcggcaaccgtgcccggagggggcgcccagagcgcagggactcggccgggccgagtgatgttccccccaaaaaacaagagtcatcgggatgagggccagggaccccgaattcagcgccgggcagccctcggagccggagccaggctggccgggtccggctcaggcatcccttccttccggagcccctcgacgcgcgtccggccacccacctcagcgccctcaccttgtaaaccttgccgaaggcgccgtcgcccagctcgcccacgatctcccacacctcgttggggtccaggtcgcggcggacgtgctcatattcgcgggactttctcttctcgaaggtagacaggcgcaggatgcggcggaaattggcaaaagccatggccgggggcgcggtggcgccggctcgggctcgggctcgggctcgggctgtggcttcggcggccgcgaggagaaggaggaggagttggaggacgccgcgtctctcggggttctccccagacccgcctttccccgcagcccgacctcggtcaagtgtgccctgggcagcgccgcgccgggagcacccggaaccgcgcaggcggcggcgtgcccgcccccgcccccgccctgtcaggtccccagggccgcctcccttgtgccggcctcgcagctcctgcccggcccagccctgcctgcgagagcctcggacccgttccaggggaccgtccccgcgcccgcccaccggcccggctccacccgccgctccccggcagagccccgggaccccctaattggctgcgggcgctccccggctccgcccgtcgccgcagggcactctggaaactgtagtccccccacaccacgctccgcgagccgcgggctgggctttggggaagcttcggggaccgctcggtgggaccgctcatggactcaggagcccgcccgccgcgccgcgtggctcccaaaacttttatgggagcaagcgggacggcgacttggcatttcgcgagagcccacggatcgttgtcagcgcccagaaggtgaacctgcactcgttcatttaatcctcccgcagctattccgctaggctgccctcgcccccacttttccgatggggacgccggcaggcgagggcactcgccccaggcacacacgctggctgcccgtctgctgcgggttcctcggcgcggtgctgcctcctagtgtgcgacgggcaacgccggtgcagccgcggccagtccctgcagggcccggcttcccggcgcggtcctttccaggggctccccgtccacgatccacaaacctgccaggattagagggctgggagaaagagctcctttggcactgatttctcttatgtttcctgatgggtttgcggatgtatttgcatattaaataaaaactttattctaatttttaatttcctagtttcaaaaaagatgagcgcactacatacagatcaaactaaagtcttctttgagcaccttcattctcgatcctggctacttgagtcacttcactgctactgttgcctgtttgtcctatagacggttataacatgcttttacctgaatctaaggagagtg

SEQ ID NO: 45471 - DNA, 2513 bp, Homo sapiens
cattagccaaaaaacttaggtgtacatggtttgtgaagagagcttaagtgacagggcaagcaactggtctaaatgttagtatgctacgaaaaagttgtaaaccctcccatacccaaacaatttaaaaatttacagacatgcacattttaaggcagctaacattaggtcacaaatcaaaccaacgctgtcatctttgcctaaaggctgtttatcactaaaatattctacagaatggacgtaaccaaaggtcacttaaataaagatagaactaattttattattatactgccatactacaactactactgattgaattaaaatacctatcctcagcacgcttttactataaagtaggagtgcgttcccgtgttagaaaacttttaaagtactgatcttactgggtggggtaagtcagggtccaactgcacttgtacttttatcctacatattttccttctacgtaagacagatgggaatgtgattagcccaccccgacagcacaccggcctaacacccccaagctctagctaggagccacgttttacccgggaagaccgtttccccacccctccttaatacaatgcctgcggccactggagactcctccagccgagctccagaaactcgcaggtttaaatggccaatctggaaccaaccggggcagctgtcatctgaaactcaggaaagctgagaccagccaactccacagaacaaggaagggtgcggaaagatgtggcggggcccgtcggagggaacgcatcaagctccctccccccgccatcaattcgcttttctgcaaccccggcgccgccatcctgatcctcaataattaaacggcctggagagggagtgaggtggccagaagggcagcttcgggtccgacttccccgagccgagcggggcggtcggcgaggccaagggctacgtccccggcgctcagaggacttttcttcagggctggggcgggaaggggcgacccccgcggctggcaggacagccggaagcggagcgcggggaatgacgtggaagaggggatgacaaaggggcgcgggggcccggcgcggcccgcgggggtcgggacaggtggccgggcctggccgggaacaatggggggccgaggctgccccctggcgctcacctacctccggtgccctccgagttctcgttgaggctgcccgaggagtcgtgctgggcgcccacacacccgcccatgggggcccccggcgcctcgtccgccacctccggacgctcgtccgggcccgccgccgccgccgctgcagcctcctccggcgccaccgccgagctccggacaggcgcgccgctccgctcgcccgccgcggcccagcctccgcccccctcgccgctccacccaccgccttggctcggccccttcctccgcgcccacttctacctcaacccccgggccgcccgcccggcaggcctggcccgcgcgccgccctcgccttcggctcagccccgccaggccagggctggcccatcccgggcgggccgcagcgcccgcctcgccccctcacagccccgcacacccgagtccaggcgagccccgcgccggcgcctcgcgtccgccaggacccatcggcccccggcccgcggcgccgccctccgcacccacggcctgggctcggcccggcccgcccggaatcgccggagaagggcggggccaccggaggccgcgctctgattggctgcgggcggggctgcgagcggagcggggcgagggtgaggcgggggaggggacgcagggggctaggtggggggaggactgcaggcggggggaggactggaggcgaggggaggaggagagagggaggacgggaagaagaaaggagagggaagaagggagggaaagcaggaaaaagccgaacaaaagtgagaaaagaggagtgggaaggggcgaaatcgagttcctggctcctcggccgtcggctccttcttgctggtggaagcgggtcgcacgggggaaccgagaagtagtcgtggaagactcgcaggcggggacggggcggtttcccaaataacgggggctcgggggagagtgtcctggccgaacgttgaggtcccagcgccctttgaatttgtatggcgctccgtgggttggtaccccgaatctgggcttcctcttgcctgcccacccccgtcttccctaaaatcatggggccccattattaggggtggaggcagtggttgtggcaaaccaaactgagattagaggcgaggcgtcctgatggaacgcctggaaagaagagataaacgctgaccttagttcagggggcgtgggtttctttcattttcacgggattaatgattcaaacaatactacttatcaagatcctgcctttgggtatcttaaatcgtccttaggccaaagtgaagtgtaaatgagtgaaacaccctgccttttcgaatctagaatttgggacattgaccacgcccaacattcttggcggttacttttccaatctcagccaaattgttaatggtccctttagaat

SEQ ID NO: 45472 - DNA, 1029 bp, Homo sapiens
gtttagcaaatcagtcaatatgcagtaaatgagcaagacctgaaggctgggtgggagccaccttgctcacacagaggaggttaagctgtctgtggctccttactagctcttgcaggtggagagttcagggagaagctgaactttggcagtggagggtttcaggctgaaatcactactgcggacacggtgcacaattttcattaccttgccggcagctgatcttcactttttattaatcatgttcaagtctttgaatccaaccatgctcgaagcttcaactttcattcgtgtgactgggatgtcttctaccacactctctgcggtcccccgacccctgaaactgtgggaccatccttatggcctcaccctcctccctgagagctgcccccagctgcgtccctcccacagtagccctggagggcctgggctcggcagggcgggttgctcatcgctgcactctggcagggtgtcccacagagctagaacagctcccacccccagtgttatctgctctggcagctgaaatggagaaaaatggatgtgtgtctcaagggagcccagcaaggagaggagagggctctcctgttttggttacatttccgcccctggttgagtgcctgagccagctgtggcctggtgtcatggttaatatgctgctgcagtcgctatctctttgggaaaataccacatgccgtccgcggcctgcccagctggtgcagagggaggcggaaaacacacagggcgtttatttatttattgatctagcctgctgacctgctcggcgggggccgagctgactcaagctgcacatatcctgtgctcagcacagtccgccgttcccctccttcacggaagctgcaggctaggctgctgggctgggaggggtggagggaagaatccaaccccagatgcacagaagttctgtttggtccaggtgggaaagggtgccacccgggtcccagaaagagtgcagtcagttctctgagcctggactcctggggtcctgcatccttcagctgagttgcatgg

SEQ ID NO: 45473 - DNA, 2303 bp, Homo sapiens
aacactgacgtgcacacagacatgttcacactggagtacgaatatgaatatatgaacatggctcactcgggcactgaatactacgcagatgtgaaaaagtatcagaggagctagatagtaactaaaaaaagttgcagatcaaaatgtatacaatgacaccattgggtttttaaaaaacccacaaaaatacatatatatacatacaaaatatgatgtgtttgtatatgtacaagtatatatgtatgaatgagtacctgtgtatgtgtgagtgtatatgttcacacgtacacacacgcacacatacacacatgtgtatataacattttcaagaaagattcatacctaatggatagaagggctatctagggttcagaaagggggttagggttgaagctggtagaaaaaatagattttagtttcatcattaatcttctaagaataatgtatccacgtattacttggataagtacaatataattaaaaataaatgtcatcagtgtgttggctacttgaagatgtacccactcaccctctcccttcttcttgctgccctctggacataccaacactcttcctggcccccacacttcttcccagtcacccaagcttcctgacttcctgcaagctgggggcccagggcagtgggtgctcctgtctttacgtccccatggttgtgtcctagccacatcatacaatctgcacacactcattctcaggaactggaaagtcacatggccttaggggctgctggagttggtttcgaattctggctctgcaggctgttgtgagatgtggggtgagtgactgagttatttggagtcatggttgcatcagctgtgaagcagggatggcaactcctatgttgagtaaccaaggaagtttggctggctggcgctggtctcgtgactaatgccaccaccatccagatgatgttagaaacatcatctttctcctcttctttggacctcaactcgccattgggctgtcacagagactgacccactaatgataggattagctaacgtcacatgttagccacaacaaacccagtcgtttccactgcattttcccagggaggatctgcttatttcctgctctttgccttcaatggggtgcaatggctgctttgtagctaaggaaggcaaacgggaaggaaacccacatttttttgagcatctactgtgtgctaagcacaagtttaagcactctttgtatcttatctcacttaatctttacaatcactcttaagagcagaagtttttattttgtagataagaaaacgaacagtcagagaatgaaggcactgaaccactgtgaaatgtggaattctgatggaaatccaggttaagtgtctcagtcataccacattctgtcccagacccagccagtgttcatgaccagtggtccctgtgatgggcaggtaggctaaggagacagggaatgcgcctgtcccattagagcccagagcaatggagccttctcggagactcccatgggtaagcaaaggcaaatcaacagagcacatttccagtgaatgctggactttgtctgccagtgctttagaaccagaaggaatgtttataaaatgtcaacgtcagaacaaatcggtaccatctgagccaaaaggataatggtgagtggtggccaggtgggatattcaagcacagtgatcaaacaggggcctctttctaggagaccctcagcaggatctatgggaactggccagtctggactggccatttcagtttctgagtttccaaatgtttcatgtcccaggggcttggtggcagggtagtgggagagggagatggtctaggtccccacctgactcattcttctcgatgatgtccaccacctgccccacgctgaggctgatctccgaactctcctgcttctggtagttggctaccaccacatactgctccaggaccatggggtccactgaggtttggtcaccccctgtggataggaaacagacatgacatctggccaccactcatgcatgaaagagcaggagtcagagcagtagggcgggtcaagaggacgttccaaataaaaaagcagcagttacaggactcatctcaagggtgacttcatccattcattgttctattcatgtgcttactcaaccaccaaaattgaccaagtgctatttgcaggcactgggggttcagagttgattaagatatggtacctgctctgaagatgttgacagcctagagggaaagctcattcattcatacttagccatccctccatccatctgtccatccatccatccatccatcctccattatccatcc

SEQ ID NO: 45474 - DNA, 960 bp, Homo sapiens
tataggcatgtgctaccatgcctggctaattttttttttttttgtatttttagtagagacagggtttcggcatgttggccaggctggtctcgaactcccggcctcaagtgatccacccacttcagcctcccaaagtgctgggattacaggtgtttgagccactgcacctggctcatttcattattcttctataacatcatctatactggatactggattttgtacagctgtgtcatactttattcaactcgtctactggtgaatctttaggttatttccaacatgctcacatatatgtcttaactcacgaatctgaagcattaaagtgaagggactgttttatgatttggatagaggttcaaagtctccaagttgatgaggggttgaaacagatcttccactggccaaattccacattaatctgccccagtgactcactggctgtgtagccctccacaatgctggtttatttactaacctccacaaagctggtttatctactaacaggtattcattcaatgattcaatgagcaaaaattttctttgtgctcagcactgcactagtttctgtgccaaatacaacagaagtgcagggtacactctgctcgttgaaggatccgaaactcagacatggccatcatgaataaacagctcagtttaacaaatatttacttaagcctcctttggcccgggccctggaccagggtaatgaggatgcagatctgagggtggttcaggtggttcacgcatacattttgttgcacacacctgtgcagagaacacgtgtgcatatgcatgaattgcacaggtgattctgccagccaagctgcccaagcagtgcgtgctctgcatgaggctggactctgttctctcctagagggcctcagttccctggtgcctctcatgagccttctcaccatgctgagcctgagtctctggggtctggggatagaagagatg

SEQ ID NO: 45475 - DNA, 506 bp, Homo sapiens
catttgcgtaattggataagcttgtctgaaggactgaatgagtcactacatctagatgtttagcaggatgggggcccacattcagtgttccagaaatgccagctgtttctattgttttcaccccatgtcaccaatgagggctctcaggcacagaggggttaaggggtgtgcccaaggccacacagctggagggtggctgggccccaggtctcctgactgagtcctctgctttttccattacgccacactggccttgctgctcctccaccaaggctcggctctccccacgctgtttgggccaagttacttctgaaaataccagggctgcttgccagacaagagggaggggagggtggaatcatgaaatcatctaactccagggtgttgcaggcccgcaagggctggtgcgatcctgccctaacctcttccagctttccctgctggggtgtgtgtgggggaggaggcggccggttccacgatgcttccaggataagcaggaccctctg

SEQ ID NO: 45476 - DNA, 953 bp, Homo sapiens
tcgaaagatgctgggcatccccactgtgatcctcccttcctcttccccagggtttagatctttcttcccctgccccagtgttcgctcctgtcaagttcactttagatggtatcttagcatctttaacttatagctgctttgtttatttacattctgtttgctgcagagcagaagcaaaaatataatttgtttatgatactgtttgatattattgcatactgaacacaaaacatcactaatgaattcattacattttaaataattaggtaactggtgtctcacttgctttatattatgcaatgactcttggcagtttgttatgtaggcgtttcgggaaaccagttaggaacacattatttcccctccccctacaaaataatgaaacacaagctctgaaaattctctattcagcactgtcaggagcagattaggtcagaataatgaaggatgccaaccttctgagagaaactgtgtggcaaaaagacaggatgatgtacaaaggacagaggcagtcttctgacggccaggaaatgttgacttcacctctgttcgcggcagtttgtgaaactacctccttcaggtgtcagtctccacccttattgacttcttgggtggagcagggaccccggcaagcccattggctgcgacatttctcactcatattgattggcgtcgagttgagcctatgacacacaataatgtgtttgctgggatttctgacaagtgacttttaccctttcctgctgggtgtgagcccagagctgttgtatcattgtgcaatcatgtgggatccgaggataaagccagcaccatggaaggagggattggaatgagaggaagaagccagatcaggtgacaccaaaaaaaccctggattaagatgtgcctgaagcctgggagatatattctcctaggacgttcagttacatccgcgaaaaaacctcctgtttactt

SEQ ID NO: 45477 - DNA, 687 bp, Homo sapiens
gctgccttcattcatcacagaaggcaatgctaaatttcagtcggaggttagtgaaaattaagatttaattcttccccttctacgttcaagggccctctgaattccacccatgtaaagaaccccactgctagtcagctttcccagcccctgaacacccctttgcttttgaacccagctgacagtgcacctctctgtcccagcaggaacgggtactccaggccctgtcgcagcccttatcctatggagatgcattctgaacagatggtgacctctgtgaggacaagactgtgcttggtcatcttagcctctctctggctctgggccagacctggcccagggcagacaataaacccacatctgtggaactgactggaagccaacagtggcctgaagccacaggctgctgattcacaccttggctgaggaggaggaaatggtgacgccaacgcgtgggttctagctttctttgccagcacagcgggcggggggccatgcaattctgcttaattaaacaaaacagaaaataccatgcttatgtgcttgaaggcaacttttccattcaggacggaggtcggggctgggaaagtgactatccccttattaccagtcagtgataggcaggggagccaaaagtgatcctggcaaactgcttcacctttctaagcctcagtttccacatttgtgaaa

SEQ ID NO: 45478 - DNA, 1570 bp, Homo sapiens
ccctgctggagggagggaagcccgaatgcagctctatgttccaggacctgcaacctctgagcctcagccttcctatctgcaaaacgacgctactgtcccattttctcaagtccttgccagctccaaacaagattcccatgttccagagggagatgccaggagaaaactttcgtacattttaaaacagaagttactggagagagggggcaggggatgtttttaaccctttaaaggcgtagccactcaaatgatccattcccagagatctcctccatcgcccaggccggctcttgccaaagaacggagtcaaattcggcgaaccctagaggggctacctgtggctggggactgcgggtctgcgcgcctctggacaaggaggggcaaggcgggcggcctgagaacaggcacttctgtctctcccgctttctgtctcagacccctcaccggctggagccagacttttccacagatgagcaggacgggagttggggggacacggagaagacagaaaggggtagaggagccgcagggaggcgagtaggggggcgaggcgggaggaagggatggagggggagaacgaggcaaaagcggggaggggaggggagggagggaggaggagtcgggagggacccgggcagcgccgccgcagagccgaggggagagcaggggaggaggggacgggaagcgctggaggcagaagttttccaagccgggggccctcggtcgcccccgacggggcgcgggctcaagggggcgtgggggccgcgccgcactcacataatgcttgttgggcacccgccgcttctgcacgtctagcaccttcacctccacgatgctgcgccgcggcggcatggccgctcctccgcccgcagcgggccgagcgcgggtgcgggtggcgcggggtgcagggagcgctgggggcgcgccgccgcgggcagggaacctggagctgagcgcaatcgcagccggggccgagcacgagccgccgccgccaccgccgccgcccttcgctcggcgcgcactccagccgggcccagccgccgccgcccgcccccggcccgccccccgcaccgccccccgcaccgccccccgcaccgccccccgcgccgccggcccgccccccttaaagggcccggccccgacccccgcccaccgcgcgcgaaccccgccggccacgtccggcccccgcccggcctttgtcccggtgctgagccgccgcgccgggggaggggactggactgaccccgtcgcccgttcactgattgacgtatcgattcattccagcactctcgctccggcagccgccatccaccgccagtttggagagccggacacccgggttcgaatcccggctttgccgcttttccactctgtgccctcggcaagttgcttaacctctctgggttgggtctcttcgtctataatatgagcctagtagtacaagcaccatgtttgtctttttgtgtctggcttatttcactcggcataatgtcctcaaggctcatccatgttgtagcacgtgtcagtagtaccgcctgcctgccggtgctgcgcccgggattaagtgcat

SEQ ID NO: 45479 - DNA, 1501 bp, Homo sapiens
tgtgatactgcccctgactcccactccaccctcccctctcccttctggcctgtactcctcacagttccccagtgctctcagctgattctcatctccaggcctttgctggtgctgttccctctgcctgaaacacacttccccatcctttgtcatcctcccagccctgcttcctcagtctgcaaagcagctcccctgagaagctgtcgccactgccccagccctccctggccaccaccctgtgcagtcatggggtctgcttatgtccatccttgcagctggtctcagctcgagggggcggggacagtgtgtgacttgtcagtgcatgtacccggcagccagcgcgggccctggcccagagcagatgctctgtaaatgtcagatgaaggaggaagtgatgtactcgagaaggaatgagggcacattccccccacctctcactgcagtggggccctagccctgggagccggcgcctctgaagttggagtttcctgggtccctttatcaagaagagaccacagtcagggggcccggcagagggtcggagtcagcttgggaatcccagccctggctgagcatgctttgagggggcgtcgggatgacctcaccccctgggaactctcgcatcagagcccactcaagctgagaggtctgccacttaggcctggatggagtgagcttttctccccacaagcagcattgcgacctctggcctctctgggatgtccttgcagctgttgacggggttttgtttgcaaagcaaagggagcagagtggcagttaccagcgcgggctggcccttttcccttggggatgctggccaaccaggcctctgaaaaagggaacaaagtccagtaagctggtgtctgtctcctgagtgcctgtcactgccccatttggcagaggtgaggaagggttggttatgttttttcttttctctttattttttttgagatgtagtctccctctgtcgcccaggctggagtgcagtggtgcgatctcagcacactgcaacctccgcctcctgggttcaagtgattctcctgcctcagcctccaagtagctgggattacagatgcccgccactacacccgactaatgtttgtatttttagcaaaggcagggtttcaccatgttggtctcgaactcctgacctcaggtgatctgtccacctcggccttacaaagtgccgagattacaggcgtgagccaccgtgcccagcctggttatgtttttttccagcccacttttaaacccaccaatggaaaatggaactttgttggcaaaggtgactgatatcttggcccctctggatatggcgggaagccttgctaaataccagccttgccttttcctctctctagagcacagcctgcccccctcaccccaacacacatgagcaccatgttgcttcctactgccaacagtgctggtttacattttggactggggcaaatgtcatttgaaccagagatttctcactcaaggtctacagtccaaggac

SEQ ID NO: 45480 - DNA, 3736 bp, Homo sapiens
ccagagccccctgggtgggcagggcccaccaggtggaaaagccccagaagataccttgcaccttctgtgcccactcaagtcccaacagacagcccgagggctgcagagggttggcaagcactggccatgcaggttcccaggaccctcccctgcctcccccggagggggcctggacagctgccatctgaaccggtccccagccattcctctgcatcctaacattggagaactgcaggctctggaggttttggaccagccagagccaggtgtgaattctaacacatctgtgacctaatacaaaccctgtccctcctttgatccttggactgctcccgaatagaagacggtcattatgaaaaaaaagaaaatgagagtggtttagagaatcggaggtggcttgggacattcagagcaggaaatgggtcttgggggtgggaccagccgcagatcactggcaatgaatgccatcctcagagcacagattttgtccctggggcaaaggcattatcccaggcaggcaagataatcagatttgcatgttccaacattgcacctgagggtctgagctgatgagaaggctgtccctggtgggctcctggcaccagctctgggccagaccgcctgggtccaaattcctaccctgccccatccccacggctgcaggactttgtacaacagacataacctgccaatgcctcagtggcctcatctgtcaaaggaagataaggggagtagtgttcacgagcatcagatgagagacctcatgtaaagtccatggcggaagggccccatccctgatagctgttactgtcaatcggtgagattggccccagttggtgggagccagctgaggagagcagtctgtgaaggccctctataggcagctttaggaacagcatggctccgtgggcacagtgttacaggactccctccaatccccactcctgggtgccccaggaagggaactgacgcccggattggacactagccccctcctccttctcccgaggcctttggcctggccctgcacacatgacccagcttcctgtttgtgatgccagcgctggagggaggaaattcagtgccccagccccagggctgcagggcaggaatgtggacgtgttgacgtcaaagcttgtcctagttctggggaagtgggatgggaagggcttcctgctgagccacctttgatcccaggtctgatctgggagagtgaccctggacagccggcccagagggagttcagacacccagagctttctctggtggccaccatgggcaccaagctcagggtccttccccagcatagctgtttggccttgggcaaatcaccacgcccctccaaatcccccacctgtaaagcaggattaaaaatgtgtatctcagagcatcacccactcatcagatgcgtagtaagctcctactttgtgcttcattctagggatgaagcctgcccaggctgtggtgggctctggccagcatccccctggctggtgggccagggagtgagaggggccgggaggagaggatgctcgtagacagaggcacaaagcatgtccagaggtggctgctaggagatttcccagcactagggctgtgactcaggctgaagcctgagcccaggcacttcctggctggtgactcagtttccccaattctacagcggcatcacacaacatctgcttctcagcatcgaagaggcgttgaggcatggccggtatgtgtctgtggggtccttcaaaatcttatttatcaagcagttagagtgggctcaggactttgtgtatgtgtttgctctctcaggtgagcctgaaaagatcaggactgcgactcccattttacagagggataacctgaggctcagtgaggtgaaggcagttcaagatccttgacagaggctctggatcactgcgctagaaagtggtggggtggggaaagaccgctgggctttctgacttcagcaacacgttctccagtaaccagacttccgaacagtggcagacagggccctctgcctggcaagcacacaccacaggacctgtcccacagagggcctcccagcccgctctgccaacctcacccacaggcccccaaacttgagagggttgacataggccatggagacctgtgcgaatgtctgccttccctactccagtcgaccccctgcatcacccagagcaccaggccagggcctggagtcacgctctcctctgcccagcactgccaggaaggcagaaggtgagacacaggagagaatgcatggcgagagtgggcatttatttggcacgtcctaggtgggctgggctgctcgatgagattttaggtatattatcaccatcaggaagattctagaggtaatgaaactgacatccaagaggggaggtgacctctccagggtctccaccctgtgcgcctcagttcccccaactgtgacattggatgaaggagctcatgctcagggaggctgggaggggtcctgaggagggctcagagcaaggccttgggacagcatagtccctgcaagggagtgaccgctaggggccttcctgggagcctgctgtgccctcagccccagccctgcccaccctccctttccctctctgcctttctccagagcacggctcagccctttggggctctgcactttggggccagagagacctgagttagaatccagacctgccactcactggttatgcgacctgggctgagcggttctttttctctgagtctcagtttcctcatctgtctgcgtaaataaatgagggtaataaccagccgcatttcaaggggtctggaggttaggacatcatatctttcaagtacctggtacgctgtctgacgcagagtaaccatttaataaagcggagctgttgttgctgtcgctgtcattgttggcgtttatttatgaatgtcgaggcggcaggtgggccttggtgggactgtacggacatttcccggatgcccggaaggtggcgctagagacccccttgtcggctcccaagagagcgctaagcatggtcttcacatcatcgggaagaagccaaacttagacgcccggatggtttccagctctgttaattccctgggcagatgcttcctgaacaccccaacaatgttctcaggtccaccactggggctgcggacctggggctcctccccaccagccaccccgccctccccaacaggcctccactgcctttctctccctccctttgtctctcctgcctcctccctcccttcgtttcttccttccttccttcttacaaataggcactgtgcacctactgtgtgctgggctctgtacgatgaactggagatgcccagggaagaagacctttgaaaggctgtgccctctggaacctccaaactacgtgaggacacagaaataaacaagagaaagaagaaaaaaaaagatgctttcagatcctggcaagcatcgggagaaaatacaacagggtggtgggatagagggacggaggagctggggtgaggagaaggcgggaggtggtcagagggaagggccggtgtggagggggccgccggagcaaggaccctcggacacgcagcccagcatatcagggagaagagacaagaggaagcagtcgggtgggggcagatgtggccagaatcagaagcgggtctgcgaggtacagactaaagggccggtcaactgctgcagcaaccacagccaccactaatgcttactgagcacttactaggtgccaggcactgg

SEQ ID NO: 45481 - DNA, 1345 bp, Homo sapiens
gttgctcaagggtcaactgtatttccctttttaaaacctgaaaaacccagaatcctgaaacctccagtctcaagggattgtgggcccttagtattctaaggcacctgttgtttgctaggcaccaggctgagcactttgcacaggtgatcgtgtttcgtcctagccgacctaggcagacgcgctgttatcatccccactggacagatgagaacactgaggctccagacagtgaagcaacttggccagttcacacggcggtaacagaatgagcctcgaaccgccaccaggagccacacacgtcgttagcatgtgctctgtcattttctcctgccctcgtccctgtctgtcagcctggctgggcaccaggtaaacaggtccgaggcatgagtcacctccagcagcctgtcacggggctgggaaaacaggctggccacctcctgtcagccagggccacaaggggagggctttgaatgctggttagagcctttcaattttatccagaaagcagttgggagccatggaagggtttagagcagggaagtgtcgtggttatgtggatgacctaaaggagtggtccccaatcctgagtgcacatctgaatccccaggaagcttgttcaacacagagcgctgggccccaccccagagtttctgattcagtcgttctgaggtggggccggggaattttcatttctaacaggttcctgggcaacactgttgcgggtggtgcggtgaccacactttgagaaccaatgttctagaacaacacagtggggggagggtagcaggtgtgcccggactttccactgtaataagagccgtcattttggggtgccagggatgtgccacattcatcacccccacagcgcacacaggatgaactgagcctcagtaaggagaaactgcctgtccggggccacacagctcagaagtggtggccagggactcccatcttggggactggggttccagaaggatccccccctcccactgccctacctcttacctggtacctgtgacagcttggaggatagcacgggtggccatccttagtgagctgcactgaaccgctatggactaggtcaaggcactctggagtcgagcaaacagatgcgggaactggcatccccgagctctggaccccagacccactcctcctctgggctccagacccactcctcctctgggccccagacccactcctcctctgggcccccagctgtaaagagattgttctgactccccgtcactcgggcagggcgaggagcagtttcaagcagacccaactacagatgctgcagagggagggaggggtcgtcagagcgagcctggagacccccatccct

SEQ ID NO: 45482 - DNA, 20352 bp, Homo sapiens
cggaagtgcaccctggcttcgggcgccggttgcccctcggggccccgcgctgcaggcccccctccgccgccctccggggcttccatgaggcccggcggccccggcggaaggagaggctgctttgcgcgcagaggccagcagagcggggggggggtgctcgccactcctccgccccaccccacacgagggtccaactccctttttagagatgtcaaaactgagggtttgagaggagaaataatccactcaaagtcatacagacactaactagttggacctatcagttttgtcccaggtatttggaacagaatctcaaaatttcctttggtggtatgattttcacatctactgagtgttttacaaaccatgggtacttaaaatatgtttattggatgagtgaatgattggtgtcaatcttggtgaaacttttaaatcccatctttgcagtgtgctccactgcagagggctgtgcaggctgggagggaaggagggcccaggggtcagaagtatgcagtccccccccggcccttgtaggggaacccatccctgcaagaaccagtcacatctccataacaccaaccgaccttctgaaggtccaggatccctcactgcctcttcccagaaagtgtctatttccttcccactttgtctccctgaaccagccttcaggaaccctggggattccaggaccctcccaagtttgggtatggaagggacttagcactggcagatgggtgggagaggagaatagatgaggttcaccgcaggttcttcttacacatgagggtacgaggccccgaaaggggaagcagcttgccccaggttagtggagcagggctagatgggcttagaacagaggccactgctccaaagctctgatggcctagagtaaagcgttgtctgatgcgcgcccagggtgtcactttggtgaggcagcccacttttgtgggcgctcaagcacgagcgcccctccggagcgctccagagccactccggaggggcgctcatgcttgagggacagaatagggagcagctgagtcacaagagaatattactgggccgtattacagattgggaaaacagaggttaaagagtttgatagcaggccgggcgccgtggctcatgcctgtaatcctagtactttaggaggcccaggcgggtggatcacaaggtcaggagatcgagaccatcctggccaacctggtgaaaccctgtctctactaaaaatacaaaaattagctgggcgtggtggtgcgtgcctgtaatcccagctactcaggaggctgagtcaggagaatcgcttgaaccagggagtcggaggttgcagtgagctgagattgcgccactgcactccagcctagcggcagagcaagcgtccatctcaaaaaaaaaaaaaaaaaagagtttgatagcttacacaccactaacaggtggcagagtcaggacttgaacgcaggtctagccaactccaattcacacgctgtatccactggtccacaaacatacctctcaaacatcaggtctttgctgctctcctggccttggagccctctttccagttcacctctcaaatgggcaactgggttatatcattcaggtcttagtttatcctgccttcatagccttcatccttatcttattttgtgattatcttatttctataacccacccatatatagtgccatgagacggcaagtgacaaagtaaaattacttttgctgtttagcgaaaatagcaaaagtaattttagctacttataagtaggaattttgtcttgcaccaaagtatcccctgagactatacttatcaatatttgttgaacacatgaatgaatgaatgaatgaacgaatgagtgaatgaatgcgtgggcctcctgcctagctttaaaagccacattcaaggaaaaggtggctatgagcttatcttccttggcagagcagttttgtccactgtggcgctagcagagagcacaccctttgttctccacggggtggaagacacctcctcggtgggcagaggggagcagggctgctggtctgcacctacaggctgttctcaaacaggctcaccccgcagagctctggaaacgaggtgagcagccctcccacctgctctccagaaagcaacctgcagagaaaaacagcccgggttgacctggatccacccggcgggcgcggggaggggccgcagcggcattgtttgcctctgtgtatggcaaccagaaaccacggcagccagcacttctcagaggcaccccgcccccctttattttaatctcctaaactgatttgtcagcagcaggaagtgacatgacagctttcctcacaaaagggaaactcctccgcgttaccatggggatggaggccactgtaggatcacagatttatataatcttaaaggtgtacacacaatgatgtcatcctctgacgggccaggggagggagggaaagggacgccagaggctgcaagtccaaagcaaattagctacgatttgcaaaattccaaggagaggatgcggtggaggtgggggagggggagtgttagaggtattataatgaaataatgggtgcctggaaaccacagaaaagcataatgtatgcattgatgcattttctacatcccagaattagagagatgggaagaacagtactcagatccagtgcaaattggtcattttacggggtgggaaaactgagccagaagaactgccagaagccattaggacagagacaaggggatggaaacatttctccacggcccactgtgtgccaggcactttacattcatcagcccatgtctttctcacaagtgagcctcagttttgtcctctgtaaaatgggtattgctgtcaaaggttacttaaccttagcagtacctggcacacagtgctcactctaaaactggcaaccatcattgccacattatcagtattaaaagtcttatttcaatctcttcctgggaaacacattaatagactttaagtatctttcatcacgaggtattaattttttcccaaggaaagcagtctgaggccaaatatgagatttttctggagggtctgaacacagtgactccggtacatggggatcaggggtcatcattcctggctctcagggctggcatgaggcagagtggcttgagccgggagaagtgagtgacttgttttcactggcggctcccttaggcagccgctgtatttttccactgcgtggatcacactggagattaattttggttcagccagtgcctgccaagcagaaagcgaaggccctagcccacggggaagtcagccatggcatctgtcacagactcgatgtcgctggtacatttccacggagagagatatttacaatagtaaatttctaggctttgataaaaacactgggtacgatttgttttgataggcatgaacatacttgtaatcggaaacccagctgaggaaatgagcttgccagcccagggtaagttcttagaacttagaacacagggatctttcagaccctgggagtcaagtggcagacagtgagccacaggggcaaagtcaaggacactgattctgcgtaaagaccttgaacaacaggacaggaccagaaccatagcacagggtgctcatggataaggcgaatgggatatttccttttctgcttcccatagcactttgtccagaaacaaagagtggggtggggcgctaaggggccagtaatccaagagcttcgctgtttcttaacgcaacattatagactggattatggattggtagcaattacatctcttctgttttttgcctgcttggcaaaggagtacaaattcagaatattatcctagaacaagtcaggtttaattgcttatctcaacaaaactatgaaatcagagcagcaggtgacatgaaggaggcaactaccaaaaatgccatgtctatatgcagaaatgccagcgtgaatgtcctccacaatgttagcaatggtcaggttggggatgggctgttgcgggtgatttctttacatggtatttgcttatagtgcttggattttttttctttctttttttttttttttgccaatgtatttaaattttcacaaaaacaaaagcctttttaaaagcaaaaagataggtcaggagttcgagaccagcctggccaacatggtgaaacccccatctctactaaaaatacaaaaattagccgggcatggtgacgcgcacccgtaatcccagctacttaggaagctgaggcaggagaatggcttgaacctggcaggcggaggttgcagtgagccgagctcacaccagtacactccagcctgggtgacagagtgagactccgtctaaaaaaaaaaaaaaaaaaaagccatgagacgggcaagtgaaagtctgaaacagatgtagattccaattctcctatttctgccacttagccatgctgggtctcagcatctcatttgcaaaaggccttgctgagtttctctaggggcaggtagcacacacctgccttatgtcatgtgtttggaaaaacttttgtctcctcataactccagcacagctcagagatgggaaggcgactttttatattaacctgaggagggtattaaatgaagaaggcaatccagacaagtggctatttcctcctagctttggctctggggacaccttggcatcctgggtgacatggtaggttacagagccgctaaaatgggcatgggcagacacactgatccaatactaagagttcagctgtagcgtccggtgtttcatgatactcacttgtcttcctcccttgcaacccagccatttcatgggaccaacgggccaccacagggcatgggatcagatctcaacacattctgcaggcccttgtcgaaattcttccctagttcactagtgggagagggattgggtgtggttgccaaagaaataaaagcgttgaaatttcaatagaaatgccataatttattccattgtataaaaaagtcatccttatgtaacaaaatgtcttcttagaagaagaaatatattatttcaggtcataaataatcagcaaacatacaactgttggcaactaaaaaaaaacccaacactggtattttccatcagtgctgaaaacaaacctgcttaagatatatttacaggatagtacagtactcaaaaacaaaaattgaggtatttggttcttctaggagtagacaatgacatttgtgaaggcagacacctacacaaaaataaataaggtatattctcatatgtatatgtgtcgtcgggaataatactggtaggtatgtcaagcatgaagagattctacaaaaaacaggggcgagcaaaaagaaaccggatcacacactgagtcctttctcttctgccccattttgtcagatggacttgatgtacccactatatattggtcccgaatgtgctgagttcagcaaatgtcttgacgctaagtcatcaccataactgcttagaaacccagaggaactcgggtgaagttaaataaataaggaccagccctctcgagcccctcccagagttattgcatttctcctctcaaggagcatggagtcccaatgggatgtgaagagcctcacctcccgtggcctttcagcagctgggagaggtcgtaatggggctctgaaggtagctcagcgcactgttcgtggagtggacagggatggagacggggaagttgaacacggtggtggtggaggtgcctcggtcgagcacagccatggcggggctcccagcctctgccgaacagtgcggagccagcacctgggactcaaactgcagcagctggcccatgaagctgaagttgggagagatgatgcttcgcctctgcttcacaaactcaaaggcctcgtccagcttgactcgattagtcctcataaggtaagcaaggcagatggtggctgaccgggaaatgcctgcctggcagtggacaaacacccttcctccagcattcttgatggagtctggaaaaccaaaggagcggctggttacttgagagttcaggagaaccaccccaagcccaggtacagtgtatctgagaaaggtcatgtgtgtcttgtctagaaatggtcaacatcaccacatgccatcacatggatactgttcatggaggcaacgtgggcactgtgcaaaggatggcacaggatttaaactcagactggggatttccacttagcagatagatctcagaccagtcaattcaactttgtgagccccactttgcaaatctgtaaagtgggacatcgaatcaaattcatattttacaggaatgttgcccacaccagactgatactgaatgtgtggaagaaggctcagaaaacttcaagctcttgccacagaggttgggcttagtggctaaaatgagaagagaaaggcagaaaagccccaggcatccattccatttacctatgaagtcaatggcctcgttgaaccaggagctgatgtctgccttgtggttgtcctccacagggatgctcttgtactggtagtgaccctcaaaatggttgggacaattggctgagacgttgatcaaggcagtgatgcccaaggcatccagcatgtccttgcgggaagcgtgatacgcactgcccaggtacagaaagggcaggatttccaccgggccaccctgaaatccagaaatatccaacattcatcaagcttgctcaaagccaaggccagtgcccatacccacaaaaactttctgctggaaaagtcaatttcagataccgagtgaactcagttctgttgctggaggataaataaatagggaactaagcccatttgcctgggcaggaccagcaagttcatttccgtagagcctacaattggagactcggctccgtcagaccacttaactgtggaataaatcatatccctgtgtcccctccgttataaataatgctgcaggtcactttctatattctccctggcactactcttccatgcctttgccagttcttacttcttccctgtggcagggacacctactaacctgatcgtagagtggggtactgcaggaactgcacccagattccgcgctgtcagggacgctagtactcaggggaaggctgagccccatgggggtcgactgtttgctgcacagctccgggcaggaagccgaaaacgcttcgtatcctcctgggaatacaaagacattttttttccccattagtgacaccgggacacggcaccttcatacaactcccccacccaccaagggctggaagtttacatcggaaaggcccaggcaagtctttgtttccagagccaaacaaagccaatgacaagttccagagataaatgtactccagcgcccacgcgctgcaggtggggcgatcccccgggagccgagagccaggggtaccgggcaaaacctcaggggtgtgcggcccgccccgagcttccccgagggcgtacctttgaggaagaagacttgcgcggcgcgcgcctcgcggcagagcgcgccggccgccagggccagggtgccgtcgcgcttggcgccgtccagggcggcgctgcgctcgtccagcaacaccacggcgtggtaggcgccggccagcaggcggccgcggagctcggcgttgggcacgatgtgctccaggcccatggcgcccttggcccggcgccgcacgatggtgctgaagcgcacgttgacagagccggcgatgtggccggcgttgaaagcgaagaaggagcggcagtccagcagcaggcattgcgccgctcgctcccccagcagcgcccgcaggcctccagcgtccagggtgcccacttccatgaccatggccggcctcagcgcccccagcgtgatcggccctgcggtgctctttgtctgttctcggggccaagggcagggcggcgcttttcgaggaaaagctagacccccgggtctctctgcgccgaaccaaaagccgcttttggactgagagaggagcgtcacgcggggctccgggctcctcggcttcttcgcggttcccccgactgcccctccgacccgcgtcgcacacacagcccaaatgtccttcgcagcgagcctggcccggggagcgcgtttatatgcggcctctgggggacggggcgggccagacccgcgcgcagggggagggggggtgtttgtttgaatggtgatcacgtgacggggcggtgacgtcacccgccctgccaggccaggcgccgccgagccagagggggagacgtcatcagcctcggagctgggtccgctcgccgcgcgctggctcgcggcccggcccccgccctgctgtccggcctgctcttggcgcgtccccagggaccggacccgcgccgcgctccaggcccagcggggaggaggagggctcgctgccagctgaggctgacctccgggatgcgagcggccgggagaacgggcgacgtgccacctgccttggcctcgccgctcctccctctctccctccccgagtccccttccccgtgcccctcggccgccgacctgaaccgaaaggggcttcctgtgcttttgcatactcttgtgccccttttcctcatttcctcatcactaacaggcggggaaactgaggttccccaggcgaagcgactgacttgcccagaaccacactactggggtgggggcagcaaataggcgcctaagatgaagtttagagaaaaatgaacaactctgccgatagaaaagtcgtccctaccaagaccgactcgagcgagttggggcggagaggttcagggcaatgctttcctgtttcccagacttttctttaaggtggctttaaaatatctacatttgccatgaaagtgtgagcaagcaaactcccaccgggaaataatgctattcctagtcttgtggcccccggaagacttggagccaagggaggcaggtcagggggctgaaatcccggtgaggggtcgcaaggccccgcagtggattccagggtttggcgtttggaggggtgaggggcgacccgcagcgcgactcgacggcgccccccaggggccgcccgacacgtttctgtcaccttggctccagactgagcttctccatccctttctttattatacaaataggcagtatacacagtgagcgcccactaagcgctgggctgggggcctccaacccggaacagaagccggccacaaccctcgctccctgtcgtcgcggccgttataggccgaaagcaaaatccaatcccgggccattgtgggcggattgccaggacctggatcgcaacacttgggaagacccccgccccgcccagcgatctccgtgccctgagtcccagtgacggccccctggacagcggagcctgctgcagcgacgcgacgcgctgggtacacaaacataaacattgcgccacccgcccgggtgccgagtcaggaacattctgcggtttcctcccctcctgggggaggggatttcgctggccaccctgtgtcgtcgctgtgcgagctgtatcaccagtggcaacttctgcatttgcctcgcttagcttgtgtgttttcgcctgcgcaaatgttctgcctggattcttctagaaaagttcagggcatggagtgcttttttttttaaaagggcgtcttctaccttcatttgaacattggtcgaggacagcaaagaggtcctcagataagggcaacgccctccctgtatggagagatagaagaaaaagaaattgtttatactacttattcagctgaggaactcaacatagtttttgcgttgaatcatagaatgttacagctgctgacttttcactgcataccgacttgatttgtcccattttttttctcaccaagagcatttattataccttcccctaccgaaatttttcaaaaagaaaactttttaagagctgggcgctgtggctcacacctgtaatcccagcacttcgggaggccgtgggggggcggatcatgaggtcaggagatcgagaccatcctggccaacatggtgaaaccctgtctctactaaaaatacaaaaattagttgggtgtggtggtgggcgcctgtaatcccagttactcgagagcctgaggctgaacccgggaggcagaggttgcagtgagccaagatcacaccactgcactccagcctggtgacagagcaagactctgtctcaaaaaaaaaaaagaaaagaaaactttttaatgccgttatcatagtagtagtggcgcagtctggccctagagccaggtgtctgctggcctctcctgcttttctctctcctcccttgctggaaagagtgcagagagtagacttgaaccctgtcattttgctgctggatggtcagaggtgagtctcgacccctactgagcctccaaacccacgtctgtacagtgcgtctacactggcccactttgtagatggtttgaggcccaagtgagagatggggggtttagggaactcaggccctacctcacccctgctctttatgattcactgtatctctagggtttccccttcccagcagaatggttctttatatatcatcatgcccctgtgcctttcagagacttgcctcagaaccagggagaaggtcactgcaagccatctgcttatgagatacatcagtggacaggggcccaactcaggcagagctcctctttaaggcccactaacacacagtgctcgggccagtgggtcacctgcccggcgacaagtggtaaacgtgtagccacctaggcccccaatccaggcagtggagatgctgcttctgactgaggatggagccaaagagagcccagcataatctggtctctgtaaccacagaaggagtgagggactggccttgtgggcctggctgccagagggagtgaagcagataaatcagtggatgttgactcaggggagagaattgggcctttctgacctgggctgttcccaattctacctagtcctgcttaggaataaacctggagacagtgaggagtagcggaaagaagggttcagggttccacactccccaaaaagctggcctggattttctacctttaatgtgtggccttgagtaagtgcccccatggtgctgagctccaccccctccttcccatgatggagagaagaataataacattcacctccagggactctggggagactcagtgtagccagggttggccctagctcacaatccctgtcctaatcctgctctcaaaggcgactttggatctctcttgggatcacaggaaaagaaaagagttgagctcccgctgatgacagtcagaaagaggcccccgctcactgtctgcttggtgaccttgggcaagcagcttaccgtttctgagcctctgtttccccatttgtaaactgggaataacatccatttaggaccaagtaaaacagtgtataagaacctgatgtggatgacacccaaagagggtgctctcaagagagggagcagggccccacattcatgttccctctttcaaaaaccacggcgtttttcctgtctcccctgtgctgtatgggggttcctcccctcaatagccttctataactccccatttcttagcaaatccaaaactcactgccactgggcctcggccatctatatggctcagcttcccactctctttgctttctctcttgtgctccaggaaaattctgtgggcctgtgttcctagaatgttcttgtcctctcccacatctttgctcacattcctccccctccccctgccagacagtggcccctctgggctcccccatagtctttccaggtgaagactcctctggtttctccaacttctccctctcctgcgtctggaggacattgtccgtatattctgattgtgtacaagtcacctagatctttgtcgtactctccccaggttctaagttggtcagcttgagggcaaggggtgtgtttttctcaacattgcactccccagcctactacctttgatgcagtgcctggcacatagtaggttcacaatttgggaaacggtagaattgtttcaaagggtactgttgaaaagtgtcagaagagaggagggtggtcactgacactcattaggcctcacctctgggccaggtgcattacaggtatcattccatgaatctatcagtgatcctgtgaggtgcttgttgtccccattttataggcaaggcaagaggctcagagaggagacataccaaaggtcacatgcctaaggttataaagctggtaatcatcagacacagatccaaacccagcgcctgtctgacttgagagagggagctgggcctgggtctgttgaggcctccgcgtctgccagccccatgtctggcagcactggctgaagcctctgcctcccagcttcctggagttcttctcgctggacggagtggtccctggtgtcagcccagcagggagcctggagccttctaagactcccaactcaggccctagtgccgctgctgaagagactctgtagccactcaggcctaccttgagggactggcaaggggctgacttcaccctctacacccaggcagttgggacagagctagctgccattgcacaatctttacaaacagatctccatgctcagacctggcagggcccacagagctgtgtcatcctgtctaacctcctcatttgagaggcaagagcccagagaggttaggcaatctgtccaaagtcacacagtgttcagaacattctaaccgtagtcagcattgtgtgagctgtgtgtccaaacccttaacagtgtttatctttggaaggtggagttcctctcattttcttccttatgactctgaatgatttgaactttttaaacttaaatgtgtaacttttgtaacgaagaataaaagaagattagaaggcaatcatatgtaggtaacagcattgttgttaaaaccaagttacagagttagactgcctggattagaatcccagcttgcttactcaccagctgtgtgtatttgggcaagttactttacctctgtgagactcagttttctcatctttaaagcgggaataataatcatatcgatcttgtagggctgataggaaggttatataagacagtgattggcacactagagcctgtgaaccaaacctagctcgctccctccttctgtacaaaccacaaactaagactggtttttatattttaaatggttgggggaaaaaaatcaaaagaagaatctcattttatgacatgtgaatgtcatataaaattcaaacttcagtgtccataaataaagttttattggaacacagccacacccgttcctttacatggtatctgtggctgctgtcacactacaatgggaggcgtatattgtgacagagacagtatggctcacaaagcctcaaatatttacccaagtccctttacaggaaaagtttgccaacccctgataggagctcatggatgaaaagtactgtagaacaatgcctgacacagagtaagtgtttagaaaactttgttattattattatatagatatttataaaatcttcttcccttccgatgtttttaaaagcagtaattgctttcatcatataattcattgtgttgaaggcacagttttcatattttagcatttctcagagtgtaacaattggaggcatgtcatcattaattgacagcattttcctttcttaatggtgcacagattaatgaaagggcctcagaactgatgacatcttagagccagtagatgcagtaaagtataaaaggtttaagatggagaagaattaaagtgctacagtcattcagttaacatccgttctagtagtgggacagacttgttaagtgccaggatagaaactgggtagcccaggaaagatgcccagaggaggggacgtctacttggagatgtaaaggctgatgtaggatagaaatacctggaggaaatgcctttgagaggtgggcctcagttacttaccactttcccccggaagcctcacctccccataaaataagaatagtaataacccctaaagaccactttgtgattcattttcttttcttttttttttttttttttttcatttggagtctcgctctatcgcccaggctggagtacagtggcgcgatctcagctcactgcaacctccgcctccagggttcaagcgattctgctaccttagcctcctgagtagctgggattacaggcacctgccaccacgcctggctaatttttgtatttttagtagagacagggtttcaccatgttggtcaggccggtctcaagctcctgacctcatgatctacctgccctggcctcccaaagtgctgggattacaggcgtgagccactgcgaccggcttatcaataatcatttatatctctcccactagcttggaagctagggcatgatttcttgtctctcttggtccccagtacagatctcaaagcaaggcttgttggacaaataaatgaagatgagcccaagagcccaggagagggaccgggaacagcagggcctccgtgactcacacaagcttcatccctgaaccaaggacgcagcctgccaacaatggccccaagccacaccccgccacagggggaactgatgctgcggtgagaagtgacagctttctgttgactcttttttttttcaagcagaatatgaattgagacatactttcattttcataatcagaacctaacacttagtaaccaatgttggtggaagcaaatgagatcacagtttgtctgttccaaactcatctctgggaaaaggaggaggaaaaattattggcactatgttcagaatcatagctgaagatgcagaaattgttcatcccaattttgcctttgtaagtaatgtgggggcagttcttattagtaattgccaatctctactgagacacagtattttgctaggcgctttatattcatttcctggtatgatcatgacattaaccctgtgaaatgcgtacccttactatctccatgtgaagaaatgagggaactgaggaccagagaggtgaactgacttgtccaaagacacacagtaagggctgtgactctccgctttctaagatttttgttcttatcgctccacagcacatagcaggcgtagtatgaaggcagcatgctgcacaatttcgctgtttgtttcttggaataataatttataggggactgcttctagattccaaaggaaagagaaaggaaatatgccccaaactcaggctttcagcctggccctgcctgactcactgagctgcattggacaaatgattcattcactggccttgacctcagtgggtttggccacccattgagagtgaagtcacacctccagcactgcgatgcatttattgatccactcacctagcttcatggcaggcaagaaacaggcctgtgtgagcctgcccaggatcagggacaggagagcacacaggtgtttctggatatcctcaagctgtagctgggctgctcgattcttccctaggagatcctccgggggcctgaattagtttgctagggcttccgtaacaaagcgccacagactgagcggcttaaataaaaatgtgtcatctcatggttctggaggctggaagtctgagatcaaggtgctggggattaggacttgaacatatgttttttgggggcacacttcaaccctccggagggcctgtgccccaaagagagcctccttctgtgtgcagtgaaggtgtgagttctaaacatgagaaaaaaacaccccttgttcttggatagggtgactcgataccacaagcaggtccaactggcccaggtaaatatattcgtttaacatgatcgtcaccaaaatattgagggtaggtgtttttttctggagttaaacaagttgattctggagttgatatgaaataataaacaagcaaaaatagccagaattgttttttttaaaaaagggcaatggggtggaggtaagccctaccagacattaaaacacatcataaagcttctgtaattggcagggcacagtggctcatgcctgtaaccccagcactttgagaggctgtgatgggaggattgcttgagcccaggagtttcagaccagcctgagcaacatagcgagactccatctctacaaaaataaaaaattaaaagttagctaagtgtggtggtgtgcactcgtaatctcagctattccagaagttgaggtggaaggcttgcttaagccaaggaatctgaggctgcattgagccatgatcacaccactgcactccagcctgggggatggagtgagatcatgtctctaaatatttttttttttttgagacagagtctcactctgtcgcccaggctggagtgccatggtgcgatttcatctcaccgcaacctctgccgcccatgttcaagcaattctcctccctcggcctcccaagtagctgggattataggtgcctgccactgcgcccagctaatttttgtagtttttagtagagacggggtttcatcatcttcgccaggctggtcttgaactcctgacctcatgatccagccgcctcagcctcccaaattcctgggactgttacaggcgtcagccaccgcacccggcctctaaattttttttttttaatgttttaaagcctctgtaataaaaatggtgtacctggaaacaaatagcgagacagaccaatggaacacaatagaaagtccagaaatgtatccaagtacacatgaagatttggtgcatggccaaggtggcgtctcagatcactggaacataagacttcttaataagcatgctggaaccatggcattgcatttggaaaaaagataaaagtggatccatacctcacaccaaacatcagaataaacaccgaatggtccagagatccagattttaaaaaatgaaaccttacaacttcttttttattattttttcattttttaagactagtcaactacagtagtgagaagaggggaaagggtagaacaaggagtttgatcagtaactgacagtcaacaaatcattgagataactctctacctttgaaccagccaaggaaagtttacaactctttttttttttttttttttttttgatacagagtctcactctgtcacccaggctggagtgccggggagcaatctctgctcattgtagcctccgcctaccaggttcaaaagtctcctgcctcagcctcctgagtagctgagactgcaggcacccaccaccatgcctggctaatttttctatttttagtagaaatggggtttcaccattgttggtcaggctggtctcaaactcctgacctcaagtgatccatccgccttggcgtcccaaagtgttgggattataggtgtgagccaccacaccggccagtttacaacttttaaaagaaaacagagggaaatgtatttataacccaggagtaagaaaattttttatctatttaggactcaaaagccacaaacaatgaaagaaaattttgataaattcaactatataaaaattaaagccaaatttttagaaagctttttatgcctaaagctccataagcaaaattaaattttatttaaaaaaaggcaaatggggctgggcgtggtggctcatgcctgtgatcccagcactttgggaggccaaggcaggcggatcatgagatcaggagatcaagaccatcctggctaacacggtgaaaccccatctctactaaaaatacacacacacaaaaaaattagctgggtgtggggacggggggcctgtagtcccagctagtcaggaggctgaggcaggagagtggtgtgaacccaggaggtggagcttgcagtgagccgagatcacaccactgcactccaacctgggcgacagagtgagactctgtctcaaaaaaaataaataaacaaaaataaaaaataaaggcaaatgggaaaaaaaattgtaatttacagatgaaggccaattccacctatcttaaaggagttcttaaaaacaaaggatgaaaaagccaaaaatatgattttaaaatagacaaaaactgtgagcagatagtttacagaaaaagaactacagtccttctgaacatgttaaatgcccattcttttttttttttttcctttttgagacagagtctcgctctgtcacccaggctggagtgcaatggcatgatctcagctcactgcaacctccgtctcctgggttcaagctattctcctgtctcagcctccccagtagctgggactataggcacccgccaccacacatggctaattttgtaattttagtagagacagggtttcaccatgttggccatgctggtcttgaactcctgacctcaggtgatctgcctgcctcagcctcccaaagtgctgggattacaggcgtgagccaccacacctggcctagatttccactgttaatcataataagagacaagaaaattacttaagagactgtttctcatccatcatcagattagccaaaatccaaaaacttgacagcaccctctgggacaagggaaacctgactatggactggatattaggtaatattatggaattgttaattccactttggtgggtgcctagaagaatatcttgttcttaagagatgcatgctgaagtatttagcagagaagggtcatgatgttggcaacttggtctcaaatggtttggggaggaaaaatatgcacacataaatcaattaatcgtggcaaaacattaacaattgttgtgtctatatgatgggcataagggtgttcacgtgcaatgctgttgagctcagagggcattatgctgagtgaaataagccagacacagaacgggatctcacttacatgtggaatcttaaaagtcgaactcataaaatcaaagaatagaatggtggttgcaaagcactgggaggtaggggaaatggggagatgttggtcaaagggtacaaactttcagttattgaggatgaataagggttaaggttagggttaggatcgagtacaccttatatttatataattttatttgtcaattatacctcaataaagctgaagaaagccaccactaagaaaacgaaaagagaagcagcagaccaggagaaaatatttgcaaaaccaaatctgataacggacttgtatccagtatttgcaaagaacttctaaacttaataacaacaacgacgacaaaggagcaaaatccctggtggtctagcagtgaggattaaaaaagaaaagaagcaaaatatatgaacagctgtttctccaaaggagatataccaatagctaataaaatatgcacagatgctccacaacattagtcattagggaaatacagattaaaatcaccatgaggtactacttcacacacactagaatgactaatcaaagacagataataacagaagttggctaggatgtggagaaacagaactgctatggttttaatgtcccctctaaaacccatgttgaaatttaattgccatttgcagtattaagtagtgggacctttataaattacccagtctgtggtattctgttatagcagcagaaaacaaactaagacaagaaccctcatacattgcaggtgggaatataaagtggtgcagcctctttggaaaacagtttggaggttcctcaaaaagttaaacatacaattaccatatgacccagcaattccactccctaggtatctacccaagagaaatgaaaacaggtactatacaaacaaagacttgtgagtcactgttcatacagcataatccataatagccaaacactggaaacaacctaaatatccatccactgatgaatgaataggcaaaatgtgctctatccatgcactggaacactattcaccaacagaaaggagcaaactgctgacgcacgctgccgtatggatgaacctcaaaggtgggaaagttcaagaagctaggcacaaggaactgcgtattgtatgattccatttatatgaaatgtccggaaaggcaaatttagagaaacagtaaacagattaatggctgggtctgaggtgggaacatgattatctgtaagtgggcatcagggaggaatattcctgggaaccatgagaatgttctagaattgatctttaattaatttttgttgtttttgttgttctttgagatggaatctcatgctgtcacctgggctgaagtacaatggcgggatctcggctcactccgacttccacctcccgggttcaagggattctcctgcctcagcctcccgagtagctgggattacaggtgcccaccaccacgcccagctaattttttgtatttttagtagaaacagggtttcactatgttggccaggctggtattgaactcctgacctcatgatccgcccgccttggccacccagattgctgggattacaggcgtgagccaacgcacctggccctttaattaattttttaagagatgggatcttgctctgttgcccaggctggagtatggtggtgtgatcctggctcactgcagcc

SEQ ID NO: 45483 - DNA, 2352 bp, Homo sapiens
tcaagtgaaacacctcacatgccacgtggagggccggctccgacgctagcggcccggagaagcccagagcaatactccatcccaggctcctcacctaggacctttcgtgattcctgcctcctgagccccacctccagaacttctgatgtcactcacctggggtaggcctgggcatgtggaatttaaacatcttcacaagggtcccaacatacagtctcagggctgcaaactactgacttaaagggttatctttcatgcccagcatatattatggagagaaaatagcaagtcaaggaatctgcatggtggttggcaaatagtaggtgctcagcatatgttcactggagggttgaagtatccagcatggattccctcctattattagacttgcccttttccatgcttattttctagctttggcattctttactccaagcttgtatgctttttttttttttttgagacgtagtttcacttttgttgtccaggctggtgtgcagcctggacactgcaggctcactgcaacctccgcctcctgggttcaaacgattctcctgcctcagcctcccgagtagctgggattacaggcatgctccaccatgcccagctaatttcgtatttttagtagagacagggtttctccatgttggtcaggctggtctcgaacacccgacctcaggtgatctctccgcctcggcctcccgaagtgctgggattacaggcgtgagccactgcgcctggccgcttgtatgctttttaaaatcaataataatggagatgatttgccagctgttcaaggacccacaggtcagtttcttttgcttccttttactttccctattcaagggacaggaaacgcccataaatagccatggaaaggaaacgcctcagtgggggctgaatctgtgagctgaagcccacagggctgagctgctgagccctccaaaaccccttcaaaagtccctaagctcggcagcctggatcccgccgtgggttgtggtaacagaaaagctggggaggccctgtgggatggtggcactggtgggggttgggggtggtcctgggttcccgagtcagctagccttggagctccactagatcactagatcaaggtcgtggagacaagtcattctagtgacctcacactgacatagccaccaggccccgcctctgggtgtttcagagaaaactccaggcagcggtaggagaacgctccaagggctgtgttatctagggtaaaagccacatgacactctgtgagggccagctcagggtccttgggctgctgatagggacaccaaggctaggctcagggtcccttggtgctggtcctaagccacacaagctcctgaattttaggaccctgaaattcatggcatcctgaggcccggctccactctggcaccgtcctgggactctgcctcaggctctcctggctagacacagagcagaagccaggtaactctacagcctaaggaagacccccaggaaacctgaagcatggggaagcgctaggaaatccctgctccagccctaagcctgttggagcagggtcctagcaactgcttccccaaccagaagcatagcacctgccaggccaggaacttaagagaaatgaaggcctcccctaatcccagggaggcaatactattatttctcctgtttacagacaagaaccctggggctgagagccatttggtcacgtgaccagggccttccctgcagaatgggcagagccaagtcccctgaccccaaagtgcaggcctcacagtgctttcagagtgcctgaatggtggagggggctgagggctttcttcccagccctggtcatctcgccccaggcctcagctgtgggcatctacccaggaaggccaggagaggcaggcctgaagaagaatctggaaggaggaggtccaccatggggcatcaaatacttcatttgtatgctgagccaagctgggctggaggccgggggcccctcgagggcaagcctctgggccgggagccaggctgacctctgcccactgaggccaggatgagtatgtccttttctgcctccctctttcttagaagtactctcagcccagtacttcctgagatttctgctgcagtgccaagcagcctgcttaacccctcacctcccactccttccgaggcgactcagaacccagaggggaagggtcagaggtgtacaggtgcccaggggttccagggaaagagagcatgcatccgggaccctggagggctctgtttcagcttcacctcttagcctatgccttaaatggaccacttcacccctcagagcctcttcagcttcaaatggagtttggcgatgacaacagcctggtaaag

SEQ ID NO: 45484 - DNA, 1307 bp, Homo sapiens
cagaccatggaaggtcacaccgtctccactgctccttcctccctgaagctcaagcaggggcttcttcccacctgggccacctgctccgtgatgcacccacgttatcttctttgtggcctgtgacaatttcctggctcgggatgaggagcttcattttgcagatgaggaaattgaggtcgaatggtttatccaagcagggaatcattcggtggtgccccaggcaaataatattatcaaggacgctttttaaaattccagcagactggagagggtgggttgtttttccacttttgggtaaggattttggacttcagcctgcaggccctgcctccagccaggcagaggaaaaggtcgcatgagagacgcagctctggttcaaaggtccctcacggagaagccttttccttccagcagccgccacggaaggccgacttacttgctcttttcaggcctctattatacttgccttttacccctaagagcaaagaaaagaggaagctgctgtttgctttctggaggcccaggcaaagtgaaaataggagcacccatgagaaagatggtgactcattccctgacggagggaccaggccagctagagcagaggggccttgggaagacctgggcttttgttccttttgggaccaaaatgaatcactgatctcattaagtcacaccggccagtcccgaactttcccgggtagaaccactgcaagcatcaaatcttaggtgaggccccatcaatggtcatgaacaggagcaaaaaggttgagcttctcctcattcaaaaggccagaaaagaccttgttctccttggagcaaagtggtaactggacccagaagaggaaggtcaggcacgatgcctcgaacaaggccggtcagcaaggtggtagccccctacctaggcacactagtgctttgggacgccatacaacacacccactcatttgcccatggattcagacagggagtcagcaagcattgacaggacatccagctggtgccaggtgttctacatgccatctcttctccagaccctgcataagaggaagaggagcctcattccacagacaagaaaacaaaggtggctgggcgcagtgactcacccctgtaatcccagcactttggaaggccaaggtgggcttatcacctgaggtcaggagttcgagaccagcctggccaacatggtgaaaccctgtctctactaaaaatacaaaattagcagggcatggtggtaggcacctgtaatcccagctacttgggaggccaaggcaggagaatcgcttgaacccaagaggtggaggttgcag

SEQ ID NO: 45485 - DNA, 6498 bp, Homo sapiens
agtcttgctctgtcacccaggctggagtacagtggtgccatcttggctcaccgcaacctccacctcccgggttcaagcaattctcccgcctcagcctcccgagtagctggactacaggcgtgcaccaccatgcctggctaatttttgtatttttagtagagatggggtttcaccatgttggccaggctggactcgaactcctgaccttgtgatccgcccacctcagcttcccaaagtgctgggattacaggcgtgagccaccgtgcccagacgaggttgagatctttactgcttggtcttctttgaccagacatggctattatcccctctctcccccagtttccaaggttccaactctgcctgttttcagggcactagggagcttgcctcccagaaggagtgagagcgagggtggacacccaaaggccctctgcctggctggttgctcacacagctgtctttgagtgaagcgtctggcccacagtagacatccataaatgtgtgttgcctaaactcaactgaacccttagtctataaattctgttactttaacttgaaaaaagtgatgaggaggtcttatctgacagtattcatcctgagctatagagatcattctagaaaatttcctaccgaatgttttcagctagaaaataagctcactggaagcccccaagcccatgcctgtcccttacttccttcattcaatgagcattgatcaagattgctacccagcacttgatgttgtaagaaatgcaaaactgtgtaaggcttcaagctgctaacactatagaaaggacaggaagtcctccagccatgggtcgatgtctatggaacatcagctatttgctcccagatattgattacttacagtgcaacaggaaacagaacacttcgtggagctcatagtctccagcgggggttgacagacatcaaaaccaaaatcacagccccaagcgcaatcatcccaagcccccatcacagtaccaggcaccccatgcaaacagctgcctttcaagacactcgcttcagagttgggctcagctggctagcacctcagctgcatcacttactttgtgtgaccttgagcaaaaggtataaactccctgaggcttagtttcattttctgtaaaatgtaaataataatcactttcttcctggggtcatgataaaaatgaaaagcaatgacccaagtagctggcatatcattattattattattattatcattatgataatgaccatgacaatataataaataccagatgaatggcacagaaatgggagagggagggaatacttcttcctggagagaggatggtatgaggataattttcgggagaaggtgggtgttggtgctgagccctaaaggaggggttggatttctatacaaggaagtggcgaagagtgaatcagttcaaaagtagaaaaatgaatgattcagaaggtcattaaaataaaacaaataaagaatctaaaccaaatgactgggttccttaaaaataggacattgcattgccaagctaagaagcattagtcaggcggaggaggtggctactgggaaatttcacccagttcagcattattgagaagttgtgggttcctgaagccttcagtgggcgttgtgcaatcctgaggggttaaggtaacccaaaccctggtccagggagtgaaagggaactgtataggttggggtcaatattagaaaaaagctccttgaaaagcacagtggtctccacggaaagtggttaagtgtgttggaggagtctggggcggttctacgggccagggggcatctgtccggggagccatgacagagaacatctggaaggcagggactgtgcagcccggggtctgggtctgacccattcattctccctgcagtgtcttgcagtctctccttgcttctctgcgcactcttctgcgacaggcacactccaccttccctgtccaacgggtggggcttggtagacggggctcaaaccccagctctgccactcacttgctgtgtgatattgggcaagtcacctcacctctctgtgccttcattttccatccataagaagggtgatcataataggattatggtgagaaataaatgaaacacgcctgacacacataggtcagaaaatgttagttccagcaccttctgttctcctccttgtcctggcctcatcctctccttctctacctattctgatgatttcttgctggaggtgaccatggattctattaggcaaataattgaacacctcctgtgtggtgtcctgccagacaatgacaaatgtcattgattcatttgtgtcattccacttacattaacaaataactataacaggatgagcattgttcttagaatgaaaacaaaaatatgatacacagacaaagggacgaggggcatacagagatggaaaggaagtggccagggactgggaagggaggagccaacatctgcagtgcccctgttgtgtgctgggcatggagaaggacccccaggatcaagagaagaatggagcccagcctgggctttggaggtgccacggcgcagtgcgagacagacgcgcaagcctaaatgttgggggtcccaggaaagactgtggttttactgtcttgggtgagctggggaaggcttttgagaggaggtgatagaggagctgggtgctgaaggttgagtacttaccaggaaaggcatttgaaacaagaacaacccatgtgaaggccgagcggcatcaaagaacagagtatttgggaaatagttgggtgtttctttagagtaagtgaaattcaaccttttcatttagcataggaacagacacagagtaagtgctcagttaagtgattgagcgtgggtccagcacattggtactgttagatcgtccatcaatttgcccccagctctaagcctatattcctcgggacagccccatcatcttccaggatgagggcagcctcagggtcagagggaggagagaagtgagctacaaacaaagagaggcagtggagtgggacaggccagggctcgcttctcaggggcctgtgcaacgtctttcctgcctggggccgaatgttctgttcccttccccggacagaacccgaaggttgagccagcccgctgacccgggctgagctaacgggaaagtgggccgcactgggccccaagtcatcagctcaccctgatgagccaggccctggagattccaccagccccaggcagcatttagagaagtactaggccgagtcatcagctctgtgcagtcactgcctgctagggctgcgcagggtgagtggggaaataaacagattgcggcactgagccgtgggaaccaagcgccggggcactggagctctctccctgggtttgttaccagaagatggttatgtaatcagctcactcatgccttcaacaagcatgtattgagtgccgactgggtgccaggcactgtttctaggctctggaaatatagctgggacagatatagagaccctgcctcaggaaggtgacattctggtggccaaacgcatgcgaacactgtcctcccgcattcagtgagtgtttaccggaagccaagctctgtcccaagcactgtgctgatgatatctcatttcatcctctctgtcactgtaggaggcaatctttattgttatcccattttacagaacacactctcctgccttaagaacccaccagcaagaacccccttccccacatcttcccatggtccttctcatccttcaggtcaaattgcttctcaaaaggcagtgagggccaggcacggtggctcacacctgtaatcccagcactttgggaggtcgaggtgagtggatcacttgagatcaggagctcgaaaccagcctggccaacatggtgaaaccccctctctactaaaaataaaatgtaaaaaaattagccaggcatggtggcgcacacctgtaatcccagctactcgggaggctgagatggagaatcacctgaacctgagaggtggaggttgcagtgagccgagatagtgccactgcactccagcctggatgacagaatgagactccactcaaaaaaaaaaaaaaaaatgcagtgaggtaaggtggggcacaaatggtgacaacttgccttactctcagctcttggtgatctaatgggtcaggaacgaggggcctagcatcctctgataacagtcaggccctgcccacccaaagcactctcctgaactcactggaacttagaactttcaaatgctgtcagagccttgtaatcatgccttttccagcattccttaatcatcattactctgggctcaggcatttaattgctcatcagtttcttcatactttcatgaatggagaatttcttcattctttcagggcgagtacagcctttggtcaaattgtgccgtaggtgagtactccccaccgcaccaattctacccctgccccataactggtattctgccatatgccttcacttactcacatgagccctgctgtgtgccaggaaattgggtcaggagccccaagggaggcagaggaagaagcagccaccatgatcaggggccagagagaaggtggcaccagggaattggtgagcccagggatcgtgtcaccccacagggctaagaaaaacattgcctgccatcagctgcatctggaaggctaatagaagtcatccaggttcagggctgtctgggaagagaggagtgaaaggacatgtggcctttggggaacctggacatagccaggggtgcaccacaacatctggggagtaaaggggcccaggcagccaaagggccagcaaagagatgagggtggccaaaagggcaaactcatgggaggtcttcagattgggattaagaatttaacttattcattcaagaatgaattcaagttgttgagccatatttctgatctaggaactgtcctagaccttagagacttgactacgaagaagaaggcaaggctcctgccctcagtggagtctacctggtagtgggagagttggagccagactgcacctgctcacaagaacaggttgttttagattttcaggaatttggacagccatgtgacatcactttggtagtttgaaattggccacagtgggtatgtttacaccacagaaattggcagacgctgtaaggcagcctccccactacccacaaccatcctgcacccaaaagccgatgttaaatatttgccaggataccactaggggatatagacaataaacaagtaggcagataggcaaatgtggtaacaatagattgtacataagggaaaaaatcagcagggccttatggtacagagggactgatgggatgggggtgaccagggatggcttccaggaagtgaagtcacctgaggctaatatttagatcctgaggaggaaggaatcagacttttattttgtttgtttgtttgttttgtgtttttttgtagacacagggccctactttgttgcccagtctagtctcaaactcccgggctcaagcgatcctcccactccagcctcccaaagtgttgggattacaggtgtgagccaccatgcccagctagaaccaggcttttgaagaactgggacagtgttatagactgaattgctaccccctcaaaattcatatgtggaagccctaacccccaatacttcagtatgtgaatgtatttggagataaggcctttaaagaggcagttaagttagaatgagtcatcacagtgggccctaatccaatgactggtgtccttataagaagaggagattaggacagacaccaaggatgcgtgagcacaaagaaaagaccctcagaggacacagtgagaaaatggttatctgcaagccaaggagagaccaaacctgccggcaccttaatcttggactctcagcctccagaactgtgaggaataaacttttgttgtttcactatcacacactatccagtgtatgggattttgttatggcaaccttagaaagctaatagagacagtattccaggtagatggtacagcaagtgtcagcagcctggggacatggagggaggccagtgcacctggagcactgttgggaagaggggccttgataaggtaccttttcagaaattttttttgtggagacaggatcttcctaggttgcccaggcttgattcaaactcctgagctcaagggatcctcccaccttggcctcccaagtagccgggactacagccacacaccactgtgcctggctaaagtatctggttttcatttaagtgagttggtgaccatttggagaggttttattttttaaattcatttgtgacttattaagatgacttttttcgtgatctttctaatattttcattaaaaacttttaattggtattaatatataattgtacatatttatggggtacacgtgatatttcaatacatgcagacaacctgtaatgattaaatcagggtaattgacatatccatcatctcaaacagttattatttctttgtactgggaattttcaaaatcctctcttctagctg

SEQ ID NO: 45486 - DNA, 3040 bp, Homo sapiens
atgaaatatacatataaggagtatatatgttcaggtccaccatattgccagaacccagtgtctcaatcacatagattttactgctgttttcctttagagatggaggagggtgttgcaccacacaaggcccatcaaggcttctgaaaacttcgcttaagtgccccttctcttttccccaagctcctctgtccacggcatccctgacgccccaccctgcgctgtctgtcaaacgcccctcccagctccgcagcactctggccgccttgcttctcctttctcttcctaacatttccaaagctgagagactgagaactgggcaaaacaaacagtgggctgagggccaaactgggatgctacggtcctccaggacttccctgggggcctgctcagactcacaaaaaactctctacaggtgttaccttggggaaggctcaggggctttagcttaccacttgccacccttttgaacaatttcttccttggaggtatgtcggttttagagagacagtaatcatacccccacccagacctgtcactcccagtttgggacacagggaaagagagcaaaaggaggtcctcgatccctgcctaccccttcccttcctgcccctgatccagcctctgggaagctgtgtggacagcccagcctgaacttgtcttgcccgcactctcacccctaaagctgccctttggtcatccctcagccctaggtctactcttgttagatcagatgtggaaagaggcctaggtaggccctggaaatagatttggggatattttagcagggaattatgtcctgggtgcccagagcatggggtgtggagtggcagaacagaggggaggttaatactgcatccacccaatgataagattaccagcatctttatcctttcatcacctcttctgtattctgtattttcttttctttcttttttttttttttttttttttttttttttttgagatggagtcttgctctgtcacccaggctggagtgcagtggcgtgatctcggctcactgcaagctctgcctgctgggttcacaccattctcctgcctcagcctcccgagtagctgggactacaggcgcccgccaccacgcccagctaattttttgtatttttagtagacacggggtttcaccgtgttagccaggatggtctcgatctcctgacctcgtgatccgcccgcctcggcctcccaaagtgctgggattacgggcgtgagccaccgcgcccggcctgtattctgtattttctatcaagcagaaccctgatgatctttgtgtggtctccaaattgtgcggccacatttggaggaagcgagatgactacacagtgaagcacagtgaaggggaggcctgaggagccacgaagaccggtagcacattctggattttgtcaagtcttagccgggtgccctgagcaagtcccctcggctgtcttgagcctcagtctccttctctgtaaaacaggaataataataaccacgtgaatggcacagagatttttaagatgcagttattactattttttaaacgtcaattgatgccaggaatattctgccagccctccaagggtggtttcagcaggcttacttcctggtcataatcacttcctccatccccggcttctgtcatgctcagccctgacctcaccaccgacccgccctgcccctcccattagctgcgtcaccactgcctgcccccacgtttagcccagcccccagcccagatctcagccttgggtgaaaagtgtcagcccgcacactttctgttttacctccggccgctcttttaacctttatcctttccctgccccctttcagaccctcttactcacctccacagatgacgtgtaaaagagctcaaatcagtgtgttacctttcctggggttattttctttttaaactgaggttttgtcccttggtgagaaagctggggtaccgctgaaaagaaagccagcctgggagcaagagacttggatttaaatcttgcatctgtactttctagttgtggggtctctgatgagttactttagctctctgaacctcagggtcctcatctataaaatggaagaatgtccaatgctttgggaggctgaggtggggggatcgcttgagcccaggagtccaggaccagcccgggcaacgtagcaagatcccatgtctatgaaaaaaacccacaaattagctgggtatgtttgttcccacccatagtcacagctacttgggaggctggggtggctcgattgcttgagcccaggcgtccgatgttacagtgagctgtgtgatcacaccactgcactccagcctgaatgacagagcaagaccctgtctctttaaaaaaaaaaaaaaaaagagagagaatgaatgattgaacaatttctacccaacaattttgtatatcgaaccaccaacatgtgtaagacacagaagaggagtttggtcagtgataggtatgtaaccgcccagtgggttcatctcgtctgctgcccaggggaatggaaatagagacagagtttatacacgcagagcctgctgaacaggaaaccggagtttcattattgtgcacatcagcctcccagaaaatttggaggctagggttttttgaagatagtttagggggctagggtatgggtgctgctgactgggtggggatgcaatcgtaggggtgaggaaaatggtcctcatgtactgagtccacttctgggtggaggcctcaggactggttgagtggagagtcaagggtccaggtagggccatccagttgtcagaaatgcaaaactctgaaaagacatcttaaaaggcctgtcaggcccaaaaccctaaattcttttttatcttttttttttttttttttttttttgagacggagtcttactctgtcgcccaggctggagtgcagtggcgcgatctctgctcactgcaagctccgccccccgggttcatgccattctcctgcctcagccaccacgcccagcccctaaattctttttttatttgatttttgttttgttttgttttcttttcttttcccag

SEQ ID NO: 45487 - DNA, 7814 bp, Homo sapiens
ctgcctcccaaagtgctgggattacaggcgtaagccaccacgcccggcccctaagacagtttttcttcttccagcgtggcccagggaagctaaaagattggacacccctgccttagaagaatcacttgcaaactcacccacaggggcttttccttagggcacagaagccacacacagaagccagcttatccagggtgactgatccaagagatagcaagagagtgtccaagacagaagtcaccatctcttgataacctaatctcagaagcaacatgctcatcacttctgccatattttgtgcattagaaatgagtccataagtccagcctacacttgaagggaggaaattacacaagggtatgaataccaagaggtgggttaattgggacaatttcagaggctacctgccacaggtaaggtattattatccttcatttcatacctagacacccagctagttaagcaactggtccaggtcacccagcagagagtgatctgagtccaaagtggttttctatttccccaggctggcggggggtgagatggaggaaggcagggagaagttactggtaggaaaaaaaaataatgaggatggagtctctgttatttatctactgctgtgtaactaattacccacaacttaatggcttaaagcaaacatttattatcttatagtttctatggatcaggaattcgggagcagctgagctgggtgtttctcagggtctctcaagaacctgtggttaagctgtgggctggggatgcagctttgaagccctgaccggggctgagccgctacttccaagagagcccactcacatggctgttggtgggaggcctcattcctcaccgaccaggcccctttataatcgtgcttgagcctctttaggacaggcagttggcttccctcagaacgagtgattcaagagtggctaagcagagcctcagtcttttgtgacgtagccacaggagtcataactgtcgtttctgcaatatcctgttgattacacaggataggtcagccctattcattgtgggaggtgattctagaagggcatgggaataccaggagatcagggtcactggaggctggctacctaccacaggcttccacaagattgataatccgaaaacttaacttgtattgttgttccctgctcaaagagacccagagccttcccacgtactgcagacacaatctgattttcttagctccatctcccactggctcttgagtggatggaccatctgggactgacagcctggtctgctcacagacctcaccagtcccacagcggaggcccatgttgatacctcccctcccatccgctgttctgttggtaaggcctgcctccgtgggaaggcctgcctccctgggaagcctctattcaaacttcaacgcatagttagtgcatccccagcatgtgcagggtctggctggatgctaggatatgatggtgataccaccttgtctcagggaactttcctttttttttttaaattatactttaggttctgggatacatgtgcagaacgtgcagttttgtcacacaggcatacacgtgccatttgtgtatggcatcattgtttgtgtacccatcaacccgtcatctacattaggtatttctcctaatgctatccctcccctagccccctaccccccgacaggcccctctcagggaactttcactcagatggggtagtagttactagcgaattaataataacctaatcacacgtcatgcccagttctcccaaggaaacctacaaggtaccatgcgattatgtaataggggactggcctagtccatgagcattggggcagtcaagtagctagccaggctgcataggtgtatcagcattgggtttaggtgtaagtgtctgaaaatacagaataacaatagcttaaataagatagatgtttgtttctcttgggcaggtgtttgaggacaggtattttgccacttagagacaggaactcaggttttttttttttttttttgagacagagtctcactctgtcgcacaggctggagggcagtggtgtgatctgggctcactgcaacctctgcctcccaggttcaggcgattctcctgcctcagcctcctgagtagctgggattacaggcgtgtggcaccacgcccggctaatttttgtatttttagtagagacagggtttcaccacatgttggtcaggctggtctcgaactcctgacctcaggtgatccgcccacctcggcctcccaaagtgctgcaattacaggtgtgagccactgtgcccggcaggaacttaggctctttttgtcttgttgctctgctctgtggtggcctccaccttatggtccaggatggtgacgcctacattcctggcagccagatggagaaagggacacagagggtaaagcagacataccaactatcccagatgccccacaagacacttccctttacttctcaatgccacatctagctacaaaggaagctggggaaatgcaactttcactgtgagcacccacatgcccagccaaaagttgggagctctatccccactcgaaaagagcaatgatagtcaaccctgtcttgcatttactctgtgccaggcatttgctgaccttggatatcatcccaaatgcacacttgattcagtaggtctggcctggggacaagagtctgtcctgtgatggccatgtggctggtctgtggaccacagtttgaggagggaggattcgaggtcaaagatccatcattgcatgtttcctcccacacagggccaacgaatggctgtttggaagcagtggctgctcaagatcccttaactctccctgctgtccctaggtttccagttcaggctgagatttccttttctcccccaacagtgtcagaccactgacactgaatgaatgaatgaatgaatgagtgaatgaatgaaaagggaacgcagaggtcaggtcccggcatatgctctaggggaaggctttggttcaccacgtcaccctaccccagaccccgtgctagtgttgtcccttctgaatcctcccggaggaaccagcactgctgttcccctctatttacacagggggaaactgtccattgactctgcttttggaacccgagccctcaccattctcccctgggttttttgaagccctgtcccaccacaaccttggagaaagggccagtgacagaacctcggggaagttcagagtgagtttcccctactcaggtcttgtgtgacctcaactaccatctcctctaatccagcagtcacggaggcagctgctctgtattcctgaggaggaaactgaggctctaagaaggagacaatcggcacagtccacgttggccaagtcacagtgcaggtcccatctgcctctgccacaaccctgcatgttctcgatggacctggttcagagcagatgctctgtgaatgcccactggagtgaacgacaggggcagatggaagcagggacagccactgccagcctcaatagtttcaggtgcctggcactgtgctaagccagtctcctgtttctcagctgatccccaggaaaaccccctcaagtaggtgtcatcgtcctctttgtgcagatatgcaaaaggggcggggcggggggggggcgctctgagaagcccagtggctttcccagagagacacggcaggggcagaggtgagtccaccttaacagcctaggatggccgacctcttcccttcccccacagtattaggccctcactcagagctagacgctgtgcacggccaaagtctgtatcaccccgccccccgcccccaactcaatcacagttcagtgaaactgtttacaaatgcaaaaaactgggctcggagaagcagagaatttgtccgagggcatccaaagagatggagaaggaaatctaagtgggaggcttgaaggaatgagtactggagtctttgggggactcccttcccttccgacagcctcgactctccgccccttccctgcctgcccgcgggcccctttaaccgggtggcggaaggggcggccgggcgggcggcgcccaatgggctgcgcggagcgtcacttcccggcagcgggaggcgagtggcgagtggcgagtggcgagtgtcaggggggcggccggcgggggcggggcggccggaggaggcgttggcagcgggctcggacccacgcggcgccgcggcccgcctggcctgcagcgctcccacccccggcggcggcacgatgccctttgacttcaggaggtgagtgtggcgaccccggccagtcgggagttccctcagcgggcagagggagcgccccggcacgccgcggacccctcccgccctgcatgcaaaagcggctccccgccctgtgcatgcctccgcaggcccctagggaccccaggcgagccccccccctgccgcacacgaagccagccagagccgcggaggccccctcgtgcagcgggagacaaatccacccaccttccctccgccgagccccctccccagcctgcccggataccttgcattcccctcccccacactaggaaacatttcctccctcctcccagatgggaacagcccataacaccccagcatccctctcctccctctactgagcctccttggtggaccccacctcagctgacaggtggggcagggcacctggaatgagtccggaggggcctggggccccatgcagcctgccggcagctggagggttttaagtttctatagcctgaggctcccccaggccgggcagatcgggaggcctgcccccgcccctccctccctcagccccagccctgtccgctgggtatgggggcaccatgggaaggggaggaggcgccttgggcaggactctgcagaagggccaccggggtctggccttggctttctgcagtcaccacaatgggtcctttgtggggtccagctgcctcatggtctaggttgcatggggcattctggaagcctgcgggggaagagatctccaccagaggttcccttgaggtgtggagccccaggggatgtcctggcctgaggcagccacacttggtgtctggctgggaaaagagcagggctttaatgcagggaggagctggattagaatcctggctctgccctttctactgaacagctcggtatattctagaagttaggggcaaaggctctgggttcagaactccctgtcgccgctcggctggctgacctcagcaagtctccgagcgccctcagtttcaccacctgcaaattggggctaaaaataaggtctccgcttgtgacgactgagtgcgtgaaacacccttagcagagtctggcatgatttagagctcagaaatagggcattagtggatggggggtgttctccaggaggggttttccacatccacaaaatagtgattcagatgcctgtgccacaggaggtatttcttcccctcttcttgcatgtgaaggcagtgtaaagtgacagtctacccagagagaaaggcccttagcctgccatgacccccatagcatgggatatattggggtttaggcccaaagaggacactggtcttggacctcttgattggttgacatggttttccagcctgtccgggtccctgataccagctagcaaatgtttgccggcttcttgcccctgccgggcagccctgaggctagcagacctaggcagttttgaacaaggacagcccctctggtggaattcaaggtcagtcctaatagcatcagttaagtctgggccataagagctgtggtcggcacatcaatttctggttccacaaagcctccccttacccaggccaaccatagggattcgtgccaccgccgccccctgcccctgtgtgattcagtaggttccggtgattttgagcttgctggggaaattgctgtttttgatcttttaatcctttctccctgcacctcacccttccgtcttaccaaggaggaaatgaggctccagggatgagggccttatcttggactttatgggtgctaaatgggaagggtagacttaggtctcaggtcacacatggctcccaaccttgtgctccttgaattggtggcttgtgggggcaggtaagggaagtaaggaaaatgggtaaggccagctctagcctttggccttggaagggccctgtgtcaggcattgatatttaaagagagaaatgctcagctctgagaagctggctagtctggggctcccttggcatacttcaggtccctgagtgcccaggtgtcagggggcccagcttaactaggaaatactctcagggcttgggctcactgcggaatggtgagaatggattcagtgcttcacgtttgcaccttggaggatgagccatgtgtgcccagcaaacctgcactctttaagctctgtgaacttcaaggctccaggacctgggttctactgagggttcgaccatccccatgcaccttcctccgcttcagtgtgcattcatcaagcattcatcaagtgtccagtccatgctcagccctctgccacaggccccaccgtgaggaggtgggtggcatgtggtccggctctctttgcattccaagagaagggaggagggcttatggggtcccaggagtgggggtgtgcgtgaactggcacgcaaggagcatctaccactgtatacacactttggggtgcagacatcgattcccttgtcacctgagagagggagttttaatcttcattttaaatcaaaggagaggggagctccactgagtagaagccctttgctctggccatgcagtgcatgagctggtggatctgggatttgaacttggggctgttagctccaaagccttagatctgggagaaaagggagagattggaggggcccaccatcctgtcagctcttttaagaattgtggggagtggagaggggtataccgtgattagacctcctcccccagttcaaggccagggagaaaaccagccgtcctgctcgtgttccccttcttaaaatcagaagcaggaaaaatagtgcactcttgcccttccctacggatacttctgattttcttactgcctgtagagcctggtgcaactgagttctgtgttttcctgtctgtgaaatgggaatgaggagagtactcaccgaagtagaacagttgagggatgaggcagtgcggaaagcatttagacacagagtaagcgcctcatccattttggccgccatatttatttgtgtcattttatttaagcacccatcatctcctaacacattatataattcacttaattatcatgctgcttctctctccctcccattagtacatgagctcctgagggcaagaagtttttatcaggcttcttcaaggttgcatctccagcacctagaactgtgcttgagccaaactcgatccttggagatgcctcttgaaatctgtcaaggaagccatagacatgacgtgacttgatatgccagcttcagtgggcagattttcagccattagtggagaaatctcccctctccacccttgaatctgccgttcctaggttgtttttggggttaaggaaggaggcagaacgcaggggagggaggctgagctttcaatgatttattgtgtttgctttgctcttgttaaattgtttcactaatggctggctgttgcagttgtggaactagccttgtgacccacatccgtgtgtgttgtttcgagttccggctggcctggggccagtagcacctgctgccttctgcacaccagcccagggtgggtgaggagggaagataacagcatccggaagccctgtgcccaggcccagtggtgcctgagcactgccttccgggaggtgcaggtggctgctgtcccaca

SEQ ID NO: 45488 - DNA, 736 bp, Homo sapiens
gaaaataaaaattagaccagagagaaaattatgtgaaaaggccagtatttcgggtttattgaacatttgctagtgccaggcactgttgtaaggatcttactgtatcagcccctttaattctccacagtcctacaagggaggtgctgttgttaccccactttacaggtgagccagtggaggtgccacagagttcggaaacacggtcgttcccgttcctggagctgggattggaacactgccatttggcaccagagctccactgtgtcctgtaggctcatctctaaagctttctcttttccattcactaaattcagagagaactgagaactcttctaattggattcattgggtttctcttcactaatcctcacccaacagtgctcattaagaagcttaaagccatcaacttttttccccctagcctcatgtagcgtgatacctgattctgaaatggtctttaaagaccctcacaccagctaatggcatcaccctcgaggggctcagttttcccacgctgaccagtgggggttttccagcttagagcatcatgtttacctgctcgcggggacatggaatgagatggaatgtcctctcctcccaaggccgtttggattcctgactgtggtgctgtagtagcaggagacagggctttagccagctgtgtcctggttaagttacattccccatctggtaatcctttcgtattttatttggagttactcctagccagtttttg

SEQ ID NO: 45489 - DNA, 15546 bp, Homo sapiens
cgtgttgaccaggatggtctcgatccgttgacctcgtggtccacccgccttggcctcccaaagtgctgggattacaggcatgtgccaccacgcccggccacatgtgttatttacttaatattttttctttgaattaatcaggttttgaacttaacacttttactgatgaaaggtgaccttataacatctttggaaatggaaaagcaatagctcctgctgtaaattgatacaaataattgcaatgtgtttggttctcacgagcatctggtgcctggtgaagttgctgggtttgttaaaaaagagatattagcaagtgctagagagaggagatgttgaagacatagtagtgccaccctgaggctttctcgttgatattctgagcatactcaaaagagagctgaacagggaataacttttttcatggtggggtctgatgtcatttaaccaccagggaagtagggttcattccttttttccctccatcaaaaatttattggagggattctgggggaaaacaagacagacactgtttccaccttcatgatggttccaggctattggggaagatgggcagaacagcagggaacaaatcattgcacaagtggttattttccattgtgatgagtgctgagaaggaaggcaaagtagatggggcgatagagagtttatagagaaggagctcactggattagcttggctaactagtactcttcctcaaaaaagatcttcccagactgcctcttcaacctaacttgggtcatctgccaccccttttctggccgcacctttttatgacacctagacaggtccttcagatcccttggcacaattagcacagttgcagtgatttgtttgtgcagtttgtcatcttgtgtctgtcttccttatggagtctgagtcctcgagagcaggggccatatctatgtgttcatcactggatcctggtgctgagccagcatctgcacactgtgggtggtcagtaaatattgactgaatgaaggaagtagagagacagggaggaagggtccagctgagaccctcctgcaatgtggcagaggggttcacctccgcaagaatggaggacttcattgctatatccctttgtgtttggaaaatgtttctagttttctcctaagtgcatctgaaagaatttattttgaccgagtcctgaggaattgggaagtcagacattactgaggccctgcctgaaggaggggtgggtggcccactacctatcctgatgggaggccaccacgtgccagctccccttgcttgaagccatgttagtccccagaacaggagtaaggcagccgggagaagacacctgacattccaccttcactcctgcctgggcattaggattcattgtaattattcccattttgaggaaatggagaccgagagaagttgaagacctggctcagggtcatacctctggcaaagtaacaaacccaagccctagctctactttccgacccccagaaagtaatgctttcagttagatcacctaaccctggaaatcttagttgcttgtttttgagttgagcaactgtgctctctctagcaaactggccagtttccctaatcacctggggccctgtgcggatccgggagagtcagattcaggtggcctgggaatctgcattttcaccagtgtcttcagtgattcttagggtcaggcaagctggggagaccctgaataagggttcccccattatgttcccagcgtaactctggaactgggtaccacaaatctttgttaacctagtaatgaccatcacaaaagcgagtgatgggactaagacttcagaaagcccttgaagatgtgtgtgctctagggatcattgttttctctgcagatgaggaagctgaggctttggggggttgagagttgggggtcacacctgcaggaatgcagctcttctgaatttgaatcccttacgttttccagttgatggcaggagtcatatgtgtcttggtgaatgttaggtcctcacatacccccaatgacagcagctgtgggtctcctctctgtcctggtgcatagcacaagacctcacccacgctgtctgcactcaacttgtttctggaaggcagggaggaaggaagctgtcagtgctagacatttgcaggggaacaggggtgggtaggtggtgatagtagaagtaaaaacattcactcagcatctctggggtatcaggagcagtgctacaaactataaatatcatcttcttctgttcttacccatcaagttggggcttttatttgcctcattttacaggtgagagaaccgaggtggcgtgatctgatctagtgttgggtgtgtcaacgtcgtgtgctgattagaattagtaaacacggaagctggaagggtcccaggatgggttcagtgtcgccctgatgtacccaacaagccaggtggcaggagctggttccacctttcgggcctgcctgactttccccaatttggcttccgttggccaagctgcaaaactgggtcacacttgaagccaggtgattggtcagagctgagttaaccctgagtcaaaggagggcatgagaaggttcgcctacccgccccctccctgccccaccccaccccaccctgggccaggcccctcacagtggagccacacaggcacgtcatcctgcttgggcctccgcctgccccacactcaccagagcatgacaagtcagccacccgggatttggctgttctagaggcactgttccatgctgccaggcagacctgggacagctgggctgagggctcgggggagtagagggaggtgggcaccgtgtagtgcggagaggcctagggctttggagtctggtggacctgggtgctgatcctagtgctcccacccactcgctgtgtgtccttgggcagctcacttcacctctctgagtctgttttctgctacaaatggggatacaaccctgaccccaagcagctgctgtgtagagttaacaagagcctcatatagccctaggtcttatttcagtgtcgaacccctcttttcttcctgcatttatgaaatttcctgacacatttggtcttctaaagcggaggttgcaaactggtggcatcagaggttgagttttgcccacaaatgtgattatttggccctcacatttttaaaaaattgaattttatgtcagcatttttgaatgaaaatatttcacataaaaatttggatttccagccgggcacggtggctcacacttgtaatcccagcactttgggaggctgaggtgagcggatcacttgaggccaggagttcgagaccagcctggccaacatggtgaaactccatctctactaaaaatacaaaaaattagccgggcatgatggcatgtgcatgtaatcccagctactcaggaggcttaggcaggagaatcccttgaacccgggaggtggagcttgcagtgagccgagattgcacaactgcactccagcctgggcaacagagcaagactctgtctcaaaaaaaaaaaaaaaaaaaattaaaaattcaggcacagtggctcacatctgtaaagccagcactttgggaggccgaggcagccggatcacctgaggtcaggagttcaagaccagcctgaccaatatggtgagctcccgtttctactaaaaatacaaaaattagccgggcatggtggcatgcaccagtagtcccagctactcaggaggctgagacaggagattcgcttcaaccccggaggcagaggttgcagtgagctgagattgcgccactgcactccagcctgggtgacagagcaagactccgtttcaataaaaaataaaaaaattggatttccaatgcatctggaaaaatggacctcagtggccacatggcagcccagggctgttgctgggcagacctctgggaccttaaagcgggagatgtgagagccaggatcaggttgcaggcctagacagggaggtgggggggtatggtcacctcaggggcttcaggtgcccgaggacccctctgagacatgaggacagtcttccagtgtgactgacttaattccatctagtgaggaggtggcttttagagtctggatgcccctgggtaaaagggctccacttaccagctccttgggccagtcactgacttgtctgtgccactttctcatttgcaaaacaagagtaatgcgttgttagtaagcaccatggtaagcactccactcatgtcagcagctcatatgagtccatcccaagtaggagatttgcccgagatcgtctttgagagatgtctttctaaaggttcctggagagacaggcctgtgtctggaaatcccaggcagggactctgacggtgatcaggcctctacctgtcaatgggtgaaccagccaaaaggagaccgccaaagcatcaggtgcattgccaggggcattgccatgatttgattgggagggagtgtcagtgttgcattttttgtacccccactttgagccctgtgcttaaagacaccatcaaggccatcccctgatggtcttgggaatggatagagctgaaaagagtgaggcccagaggcagcttttcgttttccaaaacgcaggcagggtctgcccaggtgccctctgtgggcttgttagcctgcaggagctggtttctgctggctgatgttaagtcaaagaggtctcctggctctaactcagacacttcctcatacagtcttcttagtgggcttcctgctgacagtggatgccagggacccaggcagggaggtctcccttttgaaaggggccactggcctttgggaaatagtagagaccagtgattaagagcttgatctccagagcccctcataggccgtcagtgacatgagagcagagaccggctcagccttgttctctaccaggtccccagggccaaggacactgaaagccctttttaaaaaaagtgttgaatagtaaatgagcagggtcttcctcttgggtctgaacctcagctctcctacttgaagcctctcttgacttgccaacaacttaccgtgtcatcagcggggatggtaatggtaccttcctcctgggggacagtagagtttcagtgagataacgtgtacatcactcagcatggcacgcagccatgcgacgtgctcagcacatgtggctgtgatgactgtttggtttgcacaggcatttctatgtgtggaccttgacgcaggttcccacaaaggactctggccccatgggtgacggtgtcacagctgtccttttggaatcttcacctcacctaaactccctggcagtaatagcccaggggagagagggcatgtgggtttggccaagggaggggatctctggggaaagtcaccctgtttgtccaagaagcgcctgtgtgtatgtgtagatatgagtgtgcaaatgtgtgaaactgtgtgttcatgcctttgctgcaggcccacaaggtggtttaccacgtgctgttgttgcctggaaaggtattgcgcaggatgccatgtggtatgatgtccctggccccagcagccccagtgactggtgagcggctcctaggtctgctcctgcctccagtagaagcagccacaggagtcctggccacagcccccattgcggcccccatcgtgctgggtgctggcttttggaaatccctgcatacccgcaacggctcccgtggtgggggtggaggtggaggagctggtcaggccacccagaggcatcttcctcagtggagccttctgccaggtacctctcagctgttttccaaatgactacttagcatttccctgcctcgatccccacagcagccctgtagggaaggagtggcccatttcacagatgagaaactcgaggcttacagagtcagtctgcgcaactggggctgggggcaatgtgctggttaaaatgcagattcccatctccccccgccccggaggatgggatgtgggaatcagggtccaggccttggtgttctaagcagcctctccaaggagctgcgttgtcaggagagtgggaagcagaagcaggagccttgggccttacagttctgggagtgtgctctggccctgctgtttgctcagttggggcaattgcatcagcttcctgggcttccttcagctttctcagctgtgagctggagagagtggtgcccacctccaaggggcctggtgaaaattccatgatcagttcgtttatctcacttgggatagtggaattcctggagagttcaataaaatggtttgttgctattgttccacatgggatttactacaaaagcaatttcagaaacatccaaaaagatatccatgtgcataattgacagtagtgtatctgctcatctccttcgaagtgggagtttcacaggatggtgaatcagggttgctctacccccattttagagattaaactacagcaggcagggcaaggtggctcacgcctataatcccagcactttgggagaccaagacaggaggatcacctgagtccaggagttcgagaccagcctgggcaacatagtgagactccatctctacaaaaaaaaaaaaaaattagctgggcatggtggcctgcacctgtggtctcagctactcaggaggctgaggcgggaggatcacttgagcccgggaggttgaggctgcagtgagctgtgttcacgccacttccacttcagcctggacaacagagtgagactgtctcaaacaacaaaaaaagaaactacagcagacccttgaataatgttttgttataaaacattgatgagaaaaaaaagtatttcctggctggggccactgtctgttgggtttgcacgttctacccacgtctgcgtggctcttctgcaggcacccccacccacctacccacatcccaaacctgtgcctgtcaggttcatcagcacgtccgcatggtcccggtgtgggtgagtgtgggtgtgtgggcgtgtgtgccctgcgatgggagggcgtgctggccagggccggttcccgccttgttccctgagcagctgggatgggctctggccacccgtgacttggaactggaataagtgagtaaacagtgatcttacttgttttgacaaatctttcttaagtgtatgtacagctcacatgtattttaatgtctaatagtagaagtgttttgatctttatttggaagtttggtgttgtttttgtgaccagaaatatgccttaggaacttaagtcttgtttatatccattagcctgtggggaaattgtttttcatcttctgctgtttccctcaaagtcatggtttccaagaacctaccaacaaccttaagtgaggccttgctgtactgaggggccacctgggactcacacaggtttttagctaccagggttctggggctcctgaaatggactcagctctccttcagacacctacctgggctgtgttcccccaacggacagtggtggatgtgggttgggatgtcacaggtcactgcaccacctaccacctccctggagtggcatttcccagaacaccaggacacactgccgggtgggaacaatgacgctggtttccaggagagcagtgggggtgggagaggaagcatgcctacctgtcttccatacctgatctggacccagcaaacatggccctgaggtgctccacgccccatacctctctgctgggggctccacccacagcccttctgctgagatggtctcgggcctaaccaggacctcgctggcccatttgctcactcagtcatgtaagagatgtctgttgcatgtttactatgtgctgcgccctgtgctgaggctggagtacctggctgaccccacagacatggtccccactgtcatggggcttacacttaaacagggaagatggacagttggaggatcaagagttttcccagcgagaatatccagggaactctggggatgttctgatccagccttgcgtggggtgcgaggaggtcctccccacgatgttcaactcaaggccttagtgaggagcagagctggtttggtgctggggcagggagccaggcccgtccagcacgtggtacactgatgagggaatgcaccaggcaggcagagccttcgggcacggtgaggagtgtgccctgtcctcagcatagagaggccacgccttgtgttggggagccaggttccatgtgggctgtgagcggcccactcagcctgtgcttcagaggctggcctgggtgcagcccggcgggggccaggccagcgactgtcagctcctgtggcgtccagtctttttgccaagaggcctctttaattcacattttccacatcgacttgatgttttgaaaatgtcgacctttagttcatcaaatgtcacttattaaatcataagtcacatcccattcaattaaaaaaagacaatggactggtgactcagtgtatggtctcttggcaggagagaccctgaagcacttgaggccagaggaagacatgcgccttgtcagtgatccctgcatccctaggggtgggcagcacgtcattcctgtgagaggctggactggagagagagactgggttggcagccaggctggagaagctgtgaccagcctggaacgccaggcccaggcaggtggacttgaaacttactcacaagaagcaaagagccctgttggaaaggtgaggtttggtcagtcaggccagagaggagtcaaggccatgcatggaacagtgcttgactggaagagaagcaaatggcaaaatgtgtacaggcagggagtgaatcagggtgcttcctggaggagggacacttgagagatgagttggagtgaagtcagtagaggtgaagggattctagccaagggctctgcggcctgatgagaggctaggaggtgggaaagagcgggggatacaatgggcaggtgagatggggctgcctgtgctgcctcaggcactggggagccctagcaggttcttgagcatgcgtgttgctcaggaagaaaaataagatcaagtgaatgtaaaagctccctacagcttagaggagggagcaccgaaagtcttttggtatgggttagaatggttcccaaaggctgtgaggggagggttctccctgctgagatgactgcgccttatcagaccttcatggagacggaagacagactgtggagaccaacctgagaatggattgtagccttgccctcctacccttgcacctcagtatccctatttatgaggtgggagaagcagtaatctgcctcacggttgtgtgaaacgtaattaagccgtgcatacaaaatgcctgaagcatactgcaggcctgtagacagcactggggtagccaagggttggggcccctggaaaccccacaacaagaaattcacagctggggaattcaagagctttttgaaaaacagtgttggggccccaaggccaccagtagaccttaggaacatgatgtacgctgaagttcattcaaataacacggtaaagagactggccaccatgttttatgtatcttaaattaggaataaggggaacttcttgaagcctcagtttcctcatttgtaaaatggggctagtgactgcttcacagggctgttgtgaggatgaaatgaatggggctgagacgcttggcattggacgtagctgaggtagggtctcaggtgatatccctggaatggttcgattcattgccatgcaccatccttcctcagtagaggagtacacatttctgctccagtagtttcaaggagatgcttataaatatgcgttccttccttgcagacatgcctgcgggaggagacttctcttgagcctgggactcactgccttgtgtgcagcaatgaacagtcacagctctggccccaccctttgctggctttgggaccttgggcaggtccttcaccgccctgggactcagtttcctcacctgtaacaatgggctaataatggtgccccccccacccacccttaagcattgtgtgaggccaaaatgagaatagtgcacctgccaataagggctcagccatggccacgtggtcatggaacccctcctcctggggtctcacgtggccccaggaccccaggcacccctcttccatggaacttggcttcttccccgggttcttgtcttacagcttacgttatggttcctggagtgagaggagtaaaatcggtctccccatctgctctctgctttgccttccttttcacttttcatctccccaggctgttcattcgctcattcattcatacattcactcactgacacatttacaaatatttatactggtcactgtgccaggcactgcgagactcggtggtgaacggcagggatatagcccctgccctcatggagtcttgggcttcagcaattaaacatccaattaaatgtataattctcagttgacatgtgactataaaggagaaaagcagggggctgtgaggcctgcgtcttctaggggatcgggggaacctgactgcagtggtatttgacggctgtctgaaaggtgcttagggttcactgggccactgagaggcagggaggcccaggtggagggagagcatgggcaaaggccctgaggtgggaggtcacaggtcggccggctgaagcggctgctggacagagagctggggagtgccagggctggaggactcagctggccagaccatgaaagctgcataaaacaccgtaaggagtttatcctaagaagcttcagcccttacagggtggtgagcagatcctcacgaactcttgatgcgaagggaagagcggacccattccgggtctcgggcagtgtctgagcaaggggccggtggtctgcgcatctgcacactaggcccttcctcgtcagtcacacgctagaggaacaactcacaatttgcacttagtcctgaatccgggcggtgacacagaagaaagtcatagacactcggggtggggcagaggggccctcactgagtcctctgccggcatccagccctgatgattgattctaatccaggccgcttctgaggacacgaggaaaaggctgttagcataggccctactgcgtacctggcagacccaagttcatcatctcggctgaccttaccagccccccgctggcatgggtgggggtccgctgttgtccacagaaagaaaacagggctgggagcttgtgagggccctgcccaagattccaaggcccctgccagccagatgtttggggccaaagtccatgcttccctgccctgtgggtaacacgggggagattactgtttgaagtactttggacagtcacaccaggtcaaaaggtctgtgtggtcaaaagctacaaggcctgtggctgggggagctgtgctgaggacgtgattttgaggctttcttagcccagacttaccttcatagcttcctgggatctcccaggtctgggtcgtcatcggcgcccttaccggggagggctctgctcccctaaatgcccctgtgcacctgccccagccccttccctcctcctggtgcttgggtcatgtcgttccctgtgcatgccagtccccttacgtgcacatttttcctctatgatttttcctgttttgatgagacactgctcttggccgtgctggttcccaagaggggaccaggccccggcctggccagctggtcattcaggaactttgcttctaggcccagccccacacccagccacattccactagggccagaacctttgagctccgtgtgaatggggcatgtcccacccacccccaactcccatggccgcctccttatcacccttcccagctgacggaaaaggccatattccatcctggaattagctttcccccatttctgtttgcttccagactgaagggtgggaaaaaaaaatgtcctgaaggtcacagtgccgtcccaagcctttgaagtgtggctgctctcattggctccacttagcaggatgaaactggggctcagagagctgccgcaggtgcctggtgctgctggtcacttctttgccacctctgagggaatcaccttaaaggggcccctggagccctccgtagccctcacacctcatgtgctgggcctgggctggattgcagcccttgctgctatcctccgcaggtgcccttggacaggggacagcctgcccagctgtacacagtggccttggcaagaccacagcatggcccataggtggtggcttcaggatttggaagcccggtttctctaactccaaactccacagtcagtactttggggttctggattgtttgtcggctgggttagctctgttctatttttccaactgtttcttgcctttaagctgtgctttgcctacaggccttttcttaattattcagctctgccagaggtgcttctgtagaaagtacttgtcctgagtaatttcaagcttttaatcttacctttgaagaaatatttaaccatcccatgctcctatatgtttgttcatttcttattcattctttcaccgaacagcattgattcagtgccagggaggggcagggacagaggtgaacaagacatgtctccagcctcaggtagctcaggtgtgtgaggcagtgcgctcaagtgggctcatcagttccctgacggggaactagcagaggagggcaggagggcgtggagaggtatggcaaccttgaaggactttggtgatggtgatgatcatagccagccctgaatagggttctctttatgcctgcaccattctgccccctcacatctgttaacatgcttcatccccacaaccagtcattaggaacaacttacacattgggaagccaaggcacagagaagttatttaacctgcccagcgttgcctgagccagggcagagctggggtttgaacccaggcctcctggctcctgcatctgcccccctcaccactgcacctcactgcatgcacgggagctctttggatgcagggatgggagcggtgtgtgcaagcctcagagctgtgaccgtgaaagaaacagacttctctgaggctttgctgcagaatctgggccagcaggtgtctgggaggaagccacccttgggctggggccaagcatgggtcctggggtcaggacaaggagagggactggtgcttgagtccttttggagctgcagatccatggtggggcttctgaatgatcttgtgtgaggaaggagtccagggtgttagccacgcctgtgtttctttgtgagcacaaaaacatattccatagccagagttccacagtgtttggagctctgcctgagaacctaggctgggactgtgtggggaggaagggccggcgagagcggatgtaggctgagccagcctcggctggagaccggccctggcactgactgcctggggtcactctgggtgaaactcatccaccctcctgggcactctgcgctctgcttcaaatccaccgccgaaaacaagctgagtcctgccccagcctgcagggcctgtgggatgtgtcctccatccgcctcgctgacctcgtcccatgccacctgcccctccctgcgtgccagccgcagtggccaccgctgctgctgacacaggccagccacacacccacctcagagtcttggccaagcactggccattccctctgctcagaatgctcttcccaggcacttggcgtagtggctccctcccttccctcgggtctctgccctgacctcacccagcctgcagtgccctctgtccggctctgtcagacccacgtgttctctttcatagctcctcccaccctctggaacagtcccatctccctttggcttgtttattatctgtcccctccatgggaacctcggttcctcagaggcgcaggctttgcctgtcttgttcatgcctgttgccccagtgccatcaatggagcctggcacttgtggatgctgactactcgttggctgaatgaatgaacctcagttgccttatttgtaaaatgggaagcatcacactgatctactaacgttgctgtaaagacgaaaggcatgttatttgggtcaagacacccagcactgtgcctgacacatagtaggtacttaggaagtggtaaataatgcgtgtgtcagcccaagtgtgaattactggccttgtttagacaaagtgtacacggcatagctctattttttgacattgccaggatagcctggtgctccccagctctaaaactcagggtgattggtggggcagaataaggtaagggcagaaaagaaaagaggaggaagtgaaaaggaagaagccctttgcagtgtggactacttttcagtagaaacgtagaaagacatagtttacctcaaggcctcgctttgtccactggaaagtttagaaattcctgccaagaacttttatttatttatttattttttaattttattattattatttttagatgaagttttgctcttgtcacccaggctagagtgcaatggcatgatctcggctcgctgcaacctccgcctcccgggttcaagcgattctcctgcctcagcctcccgagtagctgggattacaggtgcatgccactgcacctgctcatttttatatttttagtagagacagggtttcaccatgttggccaggctggtgacctcctgacctcaaatgatctgcccaccgcagccttccaaagtgctggattacaggcgtgagccaccttgcctgggcaactgagtgagactacatctcaaaaaaaaaaaaaaaaaaaaaaaaagatggcacaagataaggggggagataaggaagtgcagtagaggaaaatgtaggtggagacttccttacaccatcgagaccacacaaatgggcatgtgtttatagaaaggcccagtggtgaggatggcaatggtggtgagcactcccgagcacaaaggtggatgcccttcagctgtaagatcccttttccttgaagaattctccacagcaagctggctggccagccttgacttttctcttcctgaagggagcctggttctctactgactcagcagggaatgtgtcctttagtgctacttattgatgtcaggatatgaaaaacttccccaacctcaaatttgggacgtccttaccagtgtttctcaaatttcaatcactctagggctactgtcacagtttgtgccacacctacatctactcctactgttatatgctttgtattttatttaaatggactcactttttaaaaagcttgcatagatgagttttaaaaggcaaacaatttaccttctctctaaaatggaagaccaggatcacctgccatgagtccaaggtacctgtgaaagtcaaagcagtgagatgaaagttctagcacagagctattgctggtagacagttctgtgcctgaagccgagccttctatttatttatacgcacatatatacatacatacgaactctccctctgtcacccaggctggagtgcagtggtgcaatcccagctcactgcaacctcagcctccccattagcagggactacaggtagcacaccatcacacctggctaatttttgtatttttagtagaggcagggtttcgtcatattggccaggctgctgtcgaactcctgacctcaagtgatccgcccacctcggcctcccatagtgctgggattacaggcgtgagccatcgtgcctggcctagtcttct

SEQ ID NO: 45490 - DNA, 5755 bp, Homo sapiens
tcagtggaggttttcttgactctagctccaggcaggcagagactgcctttgtttggctcccatttttatcattagcagagcaggtgctagtgatatttgcagaacaggtgctgaatgaatgcatgaaaaaatgcatgaatgtggaaatgaaaggggatgcagatggagatgatgcagatggagatgatgatgcagatggagatgatgcagatggagatgatgcagatggagagcagtggccatgcagagtctttgcagaccttggcttggcttcaggctgtgggggctctgcaagccaagggtttgagttccacctccagtgcttgccagcaatgccaccttgggtgacctttatcgtgctacctggaaagtggggatgctggcagcccctccctcctggcatcactgacactgcatggtcagggtgtgatccctttgggtacaggcgggggtggtggacctcccaggtgggcaggtccagtttggatgaaaggccaaggacgattcataggagagcacaggagtccttgcttagccccagcaattccacagaacctgctgtgaactgctggctgctgcccgtaacttttccctgtccctatttccactccttggaggccgcaagaacaactgctggctggccttggccactgcctcagtgttccagcctctgccgtcatttgacaccaagaagacagccaggcaggccttggctcactgcagaggtgttactccacccccgagtcctagccgccccctgtcctctgggtcctggctgggctgggcaggagggcactcacctctcccttctctctctgccctagcatgaaccagcagaggggctctcaatcctggtgctgggcagtgggtctagatttccctttccatctgcaaatatacccaccatttcccttccctgcattctgcgctcagcagggctattcacaggaagcacagaggacctctccttcacagtgagcagttgaccttttttgagcacctactgaatgccaagggttttttctacatttcaatttgtgatctcatttgtttctcaaaatctccctaggagggagacgtaatgcccctccccattttactgatgagtaaactgaggctccaagagattcagccagttgcttagcagagtcaggatttgagccgaaagctgggttgtctctactcccctccatgctgctctgcagaagagagaagccatagaaagctcaggaatgtagtgacagtcgcagcgctagcgatgatgataatcacagctcacatccaccatgcgcttgctacgtgctgggagctgccattcaagccttacatgcgtttctgcatttaatccttactcctgtgaggtaagcagtattttaaccccattttacagatgtaaaacactggcggttcagagaaaaatctgtccaaagtcatgcagctaatgcatgagacagcagagcccctggctctgaaaatccgtggggattgaaataccaagcacactggttcatccagacagtgggatattgttcaggattgaaaggtaatgagctagaaaaatgtgaaaagacatggaggaaccttacatgcctcttactaaatgaaagaagccaatctgaaaaggttctataccatatgattttcactctgtgacattctggaaaaggcaaaactatggagacggtaaaagatcagcggttgccaggggttgcgggagggagggatgaataggcggagcacggaggatttttagggcagtgaaactgtgtgtgatgctgcagtgattgatacgtgtcattagacatttgtctaaaccgaaggaatgtacaacaccaagagtgacccctgatgtcaagtatggactttgggagacaatgatgagtcagtgttcattcatcaatcataacaaatgaaccctgtggtacaggatgttgatagtgagggaggctgtgcatgtgtggggacaggcaggatatgggaaatcgctatcttctgctcaattttgctgtaaacctaaaactgctctaaaaatatagcctatgttttaaaagagggaaaaaagaaaaacaggttcacgatgcacttggtgcttgagccaccacaacccccagcagtgatgtgcagcagggcgtggctctgcactctgcgggggcttcccgggctggcttagctgtgggatcatcttctccagtggttcttccaggcctgctgtcaggtgcagtttgaaatccagttcaggagtgcaccttgcgtggggagctggagggaggcaatggttgctgttgggtgactagcagaggctgagggaatggcaggcatgccagggctctgccagtgtatagacagatcttcccccctggggaggaggaaggaggaggtgaggggggtgacaacaacattctttggtccccattccccaggacagcgtgtgctcaggggaggctggcctcacccctgccagggaattgcaaaattcagcttcagttgaatgagtgtcctttggaaaagtacattttgctcaggagccaagtaaaactgaggactctgcagccagcacactgaagtcgctagccatgactcacaccgagtgggatggggagggccaagctgggaggcaagccatggctctctggtgggtccaggctccctctggcgccagacccctcggctgggctcaggtccctcagctgggatatttcgtgtgccagaggtagcagcctcagatggctttgtcagggttcagactctccttgctatttagaaaagatgttgtctctaagaagtcatggagaaaatgaatcactgtaaaaatcaaattttcttatccacttgcattattggtttagagatggcttctctccaagataagtttttggtagactgcagatcaaaatgtttaggggcatctgggggtgtcatgagaagagccccagatgggacacccgttcttccttgtgacattagggaatttggtacagctttctggatcagtttttgcctttaagatgcatctggactcatcaaacccagaaagtgtagagcaaatattcctattcccatgtccttggcagacattgctaatctatctcagggctccaacagagttgggtctcagccttaccagcctggcagccactagacttgatccctgagatgaaacctcttgaccacacaggaactccatgatcttgaagctcccttctggctctataacttttatgtctctctctctcttcttgctgtatctttcattctactgactattctgatacaaaaatacttcacgttcaagatttaaggccaagttcacaaactgataatactcaggccaaatctgacccacagaagtgtttcctttgctttgcgtattattttatttttgaaacacttgccatcattttttaattggtgattttacctaattccccagatttctggtttcacttaacgggctgccctcggaccccttggttccagccatgtgccaagctgggaggctttctatggactccacagtttgccacaggccacacccagcccacttctctaatttccagttcctgcctattctcagtaggcatttttctactccagacaagtatacttctgtcccacatgtaaggcctggctgtctctcatttgctgatgtgagctgctagatgaccaacgctccggtctgttaactcacttgggatgctgacgtttcctggaatctctttcagagggaaaggtgtttcctctctatgaatcataactgcctgatgaattagttttacatttttattttctcatgtgggctttcctcaaagcaggggctcagttatgccatgaactgttgaagaaagcacaagttgaggcagatatgggaaatttagcagggggagcggggagcagagcccttccctccctctcgcagccactcccttcctccccgcctgcctgcctggatctcctctgcaaagcctcattgctggtgggtggtgaggaagccaagtggctccccgagggtacttgcctgcacagctcaggtgagctcttggctcaggaaagactcacagtcttccctggctcagcgggccttttgctgcttaaagatgatgctcgccacttcagatcacagtgccagcccctggggaaccccaagatgcgtaagacaacctcctgcccttgaggaattcacagctttgaggggaagacaccaatagtattaatgaggcagtgtgggccgtgctgttgtttgtgaatgcagtccacgcatgctcagtgacatcaatcatcgcatgtgcccggtagtaacagggagacctcaggggctgcagaggtccccgtgggggcacttcatccggcctgaggctgattggagatggcttctcagagaaagggatgcgtgagctgagttttcaattgcccgagacctctgacctcactggccactccagctgtatcagcctcgctgctgttccaggaacctgccagatacgctccctgcctcgaggcctttgcacttgctgtcccttctgcctggaatgctcttccctggctatccctgtggctgttgtctcacttaattccgatctccatttgcatgtcatgatctccttgtctgatgagccccatccgaagggccctggcattacactatttccttaacctgttttatttttcttcataacgcttatcagcactgacatatatgagttcattcactgttggtctctcccactaggagataatctaggtgaagactgggagatttgtgtctgacctccgatgtgctcccagcacctagatcagtgtgtggtccacagtaagcactagaggatgcaaagtactgtgagctgatgaaggagagagagggggtgatgcagacagatggcaccaagctggaatagcagtggtctttggggaacaaagaatgttggcgggcagtggggtgagaaggaggggcagataacacacagccaaagacagatctgctaagacaggccctgactgtgtctttcttttcatttataacctgcttattatagaaaaagtgacaacactgagatgtgccgaagtggaagtgatcaccaactagcctctcagccaggcccacaaggaaaacattctgacccctttcctaaagcccttttgcctgggattgtgtggagagtttcaccttttcatttgtgagccagatcttgctttctaaagtgcacagctagctgcctgccccttcaggtctcttcgctgtgctcccagcccagtgcagtaaccttgtgttcagatgggcgaggacatgtaccccagcttggccacgagatagagtaacctcgggcctcagggggccatgaagctttgcaggaacctccaccctttctcctccagcctcgtccccatgtgtctgcctgtactcaaggcctcagtctgagtcactgtctctacacagtctttcctgaacctcagttttatttttctgtaaaaatggggatgaagctagtgtttataccttgaatggttttgaggatcagatttgaggatcagatgagacaatatgagttactacttgggttcatgggaggtgctcagtaaatatcattctccttcccctcttaaaatcttaatcctgcactgtgcttttaccccaggcctcaccagaactcagccttgacttatttctcaaggtcactgagagtgttgtcaaaaggtggtctcaggccaggcttggtagctcacacccgtaatcccagcactttgggaggccgaggcaggt

SEQ ID NO: 45491 - DNA, 4627 bp, Homo sapiens
agcctcccaaagtgctgggattacaggcaagagccatcgtgtacagcagtttctgtatttttttaaactgcgaggcccagtttctgcttgtcggtccctgatggtgacctggacaaaagctgggctgttagccacctggggtatcgagccccaggacacggctgtcatgctttaatctgcatgggaacttttagatcccctgtgcaccccctcatttcatactcagagaagctgaggcccagcaagggccagggattttctgaaggtctaacacgaagttggggtggagtgaggacgagacccctcccgctgcagccctttcctgctgctcatttctccagtcttaggagaacccacatgccctccccactggcccaggctggccttcctatgacacgaggcggaccacatcctcttccagctccgcaaggcctctccgctcaaatggtcaccgcctaggccccaggcctcatgtcatctgcagacgcgtctcatttgtcctgtagagtgttggcccagcatttgagaatggtgaacttccatgtaaaattccacatttttggcttctcttggacactcagaaggtctggcctcctgagcccgcatctctacctggcaggtgtcagctggggctcggtgatggccgcctgctggtttgttttctctccattccctctccccacccctacctcccaaatttgctgacctctcacagtctcccacagtagaccgcccgccggcccccatcgacacttggtgtgagactccctagccacagcctggccctcaggaccctctcctccagccccgccccagttttccgtcctcctctccctgcacatcgggctgtaccctgtgccggagagaggacagcgcccagcttcccagattcggtcctactctgtctttgcttctgctcctctccttgcctgggctgctctttccctccacccatccatcttctccccctcctgctctgtgcacacatcaccccctgtaggaagcttcaccgaggaccccaggccaagtcaggtaccccctcctgagttaatccagcacctcgtgatgaggatgccactaccttctccttccctttctttgcctctaccgctaaactacaaactcactgggccaagggttgatttttatctccttgcctaagggcctaaaagagggggtgtgttagtaggcactgcgtaaatgtttgtcaaacaagcgttaataataatagtaaccacaaatatccacgtggcatttctggggtgccaggctctgcctaagtactttatatgtgctcagtcatttgagcctcaccaccatgctgtgagatagttactgttgttgcccccactttatagacaaagaaactgaggcacagagaggttaagtgacggtcccagggtggtacagtagtggtcatagttgagcccaggcatctgattccacagcacatgctcttacctctcacacacctctcagtgttaaagcggcccccactttctgactaagggatatgagtaaatatggacaggtgagttgcagagacccccaacctcccgaccacaccccagccccagcttctagtaccctcaggggcacaagcacaggtgactgggagctaagcaggcggcagagaaagtggtacctttgaacttggcagcccgcaggaatttttctcccctgaggtcttaggaaactgagcatgtttcacgtgtaattagggtgagcacactgattcaagcatcggcccttacgcaaggtttccaaggcattgcgtcgggtttagctgggcatactcttgtttcccaatcaccaaagaggaaccgcacaccagcctgtcacccccaagggctggagccgccggcctctccagcaagtcaagttctgtctgagagctgggatgccgtgtggactaaggagggttctgtcgatcaaactctgctgtgggagaactgtctgctacgcaggttcaagtgaaggaaacgaagccaagtgtgtggggagcctcccctgcgagctctctgcgtcacatcctttacagacacttctttccctcactcctttccgtggcctcacagggtctagtactaatggtcccatttttacaaaggaggaaacaggctccgagaggtgaagtcgtttgctgaaggtcacatggtgaacgagaggaccagccgagatttgaaccagggtagtctgattccagggtcttaactcttaaatagctgaagcagagccagaattaaacctgtgtctgtctgatttccaaaaccctgaattctcccactacaccacacgatttccctgtgctctggtgggatccataggaaagaaagacatctgtctgcttctgtgagggaaagaaatcacacaagacaggaaccagagccatcaccagctgatgctaagaccgtgggctcctggcaggactttctgttaacctcatgccttagcattcttaagaagagtctccatgaggcagacagcaggagctggggggtgcagccggagtggaaacaggaggaggcaggaaagggaagagggggaggagaggtgacgtggagcaagaatgcagcatcgtcacataactcgagcagggctgtgcgtttccttgcttcctctagcgtcagagtcacccccgattcaggggttccatacattccataattatccagtgcctactctgcaccaggcccatgctagggtttgggaacgtggcagggaacaaaacctaactaggcccctgctctcgcagaagttacactctgatggaagacccaccgatgagtgggagggtcatctggtggttcacgcctgtaatcccagcactttgggaggccaaggtgggcagatcggttgagcttaggagttcgagaccagcctgggcaacatggcaaaaccccgtctctaccaaaaatacaaaaattagccaggcatggtggcacatgcccgtagtcccagctacttgggaggctgagacacgagactcacttgaacctgggaggcagaggttgcagtgagccaagattgcacaactgcactccagcctgggtgacagagcgagaccctgtttaaaaaaaaaaaagaaatgttatgaagaagagatgacaaggggatgtgatctaagggtgttgtggggagcaggggttccatcagagaagcatcttggagaaagtgtcctgaaagagcagaaaaactgtgggaagaaccatggtttgttgaaccatgtgtcacacaagccagcaccactgcctgctgccttgagacccaccctttgtgcccacctcactcctgttccatttgctctccacaggtttgacatctacaggaaggtgcccaaggaccttacgcagccaacgtacaccggggccattagtgagtagccaacctctggccatgccctctgccccatctccactgcctgtgcctgctctctctgtgcagatcatctgggccagggaggaaagaaggaaagacaggagggaggaaagaaatgctgagcatcttgcgggggcccttcaagcatttcctcacttactctctatcctcactgtaacccctcaaggcacaggcaccatctggaaggacatgaaagaaattgtcaagagtagctgccaggctgggcgcggtggctcacgcctgtaatcccaacactttgggaggccaaggcgggtggatcaattgacatcaggagttcgagaccaggctgaccaacatgctgaaaccccgtctctattaaaaatacaaaattagccaggcatggtggtacatgcctgtagtcccatctactcgggaggctgaggcaggagaatcgcttgaaacagggaggtggaggttgcagtgagccgagatcacaccattgcacttcagcctgggcaacaagagcgagactccatctaaaaaaaaacagtagctgcccctgggagaggaattgggcccaggggtaggaaggagatttacttttctctttataccttaaaaatgatttgagttttccaccaaagcatgtttttatccattaaaaaaaaaaatcacaatctcatccagactttgggttctaaagaccattcttcaataaaaggaaccatggctccttggagaaatggctgatttcagggctaggcagggtaaagatagaggagcctggagtgcctggtgtcagcaggacctaggagccaacttgaaagtcagcctgcagcagtttgagtaataaaataaataatgacattattggcttagaagccagagaattaagaaagagttctgtgggtcctaattgatatcaataaatgggggagaagagacaaatccattcagaagaattccaaataatatacaggctgagtatctcttatccaaaatgcttaggacaagtgtctcagattttggatatcagattttagaatatttgcattatacttatcagttgagcatcccacatccaaaaacctgaaatccaaaatgcttcagtgagcatttcctttgagcaacatgttggcactgaaaacgtttcaaattttggagcacttaggattttgggttttcagatttgggatactcaacgtgtatgtagctattctcccatccaggtggtggagtttaattcccctctcttgagtgtggactt

SEQ ID NO: 45492 - DNA, 16625 bp, Homo sapiens
gaaatttcacagctcacagaagatggagccacgactcatactcaggtgggcctccttgcaccccacaagcccccctagtgcctggtgtgggagagggaactgcccccctgatggtcccagccctgctgcctgagcagggtcctgggccgggcagtcggtcatattggagtccacttctcccaggtcaggccattctcagttgggggaggaccttggggatccggctgggcttgttgaagctgcaagatgcctttgagagccctgaggaagggacagcacagccccgtggcaggatgcatgtcacacaggctctgtgttcgggcagagcaaggttcatcctcccatttagcagcagtgtgactgagcaagtcactcccctctctgagcctcagtttcctgatctggggattaaatgtgtcccgggatgtgtcttgtgcagggcacgtactaacccctcagtgcatggatgactctccttttcttctcactgtcctcccggagcctgcaacacatgagggcctgtggcctgagaagctgtgcagctttgtgccttgactcccgaggaaaggatatggaggggaccatgagaggaaagagccttggtagtttatgaacctgatccaaaaaaatcaaatgaggcttcctgccccattcctaccgtccaccagtggctccatcctcttccctcttctccatctctgcagtctctcccttgtctggtatgtttaacagtcaggtgtgtatttttctagagttttaaaaaatatatttaggctgttttttttttttgagatggagtctcgctctgtcccccaggctggagtacagtggtgggatctcggttcactgcaacttctgcctcccgggttcaagcaattcttgtgcctcagcctccccgagtagctgggactacggatgcccaccaccatgccaagctaatttttgtatttttagtagagacgaggcttcaccatgttggccaggctggtctcgaactcctgacctcaagtgatccgcctgcctcggcctcccaaagtgctgggattccaggcatgagccactgcacctggcctatttaggctttgatatacctatatcactgtttgaaacacaaaagggagcatactctgcacactgttcttcccctgcctttcttctgctgatacatcctgggcacctttcctgccagcggataaacagccaccacattcttctttccagctgtgtcacattctgttatctggctgacctacggggcctgtggccagcccctgagggtagacattccccattctggtttgttggagatccttgtccatatctttttgtatccttgtacagttatttctgtaaggtaacttccctagaagaggaattactgggttaaagagtatgttttttttttttttttttttttttgaaacttacaaggtcctgccaaagggccctccagggacatggtctgatagacagtttcagccacagcacaggagacagcaaatttccttacacaagaggaaaggcgtgaggcataggaagccagcccttagctaccatttagtgaataaatatttattaaccaggtccttgggccaggcgccatgccaagccctgggactgtgctgatgaacggggcttccatctttgtccttgaggagcacacgactgggcagggcgggctgacttggacacacaccatttcattactttgtgatgggtgctattaataactgaaggaaagatcagggcattggagacttacagctcagggtttaaatgttgcctcctccacttacgtgactgtgtgaccttggacaaattccttgacctctcggagccttgggtctcaggtccagtgccccctttggctggccgtaccaggtttcctaccatcaagccttctcctggggtcacattcctactgtccgatgcctgagtcagtttcagaagaagtctggagttagagagccttagagtcttgcccaaacatggactgaaaaaccttcatcaagccttcagtatcagaaggcctttctggttgaaatagtttttacctcctgttgtgttttttattcattcattcaataaatatttattttataccttctctgagccaggcactgtgctagtctctgaggccacagtggcattgtgacctggtctctgtcctcctcctctatctggggtaagggtaacacacgccatgaatgcgtgtgatcgggacctttggaccacttgagtctctgccgagtagacttggcacttattgtgtccacctgctgggctgaccaggcttagtccgagccttgaaaaagcacacagatttcaggaggcctttccatcccatccccccagctctggtgctctggtgtggatagaattagaaccctgggacacacgtctacaagcatgaacacggaaagtagctaggagacctgaacccatccaagttagcactgaccttcatgaacacatcctgttttgtttcgttttttttgagacagaatttcactcttgttgcccagcctgaagtgcaatggtgtgatctcggctcactacaacctccgcctctcggattcaagtggttctcctgtctcagcctcccaagtggttgggattacaggcgcctgccaccgcacctggctaatttttgtatttttagtagagatgggttttcaccgtgttggccaggctgttctcaaactcctgacctcaagtgatccgtctgcctcggcctcccaaagtgctgggattataggcatgagccaccatgcccggcaacactccctattttgtgcctgttcatcattacagcatccaatgggttgtcggggcttgggggaggagggtgtaaaagattctgaaatgtgggtcctatatgatcctggtcagaaagttgcaagcttccaaagcaaggatgttttgcctgctcagttttccaagaggtttaatagcctcagtttgcgggtgagaaagggaagaacaggagccaggaaatttggattgatagctgatctcttccagtggatttgttcagcagctggagaaaacaatttgaaatttatctctctgccgttcgaaaatgaaggaaaacacggccactcagtaaactgatgtggaacctgtttcgacatagattgctgagtgagcaaagcacggtggaaaagagtgtgcccattacgctgctgttcacttagggggatatatatatatatatatatatatatatatatatatatgtgtgtgtgtgtgtgtgtgtgtgtgtgtgtatatatatatatatatatttaaatgtccatggatggacacatgaaactgtaacagggaatcgggggctgcagatcaggagagacagactcactttttttatacagctggatttttttttttttataatacgcattgttaactatttttttctttaaaaaatttttttttctcactgtcttatggtgctgatgatacttttttttttttttttttttttttaagtaaaacctttgaatgcttccccggtacaactttttcttttttttttttttttttgagacggagtcttgctcttttacccaggctggagtgcagtggcacgatctcggctcactgcaacctctgcctcctgggttcaagtgattctcctgcctcagcctctggagtagctgggactacaggcgcctgccacaacacctggctaatttttgtatttttagtagggacggggtttcaccgtgttggtcaggctggtctcgaactcttgacttcgtgatccgcccgcctcggcctcccaaagtgctggggttacaggcatgagccaccgcgcctggccaactttttcaaagtttgggagaaattgggagtaattctagtatcccccatgtctcagggtggttggagagactcagtgagcagtctggggacatcctgcccttcactcggagcctaagttcttgaggttccttttctcagggctttgcctctaaaacatatggcttccagtcctgcctctcctgccaccacacagtgaagccatgggccagcctccttgtctcactgtgcctccatttccacacccttaacatgggcaccgcccccctcaaggtggtgggagtgtgaagtgacaggacatctgttaatgcagtcacaacagggcacatagtaagtgcccagcaaacactctctttcttctcccttccctcggaatgcatctttggctgtttgttttgaagacagatagatggctatttgctttgaagatagatcaatcaatcgatcaatgtttggctgtttgttttagataggtagataggcagatcgatatatgtaaatagatacagactaagaaaaataatagagataactggctgtcacatccgtgacgctggctctgccagtccaggtgcaggctgcggagaatgcagcagaatcagcaagagggattgggaagtcttctttgcaggaaactaagggtcaatcaatgtgttgaatcactttccccagatcaccaaacccttcccacatctctctgatgtaagtcctactcatgagctgatgctcaggtaattattacctgccgggctctgtttcaagctcaatccttgtgttgctgagatcctcagagaagccctataaggcaggtactaccattgctgccatttacaggtgaggaagtggaggcacaaagaggttaagtaactcacttagggccatgcagcaggtgagcagtggggccccagcgcagtccttagtgagctcttgcccactaagtgcctctgggataaactcaggtgtggcgtattcagccctcattttgtatcctgggagctgactctctgccgtacacaatacctgttaggccccagccccaggccaggcactggaactccagagtatttgtctttctggatatcagtctagtgggagaaacggccacagataaccgataaaatgtgggacatgttcaagcagaggctgggaacacagacaaaagagtgaccagctccacctctgggagtaggggaagcttcccatcaaaagggacatgtgagtcgggcctgggaggatgagtaggagttcagcaagcagagaggataaccatggaggaggagggatgatgagtccaggcaaaggaacagaaatgaaaggcatatttagggaatagcatgcagctctctgtgggtgggtggttagacattgtggggagtgtcaggagatggggctggtgagtggagttgagggccggactctggggcacttgttatgtcctgcccccaaggagtgactccaaggtccacaaaccccagtgtctttaggtgccaggcagatgagagaaagacaacagacatggccgaccccagaactctgttctacactctgcattttaaacatattggaccggccgggtgtagtggctcacacctgtaatcccagcactttgggaggctgaggcgggcggttcacttgagatcaggagttcaagaccagcccggccaacatggtgaaaccccgtctctactaaaaataaaaaaattagctgggtgtcgtagcaggcacctgtaatcccagctacttgggaggctgaggcagaagaatcgtttgaacccaggaggtggaagttgcagtgagccgagattgcgccactgcactccagcctgggcaacagagtctcaaaagtaaagaaataataagcatattggaccattcttcacttccataaagaattatttcttctcttgaagcaccgctgtctatagccccttctaaggacaggggcaccgtgtggatggcaccacagagggtggtgagaaacagccacagactctgcctcagcctcagaaccagagaggcagaagggagtggtggggcctgtggcaaactcatgggctccgaccctccgtgggaacaagggtgagatgttctggagaagccagaatgctggccttttatgtgaaatctgctgactgttcaaggtggactccagattgtgaaatatgttgtcactcgagccaaacagaacacatttgtgggccaccggtttgcagcctctacttttggctggcctttgcattaaagagctctcctggaaggaagcggggccagccccaggaggattgctcatgtcggcaggttgatccacacctggaggccagaccagtaccccaaaggcagggggtggggctgcttcatattgaggctcgagtcagaaggggctctggagggtctgtgggcacagccccacacccttgtcctggggcctctttcctcttccctctaggctggtctcccttcgtcagtgcccaccacccttaacagtttgcatttctgttgtttcttccagtctccatctgctgctgcctcttcatcctcttcctcttcctctcggagctcaccggatttataacgacagaagtgtaagtcatactttcccgatggggcattccaggatgttctgggaccccagacaagaagagggaggggtctttggccaggtttggtggctaacacctgtaatcccaacactttgggaggccgaggcgggcggatcacctgaggtcaggagttggagaccagcctggccaacatgctgataccctgtctacactaaaaatacaaaaattagctgggcgtggtggcgggcacctataatcccagctactggggaggctgaggcaggagaattgcttgaccctgggaggcagaggttgcagtgaaccaagagtgcgccactgcactccagcctgaatgacaaagcaagaccctgtttcaaaaaaaaaaaaaaaagagagagagaggagtcttaaaaaggagagcaagttccaaaccttccaacttctgtctccaggcctgtggcatcggttgctcttctgtttcttaaaaggactttaaagtgagagcaaaagtgaatattgccttgttaaagctgaagggaacattttggttccattccgtgggggttctcctgggctcaaagatgaacagaaataatttgcacatctctgccatccctttgtttggccagtgggctttttttccctctgaatcatcacagggtcatttgatgtgagagccgaagagttcagtgaaactaatgggtacagcttcctaccggagggggcgaggttgctgacatcagcgcccggccccctggactaacccccttcccatttctcaggcccacacttggtgaggaatcggtgcaggcttcctggcagtggctgacgcagagttaaaccattcctgattcctagaattatctgttgtctggataacctagtaaacgctctggggtgtgtgtaacagaatgccattaggattatgcagtcacgacctcatcggacgcccctctgtgatggaattagacccaggagcttcctgcctttggcactggcttgaggcttcaaagcctcttcatttctgtgtttacagcccggaaagtcatcacggagctcggccctggccacccactctcctgctcaacactggaattttctttttcactaatgggatttcttggtttcctttgcctccactcagccacaagacaataggaaactaaatacatagctgcttagcccaagaagactctcattatacaagcattaccacctttagttctcaaacagcctcaggagggagctgccccctctttacaaagaggaaattgaggcccagggaggtggagggacctgcccacagccatacagttaggagctggctcccagccctgcctatctccctagcccacatgtgtttgaccagcacactgaaaggcctatgagacaggagggctggtctcaccttgtttctgggtatacctttcagccctcccctggcatgggagagtttgcctttcctggtcactctgatcctgttttaaccctgatggcgccaaagcccaggggaccttttacagtggtgggaagagtacaagataaggcattgggagacccagggccaggtctctgcttaattactactttgctgtgtgaccctatgcaagttgccgaacccctctgggtctcagtattggtagccaaatgaaggagagtagaccagagtcagagctcccttccagctctgggagaggttggtctgcttcccaagacatgaccctgtggccatgcagggttcgaagaaggggttttattccccccaggcctctaatgggagatggccatgtccaagtcaagcatcttcccctctgtacaactcagtcactggacatcttaggatcaccctatcatgaatcagagctcgaagcagggagagcggcaagaggttgagacttgctaatgttatgaggtacctgttgtatgccaggcacccactggcctctgcaggctgtaccccaccctctaggaggggacctgcttggcttggcaggcctgtcatgttctgagcaaggtgacagaggcacacatgtgtcatctgctgagaccaggcaccaggcaggtggctttatgtgctgtgggcaggacaccagcaggtgcaaagggcctcaggcagggatgacctggtgtatgtgaaggcaggaagaaggccaatcagccaggtcaaagtgagcaagcggagagggtaggaggtagagcaggcaggacggagaggggccaggccttctgagctgccaggtagaattgggagttacttctttttttttttttttttttttttggagacggagtctcgctctgtcgtccaggctgtagtgcagtggcgtgatctcggctcactgcaagctccgcctcccgagttcaagagattcttgtgctttgcctcctgagtaactggaattacaggcaagcaccaccatgtccagctaatttttgtatttttagtagagacagcctttcaccattttggtgaggctggtctcgaactcctgacctcaaatgatccacccgcctcagcctgtaatcccaggctgggattacaggcgtgagccactgcgcctagcctgggactcacttcttgatgatgagctcgtggagcccagggctggacctgcacactcactgctctgtggctccacacatggaggagctgaaaacgccagtggtagacacagtcaacaagcaaacaaaactagactgtatcgatcaggggcaagtactccaaagacaagaactaaagcagggcaggaggtagaaaatgagatggctgcaggtacatgatattttatgaggatcaaacaagattatttagctgaaagctaacttaatatagtgcggctatactttaatatcataaggtccatatctcttcgtgcatttattcatttcctacatagtctgcatctaactctaaaaaggttttaaggccgctccgcaccaggcatataagtactcagggaatgtgaattccttgtcccctcttccgctttgagttaagaagatgcctctcttgcctgctgctgacagcgtgtggggtggcattcccagctcatcccacatgaggtggggcactgaggcaatgggctgccaacaagtgagttttgacgtcacagcttgaggctcgagcaggtggggccccacccgcagaatgcccgggagcattggggaagggcccttccagcaagcccagacaactcatgcagcttcccaagggcagggctgcttctttctgaagagcacagtgtgttcccactgctccccattcccccgtgccaggacttcctctccctctctcccagcggcatcccggacgctctgatcccaccgagtccctggagaggtacaaagcttagggatgaggggaggaagggggccaggtgcagtggctcacacctgtaatcccagcactttgaaaagccaaggccagaggatcacttagcccaggagttcgagaccagcctggacaacacagtgagatcctgtctctgcaaaaaaattttaaaaacattagttagccgtggacacacacacctgtagtcccagctacttgggaggctgaggtgggaggatcacttgagctcaagagatccaggctgcagtgagccatgattgcaccacggcactccagcctgggagacagagcgagaccctatctcaaaaaaaaaaaacaaaaaaaaacatgaggacattttttgagcatttgccttgagtccaaccctgtgctaagtcagcggctggagagagggagggaggcagagatgaatagagagatctgtccggagctgaggccagatgctccagctatgaagatgcagtgaccctaatgtccccttccctccttactaaggtataggagttgcccgaagggcctccgcaggatgagccctaagacttacagagcaatcgagaggagaaagcatcacatctttggggtcttccagttgtcagaagcttgtggcccccaggaagccctacaggtttgggaacaactgaaggtcacagttctcgtcttctgggtggctggccctctgtggcaggtttgtggccacagtggggtcagtgccccctcccgccaccatgagattgtaacttaaggaaatgaggtcaccgttggttggatcaacatggctccagccccagcctgtggttatcagtgacataagacgcttattctggcctgggcctggtggggggtgagggggaggcacatttgtttgggtggttgggctccaacctggctttggacaggccgttaattatccttgggaaagaggccccacagagtgttctgaaactccgtgttttcagggagcaggcccctcctcaggcaacctggccacagaatgttccagcctctgactgcccagtctctgactgctctgaataattattaacctcatgaggatttatactaataaaatatagtaactggaactctccactgatagtttataatgtaatataactcatggtaccttccatactataactcatggatttatagtgtgcatgccaacacctaggtcagcactttatttttatttttattttttgtttgtttgttttttgaaacagggcctcattctgttgcccgggctggagggcagtggctcaattatggcttaatgtagcctcgacctccagggcgatccttctgcctcagcctcccgagtggctgggactacaggcatgagccaccatgcctggctaattttttaattctttgtagagacaggggtctccctgtatgttacccaggctggtctcaaacttctgggctcaagcaattctcccaccttggcctcccaaagtgctgggattataggcatgcaggctgcccccggcaggtcagcacttcatgatggtcatctcattggtcatcgcagaaccccttgaggcaactactactgttcaccccatgttacagctggggaaactgaggcaccaggcggccaaaaccacatgaagcactaagtggtgtaactggagtcaaacacgggtctgtgatgctgaagcccaggctcagcacctcccctctgttgtaccccacttccctggccccagcatttcagggccccaggctcatgggagccactgctttttgatcagaatagttgactggaggacttggatgcacccttctagggtgaggtggccaaacaggcagatggaagcctgggaggtgggagcttggaggtcacctggaggtcacggtgttctcacaggctccccgtaggaggcccggagtggggagcagtggcttaaccaggaggaggagctggaagtctccaggttgcctgccttgagcctgggttgtgagccaggctgggtagagggccccaggcatcccattaaggagcatgaaggacattgctcttagcaataggaggcctgagggcgtctgagtgtggagtgacgggtttatgtctcagacagctcaccccttgtgaagatgggtttggtgtggggccacccagaggccaaagccctggtgggagctgggggatgacccaagtcagaggggccgagggtgctgggactttggctttggagcaggggtgggcagaacccggtgactggctgtcgagggatgtattttagacatccacctggttggtaatagatgcacatacttttacctggacgactcaggatttgaaactcaaggctccggagcacgtgcttgcagaatctccatccctccctccaccccaccccaagcccttgcggcaggcctcaccgccgcctaagtttccattcgatcaaattttgaagcatagaggtcagagacttcaggcaggaatctgaactatttaagtgctcttcaaaaagcaaataaaattgttttgtatagatgtcatcgaactcatgcctcagactagaatttcaaggccctccaccacattccatttacactccccccacccacacctccccaggcccttgcgtacctctccctacaaggccactgtccacccacacccccaccctcccacgcactcgcctgactccctgacgccatctggcgtcccccacctggaatgtgctcccgactgctccaccagcgcgtgccttccctgcatcctgggagttctgctgaggactccctcctccactcaggctcattccactgaagtttgtgagcacacgctctgtgctgaggctcagggagccctcgtcctgggggtgttgacgggagtgggagaggcttgtgggacagacgcaactggacccctaagcacccctgtaccctgcaggcacctgggccctggtgggaggggacacacctgaagattatgaaaaaggactaggatgcctgcatcacatgtccactgagggccaccggcccctcagcttttcaccgattcccatcccatccaggcagtgcaatgccttggaaagagcatgggctctgggccccctgtccctgggctcagatcctgcctctgcctcctcttggtcctatgatcttggccagccagctgtgctcctctgagcctggtttcatcgacgtgaagggagaatagtacccttattaaacactggatcaactccttgagcatcgatattaataataatgataaaaaccatggacatttattgagcacttactgtttactaagaccacacttagcattgctcttgttctcatttgatcttctcagcaaccccatagcaacccctatgattgtccccattttacatctggggaaactgatggatgggaagccccttgcccaagtcaatcagccaagaggtggcagagccaggattcgaaccctggtagcctaggctttgaaccctggtagcctaggcttcgaaccctggtagcctaggcttcccctgcactgctgtattttctttaccaagaagggtgtggaatcggccctcaagagagagatgagtctcacacatacacacacacacacacacacattgactcacactaacatacacacactcactcactctcctgccctggggcagccaacagcttgacctggcagtcatccagcagccctgtgaagtagacggaatctttatccttattttcctctttttctctcctttcctctctccctccttcctttcctttcttattttcttattttagtgaggtatgtgtaacttacatacagcaaagcatacaaatattaaggtagaggcctgatgaattttcacctgtgtttacacacgtaaccatcactctgatgaagacataatacattctgtcaccaaagaagggtcccttgagcccctcccagtcagtagcccccaccactattattctgacttccattgccatagattaattttgctgattttcgaaccgattgaaagcttttccagttttacagatgaggaaactgaggctcagagaggtgaagcagtgtgtcctaggtctcccagctcctaagtggcagagccaggaggtgagcccacaccggtctgccactgcccccataggccttcccactgcccacactggtgacaggggagtcaggcccatggaagtcctcaaaccacaatgaatccacaaaaaacatttccttttcttccaggtgggttgatttctggcagcccgttggccttttaaaatcagttcagccctagccaatgaagttagttagccttggcaggcccctgccatggggtggttgtgggtgagctcgtggcgctggctggggtggcaggaagccagcagccctggaacatttgccttggacacgaaggcgaaggcggctttattgacctcatcaggcagcccaggtgattgaattgtgtttatctcacagcctggggccctccaggaaggagcctgggagcagccagttctggccttacataaccagcctggccagagcgcctcaggccgtccctgcccagcaccgcagcccccttgttctgggtggccctctagccctgcggagcctgttctctgcttattctggttaggaagacagggacccacgcctgggagaggcttcttggggccttgtgggtgagctcaccttggcgccacacctgggattcactttgctcttggctgaggtcacctccagagggttgccagtggatgacatcatcccacaatccctcagtgctgtgcggaggcccagcctcgccaggtgggaaaggtgagttgcttcaaggaagagtctcaggcagcttcctggctgggaagggaagcccaggctctccttagttgactgtgtgttaatcacccagcaatttcattactcaacagctctccagagttgcacattacagctggggtagaaattgggtgctgaaggccaggcagagcatttggctgtagggaggccgatcctcctcgggcctgttaccggcgggtctttgttcttagacctggggttcttggcctcacggattccaaggaatggaacgttgggccatgcggtgagtgttacagctctattggaagccgtgggtcacggaagagaactgtggaacccagcgactagtgtgcagctcatttaggacaaacccgggcacttagccacgcaggaacaatggccagcctctagtccgatcaggagcggcaatgggagcctcgctgaataagcacagcggacaccctgccggatccagaggggtggaagtcagcggtgggtctgtgacgactgcgatcagcaccacgagctaaagctcagctcgagccggaacacagaccagaagagtgtgtagttgcaagacttaatagagtgaaaacagaactcccatacaaaggagggaccaaaagggggttgcccaatccagctcgaatgcctgggtttatatccccatcattgtccctccccctgtgctctcaggcgatagctgatttgactgtttctttacctcctgcttttagcctaattggtatttcagtgagctccctttactacctgattggtcaggtgtgagctgagttagaagcccggtgtttaaaggtgggagtggtcaccttccccagctagggttaggaattcttatttggcctaggaaatccagctagtcctgtctgtcataacctcctgggctcctgtttgcctctctccctccagctcctttgctcttggtggcctctgattggggccaacactacaagcaaggtcaagcgcaggtccgtgtctcccctctcccatcctaaggcttcccaggaccagggccctccttcattttcttccttgaccctgatgctgaggagagggctgggaggcagcctgagctgtggaaaggctgggttgagattctagctcggccatttcctagcatgtgactccggggatgggacacaccctctccgagcctgttccctggttttaagatggggctcagggcatttcacaggcgcacatgggacagcatgaatgcacgtagtaggcctcccccagcttaacgagtggaggcccatctgttgcactcttgtctctgggaatatccttgtgggccccacagagaagccccaggtgtcttttcagagcccaccgttccttgtgaacagcatcacaccgggtgctaggggcgcaaagatgtggtcttagtaaaaacgaaattcctttgccttggtctgactcattctttccctaagatgtggccatttacaaagctctcttggagtcttcattgcttagatagggcagttctcttttatttatagcctagggactggacccaaggggcctaataaatgtttaaaataaccacagcccagccacctgaagcactgccccttcagccgccccctaggccaggcctttagatttggttccctctgggtggggggcattatcggggaatcagatgcggccatcagacatccagcagctacttggggatgcctcaagacacctgggctcagcacagcttctggcactcagcacctctccctcctgctggtcctgttcctcttccaagggctctcagcccaaagaatgggtccaggaagaaacacagcagtgtgtctgcattcccccctcacctcaccctcctccgcccagtcccatccatcagcaagtcccgcctgctctacgtgggttcctacagccctcctcctctccattcccatcccaccccatccaaggcgccgccatcccctgcctggtctccctcttgcacagcagcccctccagtgggtcttccttgcagcagccagagggagcccgtgtgagtgcgagcctgaccccgtggctgtgctcatatcaagcctaaaggcctcggccaggcacggtggct

SEQ ID NO: 45493 - DNA, 425 bp, Homo sapiens
ttagggtcatgttacagcttcgcagcagagcctgagagtctcatgcaagtgacttgttgaggggaggaagctgtaagggagaaacgcaggatagggcagtacgacaggataagcaaagatgtgtgttcagctgaagtccaaactcagcctgatctcacaggatgctgtggggtgtgaatgacaccatagcatttgtcacacccaatagcaatgggaccaggctgttattatccatgtcattgggtaatggctgcagagtggtgtgcgtggcaggggtcatatcacctcccaagcatctcaagcgagaagacctccggtcagccaagagcattcatctggagaagggcgcagctctgagtcattggcagctgacacctagagaagctggagcggtccaccatccatgagagagtgcaggacagggc

SEQ ID NO: 45494 - DNA, 1839 bp, Homo sapiens
ctgtcacccaggccggagtgcaatggcacgatcttggctcactgcaacctctgcctcctgggttcaagcgattcttctgcctcagcctcccgagtagctgggattacaggtgcgcaccaccatgccaagctaatttttgtatttttagtagagacggggtttcaccatgttggccaggctggtctcgaactcctgacctcaggtgatccacccacctcagcctcccaaagtgctgagattacaggcatgagccaccgtgcctggcccagaatgaattacttctacaaaacaaaactcatttgaagtctgatttggagtcagatcctggctcctttgctggctaaaactgtgaccttggctagggtgacctctccgagcctcagattcctcatctgcaaaatgggcttagtaatgtctgttgtctgaggttcttgggagaatctaatgccatggtccctagacttgtcagcgagtggactgggcgccctctcctggactggggttccagccgtccctctgcccagcctggcacagagcctgctgcaggcccttctctccccaccccctcttcctgttaaaggacacagctgagagaacactgggtgcatctccggccagagataggaagagtctcagccctgtcattgcttttggtgagatttacgtcacaattttgaatcctcgctgggccccaagccagggaacctgttgaaataggtcggtcttattttttgttattttttttctttcacttagaaaaataattcatctggcagattctcattcaggagtgactgtatctctggaacaaggaaattcttagtcagaccagaggactgggactagtgtggtaggaaagggaagagatgtggttccaggaggggccaggcaacctccaccccattccctgccatgccctgctggatctgtggggctataacctgaacccccaaccccctcacccctgttagagcccagcattctggcttttctttaaaagaacttcacatttttattataggaaaaaacgcatgctcatcattgtacttctggaaaacacagggaagcaaaagagatcacccataactctgccacccgacagcagtgttggtgacattttgacatcattctgtccagctggccttcctttctgtgtttctgaacatagctgagatcgtactgcatgtatgatctcatatcctgcttttaaaaataatattcttcattatacaactaatagactatatttcaatcttaagacatacattcaaaaatacaaaaataatatgttttttaaaaagcaaaagtacccctcccctgtcccccttcttgtcccagcatgccatcttccccaaaggacacctctgctagcaggtggggcccccgttccctacccctacatgtgtgtgcgtgtctgtgaacatatattgggtttggggttgtttttgttgttattgttgttttttctttttacataattaattgggaccctaccatatgggaaccttctggagtttctttttttttttttttctagctagtgtcttggagctgttctcatattactcataatatgagtaaaataataacagctgccatttattccattcttccaggccaggccctgtcctgcgtcctttggctatattaaatccactgggatttgaggtatcttagcagaatggctgaagggtgggggctcagaagcaaatccacctggatttcattccaggctctgctgtttcctagtggtgaggtctctgtgcctcagttgccctagatgtagaatgggactgataatattatcttccccacaggggtgtttaaatggtgttttgt

SEQ ID NO: 45495 - DNA, 867 bp, Homo sapiens
cgttttacttttctttaaccctcacaacaagcctgtgatagaagaggaaactgaggcacagagattaggtaacctgctcgaggtctcagcgctagtaactcagccactgatctgctctgagcctcctccacgcacctgcatttagcccattctttgtacctgccgcacggcactgggaagagggctgttccactggctccagtgataagcagttgaattgcttccagttgccactatttcagataaggttgcctgagcagctttgcacacacatctggacacacattgtggatctagaggacaggctgccaacattggaactgctgagtgaaaagcggacctgcttgtgttttctctaaacttcacattataccattggcatttcccatgtcctgtggacccgtgagggtcatttcgaatggctccagcacgttcccttctatggctggatcctcacttacttctctgtcctcatcgaggaacacagagttgttcccaattttcccttttaaggttgtccctctttaaaattgcttccagctgttcttcctctgtatggcacctcctttctagcgctcctgccagggaaattcctacatttccatagttcacagggatcatctcaccactggctacttggaccatctctggggatgcagttggcattggcctgcccattttacagatggggaagccatctgagtcccagtgaggtgacagagggcagggcctatcttttccctttgtgcattcctggtgcttatcatagggctggtagcataggcgatgggtaaaggaaggtgtgaatgaatgaataagtgaatgatggatgaatggatggggggcctgagcctattcaccccataa

SEQ ID NO: 45496 - DNA, 2825 bp, Homo sapiens
ggggtttcaccatgttggccaggttggtcttgaactcctcacctcaagtgatcctcccacctcggcctccctaagtgctgggattacaggcgtgagccaccacatccggccttgtacaaattttaacaagaaatattacaggggtgattttgataaggcattcactttttcattccttcaagtttttaacctagggcaatgggcgtttggacaccactatcaagcgtggtcttgggctcttgttttaaaaatgcaaattctgagctccacccttgacccatttggcgggatgctcctggaaagaggtccaggtgtctttttattccaaatgattcgactgcttctgacatctgagaaccattacagggttgaacagagggatgttggagtcttcatggactgggctctgcggctgcaggacttttctcgggttttcagaggaacctactcaaaacaattcaagaagcacttcctttgcttactgagatatggctttggcaggaaggggcagggagggagtgtcagggcagtgaatgctgtctgcattcccagccttcttacagaagaggactgactcgactctgcgaccaggcttagaacccacaggcctaaatttctgtgttattttagctctgtagtccgtgacccgagattgtggaaggcccatgagcttcctgtaagcatcccagaaggcccaggagagttcatacctttcctgagtgatatttggcagctctgggccagcattctatcagcccagcattggattccagttacctcacgcttatcagcagctgattcatctgtgctttcattcatgcccctgtccaatcatccttccatccgttcattcattcagtaagcatttgccacggtccacttggtaccaggccctgcacggggctctggggacacagagttgagtaaggctccatccctgccttcagcagctcccccatccaggaagaactgatctgccgttgatttctttccccattctcagttcatcagtgcttcattggtgcagtttttctggttgataggctcttttctttttaatactgaaacctagtttgttttaaaagtaaaactattcagacaatgtcagaggatgtacaatgaaatgggatctttctcaaatcctgccttcctccccagaagctaaagctgcccgtggttccttgggcatctttccagataattctcctatatatttacatggatacagagtgtctcctcctcccccaatccatggacacatgtgtatcctgtcccatgacttggttcttttccctgttggagaatagctgctcctagcacccacactttttttttttttttttttgagacagagtcttgctctatcgcccaggctggagtgcagtggcatgaccttagctcactgcaacctccgcctcccaggttcaagcgattctcctgcctcagcctcctgagtagctgggattacaggcacctgccaccacgcctggctaatttttgaatttttagtagagacggggtttcaccatcttgggcaggctggtctcgaactcctgactgcagatgatccacccacctcggcctcccaaagtgctgggattacaggcgtgagccaccacgcctggccaacactcactctttcatggttgctctattgatggacatttgggttgtttccagaattttaatgatgtgcacagtgcaggaggaaagatcctgatggatagagtctcccaattcccggtatccaaggggagaagatgaagagcagttggttggtggtaaaactggggaatgagccccctgccgtgcccagggaatttaggcttaggattgaaatgacatagagctgtcagcgggcagtgcccgtccccctgcttcattctgctgtgtccttcccgcagccctggcctcccacgactacatcctgaagattgtgcccacggtttatgaggacaagagtggcaagcagcggtactcctaccagtacacggtggccaacaaggtgcgcgggcggtggctgggccgagctgtgtgcggcggcgccctctgctgacggagagcagagatgacaggcggctgcaccgacgcactttcttctgattcctttctggaggcctttcctgggggttagcttgggccaggcgctgtccctgggtaaaattgaaaagcccagtccctgccatgtggcagtctcagagtcaaggagaacagatctaaccaggagatagggtgtgatgcgtttgacaaagagcaggtagtctctgtcctacaaaggtcctggggttgcaggtctcaaacagccctgcatctggtccgagtccttcagacacagacccctgggtgctcaacacagacagacactcctgctctcagggcacaggcactttacccaaactcatgaggctactgagtcacaccaagatggctgttgattaatttgctgttgattgacaggggtgtccccaggaccccaacactcaaagtcatggagaagacgccaggccttagtgggcagcagagcatggtcagagtctgcagagtgggatgacccagcaattagtggtctcaagacaagacagccttgggcttccctgggggtatcccaccaatgggacatgaatacttgaaacctgttggttgaaatgcccctgctagaccctggcggatgggtttttcccacttaccaccaggactgtcctttttcttctgttccaaggctgcccaaaccccttataagtgatacctgtttagctcagttaattataacaacagtaggaggcatagctgtcactcattgagtacttcctgggggctagacatgc

SEQ ID NO: 45497 - DNA, 4762 bp, Homo sapiens
aggcagaggcgggtggatcacctgaggtcaggagttcaaaaccagcctggccaacatggtgaaaccccatctctactaaaaatacaaaaaatagctgggcgtggtggcaggcacctgtaatcccagctactcaggaggctaaggcaaggagaatcgcttgaacctggaaggcagaggtttcagtgagctgagatcgcaccattgcactccagcctgggggacaaagcgagactccgtctcaaaaaaaaaaaaaagaaaagaagaaagaaagtcaagcccccttagattaagtcattcctttattgagtccctacagaatgttcttgggtctgtcaccttctagctgtgcagcttcagtccaggtccttaacctctcagtgcctcagatttgttgggtgaaaatgaggatagtaataaaactaccacatagggctgtttcagaaatagaatctataacgtgcacagaaattatattagaatgagattgtctatgtagaagagtgtttattgctggtacacagtaagttttcacaaatggtgattggaccattatgagcattcccaaataggatataatcttgagaaaagactaactttagagctttgagctaagggctccataaatgaaaggtgattcataaattcttcttgatttcaaaggacctggcactcctttttcaaccctaagctcagcaatgagagatcatcatcagctatgagcaatggacttccatggatctttcccatcttgctgccaagtcctacaagactttcatcagaacagccctaacacggataaacacaccagggatgaatgtgggagggaatcagtctgtgagaaattcttaactctccccatgctctcgctcttacatcctgatacttgagttatgtgtgttcccaaacgtgtttataccagttgtgcttttatactggtaggatgtgatttggggaactattagttaaaccaatgagctacaagaaatgaacctagtaaaactaagttgaatgctttagagagacttgattaaggtgagttgttacccctcccaactcaaaatgctgctgaatgagaagtgaacaagacaactgtaaaagatttgggaggccggacgcgatggttcacgcctataatcccagcaccgggaggctgaggtgagaggattgcttgagcccaagagtttgagaccagtctgggcaacatgatgaaaccccgtctctatagaaaaaatacaaaaattagtgggcgtggtggcctgtagtcccagccacctgggaggctgcggtgggggcaggggcggcgggggggaagtggggggagtggtggaggctgcagtgaaccaagatctagccgctgcactccagcctgggtgacagagtgaaactctgtctcaaaaaagagagaaagagagagggagggagggagagaggaagagggaaggtgggtgtggagagggagagagacagagaacggaacaactgaagatttttggttggtttatgtaaggaaaatggaggggaacaccgatacaggtttctctgtaaggtagagccttagcccagggtcattgtcgaatgtgttttacgttggcatacaacatttaagggatggatgccatttttattatttctcctttcaatgaacttttccaattgtctaaccagatgtggattacagtggtttcatataagaggatttctaaatcaggattacagagcaaaaccctccaggggtgcgtgacaggttgggagctgtggtgggtccaggcagaaatggcttccctgggaagttgcggaagaggcgtctctggagacgtgcttcgtgaggagagaagctgaagtgttgcaaacaacactggttggggtgggtgaaacctgggaagagggggtgaaacctgggaagaaatggggtgtggcactagagttcataaatagtagctgtggttagttttttttttttttttttttttttgagacggagtcattgcccaggctggagtgcaatggcgcgatatcggctcactgcaacatctacctcccagattcaagcagttctcctgtttcagcctcctgagtagctgagattacaggcgcccaccaccatgcccagctaatttttgtatttttaggagaaacagggtttcaccatattggtcaggctggtctcgaactcctgacctcaggtgatccacctgcctcagcctcccaaagtgctgggattacaggcgtgagccactgcgcccagcctgtggttagtttttattactatatgttacaaataatttttaaattcttgccggaaacaatgtgggaggccactggaggtctcaatcccttcttaagaaactggtcctttattccagaaggttcattagctgctgcggcagttagatgcagtggtccaggaacgtgagtggggatgtgtgtggacaagaatactcactggagacccttttttcttgccctagcagttgtttcctgtcagttatggagtgatgaggtcacgcacttcattctggccagtcattaatatgatttggcattctctgcatgccaggcaagagtgactgctcttcaggccagatcttccttcgagatggatgttatctcctttttaggaaggaggaaacagagagacctcgtaacttggcatggccacacagtgagtcacacagttagtaaagatggaattcatacccaggtctgcctgactctgggattacgaagaattacatggttccacctcagtcccaaggtcatctttgctgtgccaaaagggaaaactggaaataggggtggtcagagcaggaggtgctttttttggttttgtttttcctttaaaacaacctgcagagaaaatctaaattaaacattcgcagggacagcgttcttacaattttttaaatcttcaaaatgtaattttaattacacaaataacacaggctcataagcccactggaggaaaattatcaaatactaaaaaaagtaaaaggggaaaaacgaaagtcacccgtaatcccactaatcagagatgatcatttaatgataacattttagtgatgccttttgataagcaaaatgggatcatactgttcatattattgtatagcttagccctcacttaacagacatcttcctagattaataaatacggatcgcattattatctttatgggctgcaagataaataataaccatattgagcatctaatggtagattatgtccatcctttgttcccatctcactcagagcctcagttttctcacctgtaaaagggacaattcatactgttatttaacggactgaaatgaggtaatgcttgtaaacctgttagcacaatgcctgacagtaaatgctcagcccattaagaagagccattattatccatctaataaataaataaattccaacatttattaagttcttcctctgtgccaggtattgtgctaagggttcatttaatcctgacaccaggccgggtgtggtggctcacatctgtaatcccagcactttgggaggctgaggcaggtggattgcttgaggtcatgagttcaagaccagcctaaccaacatggtgaaaccctgtctctactaaaaatacaaaaattagccaggcgtggtggcatacgcctgtagtcccagctactcaggaggctgaggcaggagaatcacttgaacccgggaggtggaggttgcagtgagccaaaactgcaccactgcactccagcctgggcgacagagcgagactctatctcgaaaaaaaaaaaaaatcctgacaccaaaccaatgaggtaagtactatcattattcccatttttcagatgggaataaactgagtgaccaagaggctgaatatcttctccaaagccaaagaaccaggcagtggcagagatccaaacccaagcgatttgggtgccagggctcaagcacttccccatgcagccactgcctcgagaaataaaaagactcaccagacacttcctctgtgctaggtgctttgagttcctgcgcatgtttccaggggtgggcatgagacaagacagccagtctcactacattgttagaatgacagcctccagctcttgtcatccaggatatcattgtgcctgttttaattttactgaaccacacagcatgttaaaaacaaaacaaaacaaagcaaaaagccttccctgctctgcttgatcatggatactccttgatgatcttgggttctcaagatctgtctttacatggctttccttcaccagtgaggctctgaacttcttgggagcactcctccccagatctctttaatcaagacctgtacctggctccatgtaggtaccaaataaattgatgagcaaatgaatgaatgtatgagtaaataagtgggtgaatgacaataaatggatatgtgatagagaaatgagtgaataaacagaaccagtgagtgagtgagtgaatgaatgagtgaatgaatgaatgaactccttggggcagggcatgggtttgactaacacctaaggactattctaagaagaacctctgacctttactgtgtgtgcgccgttatgccagcgtctgctcctgggttgccgataggtaatgacttcctttcttaggactgccccccaacctccttattcttggagcctgggcacacgcacagctgggtggcccttcagctgatactgccttaactgctttaactctgcctgctgtgctgtccaggcttctgcaaatagcccaggtgtggccatcctccagaggcctccaaca

SEQ ID NO: 45498 - DNA, 2822 bp, Homo sapiens
gcctgtaatcccagtactttgggaggccgaggcgggagaatcacctgaggtcgggagttcaagaccagcctgaccaacatggagaaaccccgtctctactaaaaatacaaaattagccgggcgtggtggcgcatacctgtaatcccagatactggggaggctgaggcaggagaatcgcttgaacttgggaggcggaggttgcggtgagccgagatggtgccactgcactgcagcccagggaacaagagcgaaactctatctcaaaaaaaaaaaaaaaaaaaatctagtattagtaaacgcaggtgtttaacaatgtcaccactacatgtcagggaacactgataaactaagagagagcacgggacctgcctgggtgtggctgctgtacttgcaagacatcttccctctctgagtttcagcatgccggcatttggcactaagttgtcgttcaacatatatggaatgaatgaacgaaagggagagttggagttaataacaccttgcatagaataaaccccgtcggttcttaacccgaagagagtcgagacccagagcccttttccttccctgccgccacggtgcccacggagggggcgtggttgatctccctcacagctccgtcgggaccagagacccggggaccttttacacccagggtccgcgcaaagtgtcggcctagccagtggttgggtggcgcccgggcctccaggcagtcttccaggggtcggcgaacgaaacgcggagctcgggagcgacccggcggggccaggcacgggcagaagggccaagagggccacaggtgggcgcggagcggccggagtgggcggggactggatgagaggggcggggtctaggagagaggggcggggcggcggccacaaacccgcaggcacgccgccggccgccgtttagtcccagagatagaaaaaagtagaggtaggagggcgcggcggctcacgcctgtaatcccagcactttggaaggccgaggcgggcggatcacgaggtcaggaaatcgagaccatcctggctaacagggtgaaaccccgtctctactaaaaatacaaaaaattagccgggcgtggtggggggcgcctgtagtcccagctactcgggaggctgaggcaggagaatggcgtgaacccgggaggcggagcttgcagtgagccgagctcgcgccactgcactccagtctgggcgacagagcgagactccgtctcaaaaaaaaaaaaaagaacaccagtaagcctctaccgcaggccctacacaagcaggcccttgtactcactggcatcgccctcccggggccgccaggaatgaggcactgagatcccaccccaagccgctgggggcgccattcgacttcgctcctacggaaatggggcttcgatgtctttctgcgcttgcgcggcacggaaactcacttccggccctgcgcactcagggtctgaggcagctagtagccgggtgagtggaggctggagttttctcggacagtgaactctaccgccccgtgagaccctgccctatgtgtcgcgggaacacatgtcaccccacagctctctttgagtgacctcccgaccacccattcctgcctaaccctagcattccttcctcagcctcaaggtcccagtgctaccctctcccccacgacccctttagacgggcatgcgacctccacacacgcctcactttatgtgatagtcagactagtcgcatctctctgtcctccctcagttgccttttcagaggctacctcccctgtagagcctttgttgggggatgaggagtgtcttgggtcgagaacaggcccctgtaacccactgagcgccccttcattccgtctctctccgccctttgtagagggtcaccatgaagttcaatcccttcgttacctcggaccgcagtaaaaaccgcaaacgtcacttcaatgccccctcacacgtgcgcaggaagatcatgtcatccccgctctccaaggagctgcggcagaagtacaatgtccgctccatgcccatccgcaaggacgacgaggtccaggtacgtctccctccggcgctagtggcgctcggacaccgttgcctaagaacgtcatgcgtggagcagtcacagactcacatgcctcaggactctggaaagtagtgtgacccttcagatgtgttaggccagagatagggttcagagccaccagagagtgcctgcgttgctttagagcatttaattatttaatagtaatagtaaaatttaataaaacagtatgtcaaccaagcaaaaacctgcttttttgtttgttttgtagagatagggtcttgctatgttgcccaggctggtctctgaactcctggcctcaagtgatcctcccacctcagcctcccaaagcactgggattacaagtgtgagccaccgtgccccaccaaaaatacttttgatttaaccttctggctgctagtttgccaagtgttgttgcccagggtggcttgttgaaccagactgtaggggaaggtgctgcagtgagagtagtgttttagtgtatttgggtgtagtgggattgatggacagagatttgtgggagctggccatgtgatagcattggatttggcaggagaactggtaaagatgcagcgagtcactctttcataatttctaaaagactggcccatgtgagaacgtacaagccctctgttctctgtgattggagcttagaatgcatgagaggagggaagggagttggatatgagtgaaataagcaggggctagattcattcctcaaaggaatatttatggagcacttaccagagattgttctaggacaagattgacgag

SEQ ID NO: 45499 - DNA, 1738 bp, Homo sapiens
ctggtctcgaactcctgacctcaagtgatccgcctgcctcagcctgccaaagtgctgggattacaggcgtgagccaccgcacccggcctggggctcatgaacttaaagatcatggcccagtgccaggcacacgggaattcagaatagtaagggacaactattgttaagttctctatgtctgttgcataagtagatgaggctgtagataactacactctttgtctaaaagggccaagttctcatcagaacactttgctgagccccgggtgaccgaatccctagctctggggtgagcgacatgcctccaaggagctgcagccaggagacagccaggcgaaggcggggctctgcctctgggctccccgaggggcggaggccggcgcgcgggtcacgtgggggcgcgggaggcggggcttgcacacgctggtcacgcggtcagctattgacacttcctggtgggatccgagtgaggcgacggggtaggggttggcgctcaggcggcgaccatggcgtatcacggcctcactgtgcctctcattgtgatgagcgtgttctggggcttcgtcggcttcttggtgccttggttcatccctaagggtcctaaccgggggtaagtgcgtgaggcccgccttgggaggaacgggcggtgaggagctagcaggccggggcggggaaaggcacgacccccacacgggtcagagaacgttgcatgggcgccccccgcgctgcagagtcaggcccccgacccggcggaactccttgtgttccttttcgcagcagcttcagtgtcctccggcctgagcgagtggagggtgacctttggtggaccccccttggaaacgagtttcaggggaattttttctcatcatagtcctgtgtggggaggtgcagtcggaaatgagcaggccgaatctgggagaaactggggtttgtccctagtcgactgtccccctttagccctgccttccacccacatgaggcctcgtttgcctgaacttaaggatcaaataaataaaacagaaattggcttctctgcctcccatgctgtcgcggttgcgtacagaacaagctccttcgacaacattgagcccaggccttgcatctagtgggcgccaggaggcggttggggcctgatctaaagcgagattaattaccaaagagcaggaggtattgttgagaaacccctgcgtcatgccttttggagggcgctccggctcttgtatgtgagtgtaagaagtgcttagaatgattggctaagaaagattttgtttttccagacttctttgttggttagagctttgtctcttttggaattaaactttttaactgtagtataaaatagaggcttaatcttcaaaggagccttggaacaccctcttcctggttcctcttttgcttctcagtcatttttttctcagttcaagatgatgagaggtgaaacttcgactgaagtcagtttgtcagaaacaccatctcttgctttattcttgaacctaattggtggcttcatagtgcctggttttcatagtaccttgtatgcacaggaggcacccaataaatacctgttgagtgaatagttctattgtctttattaaaagaaaaagatttttggccaggtgccgtggctcacgcctgtaatcccagcactttgggaggccaaggcgggcggatcacgaggtcaggagatcgagaccatcctggctaacacggtgaaacccgtctctactaaaaacacaaa

SEQ ID NO: 45500 - DNA, 1086 bp, Homo sapiens
cgattggcatcagaagtgaggggcggtcttgtggaaccaagccctcaccctgtgagatctgatgctgatgctacctccaggcagataatgtcaggattgaattggaggacacccagctggagtccgctgcagaattgattgtgtgcttgttggtggggagaaatccccacacatttggctgtagaagtctcttctgtgttgattattgtggtgtgaaagcagaggaaaaggagtcaatgttttttccactctcagaaatagcatcagtatattttaaaagttccctgagtgattataatttgcagctggggaggagaaccactccgctacaacatcctacaaagtgctgggaagtggtgttttcattctgtgctatattcttggtaacaaaaggagataggggctagtttaaattctaatggatttttttagtatttctaggcattggccagttgtctcagtctcttacgaaagtgttttttcaggcagcttgtattgcctgccgggattggggaagtccttggttagtttggaattttccatgactcttagctctgcaccattagcgtcaactgcagtcacagagcttttcagtgtgtccgcctgtgctgttctcttcctttttttataatgtcagatggatgatgttgaacctcaactacaagtcttagtattgtgtttgtgtttaataccctacttctaaggatggatcagaaaatctcatctgaatgaactttttgtttattaagtgagtcagcttgaactatctgttttggcctgctttcctcaggtgtcatgtttcctgtcacaaaatcaccttttgtttctgtgggcacaagcttctgatatggtgctggctaattctccagcaatctctccattggtgatcagaatcagccttttgatcctctgattggaaaagctctaaaaatgacagtaaatgaaagaaaaaagatccacccggataatggcctagttggggcttggctagttccccgcttatagggaaatttaaagtcctgaaagcgtgaaaggagactgctgtagtgatatatccacttacccttagaaagtgattccctgctg

SEQ ID NO: 45501 - DNA, 2390 bp, Homo sapiens
gcttctgtagtagtggcattctggttgtacagtcgtatacgggtctctctcttcaaaggtgcacgcagtctgattgatccctgtgcctcggaatccgtgctaaataaatattgagtcggtgaatgaatgaacgaacgacaaaaggcaaggtttgtctctcacttaattaagacgttcagatggggagaaggtccatcacccatgacatcgatacaatccccctactaatcaagttagccacttcaagtttcagtgaacttaaactacaaaatgggcaaaaggacacctcatgcctcacagcgcagttctgagatctgataaaacgctagatttgaagcctttgtaaaaaggaacatcctctcccatcctgggcgtgctgccgggtatcgcagacggcccacgcccacactgcagaggccggcaccgagcccccgctccgccctctcttcctggtttttcccggcaacccgcccctccggcgacacgtgacaggggtgcccggccggactcagcccctgattggccgggctgtggaacgcctcgcgattggcccgaggccggcgggcccccgcctccctcctcctcctcgccgcggcccacgtgaggggggcgagtcacgcgatttccgggaacccgtcaggaaggacataaacaaaacaaacccgaggcagcatggagaggggccgtggcccctgcagcggaaccggacccagtccctgagccgcccctacacccacaggtgagcgccgccacccgctgctcggaacccccaggggcctgggctgggggaagagcggaacggggggcggagggccgcttgcctaggaggcagcagcgctggggctctgggccgggccggcgcggggcgggggccgggaccacggccgagtgctagggcgcgcgggccttgggccaccgcctgcaggtcacgggggctccgctcccctcccccacccccggcccgggacggttacataaaagcgcggggcggcggtagatgggactcgcgggcgggcagtaggctaggccggggatgggcagcgccgggcgtccgtcctgccgggccgcccggcccttccccgctgcctccgagcccggggccgctgctgccggcagtcggcctgtcagagaagagagcgggtgggaggggcccgggaggggaggggaggcgagactggcgggggaggaggggagagaggggcgtgtgaggaagggccggggccgcggaggttggagccaggctggcaggagacgaagaggcgcgggctggggctaggggggtccgagcagggcgtctcgggggtagccgctcccccttctgtccccgcctcagaggcgacgggcgaggggcctccctcccgggatttgtttatatgtcttctcaaagcagcttgaagcggctgaggggcggagccctcagagctgagtggcaggctctggcgtccaatggagcgggcggatggagacttctgcaccaatgggcgtgggggaggcggtgccgcgggggggccactaattggttaggctgtgccggaggtgggccgggcggggcagccatgttagatgggaggggaccagtggtggtgggtcactgagaggggaggagacagggcaaagggcgagggagccgggccgggggtgtttcgggtgtccgaaggcgagtccgatcggaccaggaagtagctcaggggagcctgacctcgacccgcctttctcctcacacgagctgaggaggcagggaagtaccgagggcagtcaagcctcccctgggggtggttcctgggactagatggagctcagtctctggattctccctctttctcggccctatgcttcctgacagacctggccgccaaaccctgtaatcgccctcctttaacccaagaaagcaagtctttctgccgtttctgagctggcttgagccttaagactaccttaaggaggtacttggataaatagcggtctgaatttctgtaccaggcctcagataagagacaggcagtgaaggggaagttttgtaaaagaaaacgggactagaaaagccgagcaagttgagggctgggcggggtttctttttttttttttttctcatcaggatgccttttaaagattaggccccgtgcttgtcctagtcttagtagtaatttgcccctcttgctaacataagttggtagtccacattaatcagcttcttgagaaaactgagcccacaggaagttatttagtttcgaaggttctttgggacttttcttgcgaataccctgcaggtgaaaaataggatcaaggcctggaatttctttttttttttttaaagcagaaaacaagacttgggtgtaaatcttgtgatctgtcgtaaactagttgtcacttgattgtacttttaaatatct

SEQ ID NO: 45502 - DNA, 1250 bp, Homo sapiens
gttgttgttttgaaacaagatatggctcaattgcctaggctggagtgcggtggcacaatcttggctcactgcaacctctgcttccctggctcaagccaccctcccaccacagccttccaagtagctaggaccacaggcgtgcaccatcatgcccagctaatttttgtatcttttgttgagatggggttttgccatgttgcccaggcatgtcttgaacttgtgaactcaagccacctgcccgcctcagccttccaaagtgctggaattacaggcgtgagccaccacacccagcccagtattgttatctgtagtcacaatgctgtatgttagatctccagagcttattcatcctgcataactgaaactttgtaccttttggccaacatcttcccatttcccccacccaccagcccctggcaacctccattctactttttactctctgatcctgagtttgactttttttctaagatttcgcatgtaaatgagatcatgctgtatttgtctttctgtgcctggcttatttaacttagcatgatgtcttccaggttcatccatgttattacaaagacaggatttcctttctttttaaggctgaataatattcctgtgtgtgtgggcatgtgcgtataactctcacattttctttatgtatatgttcattgttggcccctttgttgattccttatcttggattatgtgaatactgttgcaatgaacataggaatgcagatatctcttcaagatactggctttatttattttggctgtatccccagaagtgggattgctggatcatatgatcgttctatttttaattttttgaggaacttccatgctgttttccataatgactgtaccaatttacattcccactaatagtttacaagagttctcttttttccacatcctcaataacacttgctttcatttatctttttggtaatagccatgccgacaggtatgaggtgatatctcattgtggctttcgtttgtatttctctgatgattagtggtattgagcatgttttcatatacttgttggccatttggatgtctttttaaaaatgtttattcaggtcctttgcccattttttaattggattgttttcttgctattacattgtttgggttccttgtatattttggatattaactccttatcagatgtatggtttgcagatatttttctttcatttcataggtagtcccttcactctgttaattgtttattttgctctgtgggagct

SEQ ID NO: 45503 - DNA, 1157 bp, Homo sapiens
tatcatttcctcttttactccacaatttatactcactgtagaaaatattaaaaatataagaaagtttgaagaaacaaaaaattattactggtactttccagagacatctcaattgatacttttcttccagtctttttttttctatgtaaaaaatatatagttattagaatgcctgacagaaggaagatggaaagagaccactgtgaagcgttcttgatattccctcttcccttcctctccatgttattagggccataccaagaggagaggctgatttccctacacgtgtcagggaaagtcccaactctgcgcagtgaccctcgcttgccattttcgccggtctctagggggcgctgccccgagactgggtggggagggaaagaaggtggtgcgaaaacgcgtttgaacttgggtcctgccgctgcccgtagccggcgtccccaacatggcggctccccaagacgtccacgtccggatctgtaaccaagagattgtcaaatttgacctggaggtgaaggcgcttattcaggtactgatcccgggacccctgccgggctccagcagccctaacccaagctctgctggtctgtgagcttggcagtgtcactcccgaactttccccacttggtttcccagaccacaggctccgccccatggtcggctacccccccggtccccatttggttgtgtcccggtgactgctggccttgatcctttttccgggtgccgccggatctcccatccccagagcaccccactgttctccgcccctgactcagctactgcttcggggctcggctttgccccttccacctgcagccctggtcgtcgccccgcccctgactacctcacaacctacctgtcaccctgcttggccccgccctctgacgctgcttcagcatcctctggtagcgtccgggaggcagctagccccgccccctgctggccagctctcctggcatccaaggccacctggcacgggaggcaccgggtgaaacgaatgtaacctggaccgtagttgtgattttatgcttgaggaaatcgagtacggcgccaaggcctaggttagaaggcatacctgggtcagtggcaaaactgggacctggactgtgaaagtcaacctaggaataacaccttagagtgttaccccgtttgaa

SEQ ID NO: 45504 - DNA, 678 bp, Homo sapiens
caccaacatctgaaaaggctgcaatgccattctctaccacagcagcctggccaggcctgggggtgtgcagtgattcgggctggcacatgcctttctctctgatgtccagagctaagtataaccaaggagggagaagctagtgagaagctgagactgtgtgagcctgagttctgtccaggccagagggagagggcccaggctaggccagtcctagaggtgctgtgtcttttgtgctgcaggcctggctgacctcaagcttgaaatcccagcctcccccactatttatagccccagaggacctgggaagggcagtgtggaggctgaagggaaagtgggaagaacatggactttgatccttggctcaaacacttggttttgagatttggctccactgctaatggaccacaggaccattggcaagttactttatgttgctaagcctcagttttcctatctgtaaaatggaggtgataatccatatgggtcctcatagagtcaacttgagaatccaatgagaatataaagcagcaagtgtagctagctgtcttcagaccaggcctgccatggcctttccaaatgctgccaccccctgggccctgggcactgaggtttcctgcagctgacagcagcggtgcttcaggaaaagctgggccaggcaccagcattctgttagaggtg

SEQ ID NO: 45505 - DNA, 3429 bp, Homo sapiens
atcaggttcagttctcagaggaagcgccagaggagggggagggtgggcgagggtctcggggtggtgggggtgccggccccagcatgtggaggcgacaggatccgtaagaccccacgcgccgccggggcaggaccgcacagggccgccattcactcacttggggcgtccctaatgggcactcgtgcattccagctcgtgcggtgagcgcacgcacgccgccgctgccgcgttcacacggccccccaaagtcgggggaggggtcgtggagcgaaggagctgtaggcagattttctttctctttccgagctgggaaaagggccagccccgtgccctgcacgcctggctctgctttgcagcttgccggtgagccaagagccggtagagcagaggaggcgcacggttcgggtcgtgtcaccatttcttggcttgctgacctggccaggagctggggatggcggcagcaccgcggaggtacgctttgcgctgccctcacgctcccttccgaaagcagtgcccccagggggaaagttcgcaatgccatttgtctcgccggcaaagttctgggatgtcgggcatcttttgaggagggggaagacgcggcacccttactgaggccggcaggccaggaagagaagttctccgggcgcagggcgcagcccagctccggggaccctctgggcctcccgcgtgccggccgggatgaagcgcgctttgcaccggacccgggattcgggggcgggggctggcgctggcagcgtcagacgctgcttcatttcccctcgaccctggggaggacagcaacaagtcctgccccagccatttcatcaccctgctagcacgtgcagattccgggccctcggagcccggcgcggacctcgccttgcctcgcgcttccctttgcacgtcccgtgccatcccaagagtttgcgtggccctgggtgggcgcctggctcccggcgaaacgcctggggcgcgccgcgtgggtgcacggtgtcctctcccagtagctcccggctgcgggggcacatgcacttacctgtattctgcagggacaggcggcctttctgctgggagctcctgtcttggggaccctcgggtgggttggtggcgtcggtcccccgcgccgggtcaaaggtggccaacaccaaagccagggtcatgaactggcccagccgctcggcacacatggttcttggtattaacctcccgtcgggagacctggatcctttgtgctcccctcttcctcctcctcctcttcctccttcgccgcttcccctcctcctcccactcttcctttttgctcgccttttccctcctcctcgcggccgcggctcggatagaggttacccagcgccctcccgtagctctccggagagcatgtgaccaggccgttagcagcgccgcgagtgcccggcaatggcagggatggtgcctcaaatatccctggaagctctggtgtcacttgaatgaaggagtcgagcaggtgttgtcccggcggctggaccaatccgagaccccggcccttttgacaacacggccgggaggcggggcctgcgctcaactactacaggaggaagccgagcgccgctgggagcgccggacaaagttgccgacctggcggcggccacgcgtttgcgtgcgtgtgtatgagtgtgtgtgagcgcggccggagatgcgtgcgcgtgtgcgggtgctccagggcaatggtcgaaaggactgtacaatataagagcgaatccaagctccagttgctgttaaagggggacggtgtgctctgggacagtgtccctggggcccctggctcgcgtcacacccacatcgggttgggaaagtttcctctttccgccgtttggaattcagtgagattcccagcccagaggacttgataaattgaagcagtttcctaggcacaatgatgctgtgggccaactgagcacacatgggaattcctggccttgtgacactttgcattaaaaagaaccccacgattgaagataggagcagaagcactagatacagtatttggtctgagcaactgccctatcttcccgctttggtgggccgtgcaacacctggagtgtcgtttctcgtctttcccctaatccagacgcattccaggctgggctgcagggatccaggtgacagtcaggacttgcatcatttccaggagggtggcagggaggcccaaggcagccctgagtcagcccgccgcggagcatcgcgtgcccggaggccagagcttgaaaggcaactttacgcgtctccaaacacactcctgcattttctcaaagcgctgctcgccaccccgctccgggttcccttttactctccagtcatccgatggaagtggtgagaacaaaaacaaagacaaaaaagctaaatccggggaagttatctccatctcctcccttttcttgttcggccccctccccaagaaccgccgggtcgggatagcccccggctactttctcacccggcccgtggagggaaggagaaagttgggcgccgcttggagcgcctcttcccctgctgtgtgtgtacgtgtgcacgctcacgtctcccccgcgccggggccggggacaggaactgctctcggtcccgtcaccccacggcgcagctcggggggctcgcagggctgggggagggcggggacacgagcgccgcgcccaagcgccccagggcacgcacccggcgttggcgcgcactcgcccctccccccgtccccaccctcctcctggagaacaggtgagccccggtaccagctctcgatcccccacccccgccccgcgccccgcccgcgccctctgcggtaatgcgcctgggaagtttcatcacccactgcccaggcgacgcggccctgggtctccgcggcggggcgcactgcccgcctggttggggccgccatgtgacacggctgggggagggggcgaggagacacgcgggcaggtcatcttttggccggcgcttgacttccaaagctttcctttcccgtgtcccggctgcacgcgggagtggggaaggcggaggcggggggccaggatggccacggctggccgcagctatccggcgtgtcgagctctcctgagtcggaaggaaggagaggagggggtggggagggcgtcttcagagtgggcttcccctgcgctggagcgccagggagcatccataaattgtcactttgaaggtccgaacctgcggcggtagggaccatgcccactattctaatagcaattactccgcgcagccttggatcttttgtgcaaggacgtgcgggtacaaatacattaaaacggccagttcacattgcccaccctgcttgtgtttgcatagttaacttagcttcctagtttatggaaaactacctcctgtagatccttaaaaacaaagcaaacaaacgacacagcggcattctggcctctcctaactaac

SEQ ID NO: 45506 - DNA, 1294 bp, Homo sapiens
aaactcctaaatagaaagcatatgtccatttctccctgaatcatctccagggcaccacaaaatggacattacactctggggaactctgacttgtgtcgtgggtgaggatatgtttaggaaaatattaactgtccctggcaaatttctggaccttgggcaacttccccttccatgaactgtggatgtggtagccagggctgccacttgccatgtgtggctctgaggaggttgcgtgagtgaccagtgagggggcctcaggaaactagggcttagccatcaagctcgacttcttgccctcctacccactctagcctcctgctgggagtagagctcgctctctccttcccccgtgagcttcgtcctgagaacagctgcggaggaggaggctgagtggagcaaacaggaacaggaacagggcctgtggaacacaggctgagcagtgggcttgagggaggagagagaatgaggcgcaaatgaggagctggaatatggagggtaggggactgagaggtgctggagggttggctctactgtcttgcagcaaagacaagggttttggctgagaatgagaagtcagcagaatatctgtttgtctgttgagtcttaaggtgatgactgggtggatgagccccaaagcagtattttggttcttaggctgcagtgagtgacccttctgtatgacaaaggagtttaggagtaaaaggcaaggtaccaatgtaaaagcaatacgggcctggctgtggtgactcatgcctgtaatcccagcactttgggaggccaagtcaggaggatcgcttgaagccagaagttcaaaacaagcctgagcaacaaagtgagacctcgtctctacaaaaattaagtaaagtaagtaaaagcattatgatgattattaaagtgcagacttactctctctcagttgtttggatttggtttaattaccagttgggatttcagcaggctaagaggtcaatggcaccgtgcgtcattgataaacctccaaatgccaaacctgtgtttcatggttcagtacaggtacagagtctcatagagctggcagggaccttggtgtgaggcatctcctcagagtccctgggctgagccacttttagcatgtctggcatcctctgaatctgaatgtaaacctgtgggaggaccttgctggcaggtggcccgctagctccacagggcacctctagaggtgctcaggttgctggtgcctgaagctgcaacccttgccctttggatgccaggcctcgggctcctgtgaagacattgtgctgttttgggaccagcc

SEQ ID NO: 45507 - DNA, 5778 bp, Homo sapiens
gtatttatgatccacccaccctgttccagacactagtctaaaaattgctggggaatatttagaattaacggggaattttctccatttgcaaagtgaagggattgaaatgagaggagctggattcaggtcccacccatctgaaacacattctaagccatccttttgagaaagccctgtcctccaagcagaggtcatgtgtacacaagcggcccatatgacccaatgtgccagtgagggactcctttctagagatcagctttgtaaagtgggctcatacgacaaacatgcagatacttggtcttaggaaatgtattttgactctttcagtctcagcaaggggatagaaggagccctgcattctctcctgacacgcttgacaaaaacaaacccaactagaggtcgccagcaacggaggggcatcctgtgtaaggacttggaagaggagttgtattgtcaccccctggccactagaggacttcatcctatttcagtggaggaaggcctgttaggggcctctctatactggtggaggtttggtcgtcttcccttcacttgatttctgccagtggccttatgtgaggatgcttcatgagatgtcaagtatccgaggagtctgtgacacaaccatccagtggtgaattgctaaggagctcctctccagcctgcttgactctgaggttaaaagagtcttcatgttgagcacaagtcatctctttgcactttcaccagttgtgtccatctgaaaaacacagaggtctgtctcacttctgcatcacagtcccttccaagaagctccacaatgggtaaggcacaataaaatggcttatattcaacaaacacataacactcttcctgtactagacaccatgccaagggctttacaattgctaacttacttgatcctcagagtcaccttatgagacaggtggatgggatattgccccttttacagatgggtaaactgaggtacagaatagttacagatcttgctgagagctatgcacctattaagtggttgggctgggatttgaactcaggcaatcaagctccagagtgcacgctgttaactagcatgctctgctatgctgcctcccaggagatgggccagataaacaatgacatattttaaaaaacatcctaacctatttttttcattatatgcacataacagaaaatttggaaaatcaaaaaaaaaaaaaattacccacgtctcaccacaccaccacaatcatagcaaacattctagtgtttttgttttaatttttaatgtgcatatgtgttttttcatatctttgtgcaagcaatttgtatcctactttgcacttaacatgtaatatcctaatgttatcacacaattttcataaccactcttttaaatattgcaagaatgtgtgtatgtggtgacataataaaagttctagggaaacagttaaacaagaatggccaaaggaggaagagagcagtacaaattgtcaaggcaaggacgcaaaaaacaaaaaggatgtccgtggaaactctggacttgcgcaattacaggaaaggccactacgctgacacatcatgtcaatggcactgagctaggaggtggcagttaggaatcccgtgcctcatggcatctggggactaaaaatagctctgtaaggtgacaacatgtggcaaagacctagtggggagaaaaggggcttgtgttgtgttgtgctgtagtatactgcactagagcaaattcagaggagctgcaatgagaaggcctgcatcccaattccagctttattcattgtgtgaccttggatagttcacttatatgggtatcagtttccttcacctagcatgggaacaataagagttctcatgaagaactgtggaaaaatatgaaatatatggtgtgtcagggatgtttttggttgcaagtaactgaaaacttgatttagagtggatgaagcaataaagacttttaatgagctcacatcacaagaagttcgagggtgaggagactaaggctagcgaaaaagctcagcaatgtcatcaagaaaacccagacttgtttctctttgcaattcaccatccttcgggtgttggttgtatttctttctttcaagtactattatttcaatgactagatctatgctgaagtgatatcgacccttccttataaaagcccagcttcagagagaaattctcattctgtcaaactagtagaaagctccctatctccccaagagacttcttgaaagggcgaggaagcttctctgtgaaggtattacccagcacatgctcaaaactgcttccaacaccatccactgctttctcaccatgccctggggaacatacacggtggcttctatagccctgtcaagggccttctctgcagaaaatgcaccttcataccagctgtcaaattagtatttatcatgttgtgtgattatttgattaatgccgctctaatcctctagcctataagccctgtgaggtcggaaaactcatctgttttgtccattattgtaaccccagagcctagcacggttcttggcttgtggtagctgttgagtatatattcactgaatgggtgaatcagagtcttccatagcctgagaacctgtgagtatttttgcatgcctatgtgactatcacagaatctgtttgccgagtcacagtgacctgttatcacaagccctttacctgatcaataaaaaacatttattttggaaggcactccttgatctcacattccatagcagatgctgttggtgctttttctatatccaccctgggctacctgagttcacttgaggtagtgggcaacagttttcaattcactgacagagtcccatctccagctgcttaagggctttctctgggggtgttaacgcttccaggggaaaacctcaactagttggggatgagagtagatggataattgcccagtcccccatcctctaatgggcctaggctgagccatgttccacgtggattctgaagaacccccagcaggacggagctccaagctgtaatctatcccttgctggctcttctcccttccttgtctcactctccccttttgtttctcctggaataaactctttatgatgtagatatctgacttctatgatatttagatgagacttgggactttagagttgatgctagaaccagtgaagtctgttggggctgttgggattgaatgaattttgaatgtgagaaggacacacattttgaagggcccggcatggaaggttatggactgagtgtttatgttccccccatctcatatgtgaaaacgctaaccctccccgtcatgcgacggtatttggaagggaggtctttgggaggtaattagggttatgtgaggtcatgcgggtaagggtctccataatgggattagtgcccttctgaaaagaggaagaaataccagagtgcctgcacactgtctctgacagatgaggacatagcaagaaggtggctatttgcaagccaggaaaggaatcttccagcaccttgatcttggatttttctagcctccagactgtgagagataaattcctcttgtttaagtcgcccagcctatggcagtttgttatagaaatctgagctaagacactgtatctaagtccttgtctgaaaatccttggacattcctcccactggaggtgggatgtatgtcctctccccttgaatctgtgctgggactcacttataaccaataggatgcaacagagatgatgtcgtgggtggtgtcagaactctttgacatttgctgcaaaatgtgaagcctaatgccgtttcccttgcgtgtgaccttggtgactcatttctaacaaatagaattaagtgaaaatgatggggtatgacttcagagactagattataaaaggcactgaagcttcctgctctctctctctatctctatctctctctctctatctctgtctcactcggttcttggggaaactggctgccatgcttttaggatactcaggcaacacatggaagggcccatacagtgaagaactaaggccttttgtcaacaaccctgaggaacagaagcttcctgccaatagccatgtgaccgagtatcttggaattagatcttccagcaccagccaaaccttcagataattgtagcccttgctgatatattgactgcaatctcacaagaggccttgagtcagaggcagcctgcagaggcacttctgaattcctggcccatagacactgtacagtcctaaaggtttgttgttttaagctgttaagctttgagagaatttgttatgcagtgatagataactaatacactctgctctttctgaagctaggtcaggaaaagcattgagtttctgcctggttccctccccttggatctgagccttgaatgtaactggcttgcaatcagtccagcaatagtgatgccttaatttttgaggttggatcagaaaaggccgtgcggcttctgccaagtattcagggacactccctctgggagaagtcagccaccgtttaagacattagatgccctgagattgccacgtgtaggtgctctggcatctctgctgagaactcagcagataaccagtgaccatcagtcatgtgagaggatcatctgggacgtgcagcccagccaagcctgcagatgactccaggctcagccaacatctcactgcaacaaataagagacccccggcaagaaccactcagctaatcccttcttgaattcctgatctatgaaatcatgagcaaaataacatagtcatcctaagacactgtgtcacacagagatagcaactggagtagtcagcctttgaagaaaaccaaactaacgtgactcatacgcagtcacggactaggtccttttctttgcttatgaaaatattaagcttcgtgaaaggtgctcccaaggcctttgccatgcacgctatttagaaggcaaaccccaagtagaaagttttaagtatgtacccctccacacgcaatataaaacaaaatagaaattaaaagaaaataaaaatatctagaagtgtgcaagaccagtgatggtcaggttccctttcttggacatacacactcccgcttggaggccttaatggagggtgtgcctcttgtttcagatatagaaacaggtcactttgacctacaatatacaaccccaatgttttcacttggtgcttgatttgtggcaggatttaaatttccacccactttttggactaaaagttgtttttgtaattgaaatgtatgcttatcataaaagtataaatactatagaggaatatatgaagtaaaagatgaatcccttttgtctcccagcaatgccatgggttgaattgtgtcccctactcaagttcatatgttgacgtcctaacccccctgaacctcagaatgtgaccttatttggagatagggtctttacagaggtcatcaagttaaaataaggtcattaagatgagccctaatcctgtatgactgatattcttatcgaaacgggaaatttggacacagagacttacatagagggaagacagtgtaaagagacataggaagaagatggccatgtacaagccaaagagagcggagtggaacagattcccccctcagggttcccggaaggagccacccctgccaacacattgatctcagacttcaagttttcagagctgctagaaaatatgtttcagctgtttaagccattcaatgtgtggtactttattatggcagccctaacaaactaacataagtaatttcttgtgtccctccaaaaaaagagtctgactatacccatatttgtgt

SEQ ID NO: 45508 - DNA, 1282 bp, Homo sapiens
aaaagacaaaaacaaaaacaaaaaccccaaacaaacaagcaaacaaacaaaaaacatcctcttaaacacaactcaggcggcaactcctataaacaaaaatcagcataataaacatggtggcccagtggtctttgggcctgtcaactggaagttaagccaactctgtttgacttcatttctgaaggcaaatatagctccagcattagccaaactgggcagtgaggaatttttcatgttcccaacactttcaacaatgccctattatgcatggtgactcatgaatgggctcacatccacggaacagcatgtgtctctctgcagtgagcacagtgctttgctgtatgtttgaactaatttcatagtctggtctccaccacagatgttacttgccttcttttctgacggttgctgtaagcttgttgtatcagagaaagccagaaaaggaaagagctatgattctttgcactgggcaattgagcgttttggagacagtgctctggagagaaacttaggttcaagttgaattaaaagtgaagtcttgggtgtctttgtcaaaaggcatttaccttagttggcgggtcaaagaaaactctcaggtcatgcataatggttgtggctgctgatgccatcagctctctttctcttgacattcaggggaaaagacagcagactgtttaaacagctccttggatgtggcagggtcaaggcggcacgggaaattgtgtgcagaggcagctgatttgcctcgtaggttattataagaatgaaattgggcaattttatagagaatgagaaccccaggaacacatacttggtttctaacattccaaaaggagggaagaattactggcatctaatctgtcccaaggacaccctgccctgttgttttttcctcctgcctggtacacatgccttggctgtgctgagcttcagcaatttttgaagctgtcatggagcagggtgggctcagagccagccttgcttgtgccacctcagacctctgcatcattgcagaccctggaacacccacacctcttggctccctggtgaactcctagcctaccatcaacagccatcagagactgcagtttttccagcaggcctccttgactccccactcctttggtagctgcctctggtcccggcacagatttctgttagtgctcttaccaccttgtgttctaatgtaagaataagaatttaaactcctcggcaaggtctttgcttactgctctgcctcttcaactagatggtggatttctgagagcagtgacctgggctg

SEQ ID NO: 45509 - DNA, 2767 bp, Homo sapiens
caatgccttccagccctctgggacccacctgggggacagagtgagaactgtggttctcagagccacaaataggacaagcaactccatggacagaggtcaggcaaaggcttcatgggtgcccgggaggaggctgcgccaccgagcaggaagtggccaccacaggttgcaagtggccggctgtgggatgggccttcgggctgctggagaccccgttctgcgtggcttcccgcacccgatggcccgttccccagtcttggaatgcttggatcataagggctctgatcttttgtgagctctgccgtttttgtttgtttcaagatctttatcacagttaaataatttttttaggagtttatgtatgggtagtttaaatgttcttgaatatgttttttttcatttaaaattttttaatctctcaatcctaaatacacacacacacacacacacacacacacacacacacacgcagacatacacatatgcagccttctgtgaatattggatatggaaccaattactctaggttgcagtaattacttttatataactagagttggggacttgtgaatcaattccatacccattagcaatgtacgcgtgagccaagattttttttttctttctttttttaacaggactggacagtgttgaatccttggggggaagaaaaaccaacactttttttttaagctgacagcacattccatccactcggcaatgtagaactaatgaagatataagtgtaagaaaacctataattgaatccagcacgtagcaagcatagttgagcggcgagtacacccaagctgaaatcacatgtgctcctgtctaatcctctccgggcgcccagcacagggaaatatttctggattgtgtctcaggctgtgatttctatccaaggcagaatagaaacggccttttccctgggcagaggctttgggctgtcaggggacacctgagttgcctttgataaggctgccgtttggatggtgatttaaagagcaagtctagaaaaaaataaccttgagaaagaggagtgttttggactagagcccttcttgcgcgctttcattccgcttcccttgccagtgtttctcagtttcccccatggtggctggaggtgcgtctgtccccacaacccagaattggggcagtccctcaggagctgcttttcgatcccagccctctggtgtccaacattcagagcaagcccgatcaacccagcccactaagttccctgcatccgaggacccctttgatgcgtggatccgagtgggagggaggccagagtgcaactgtgttttcctttcaacattcctcaggagtgattcactgccaggtgtccccaatacccccagctgctccgtcccctgcagttgttccgtagggatgaggctttttgatgccctgtccttggccctgcctggcttcctgtctggggcaggagagagcagaatggcccccagaaactctgctctggatgtaggactgcttgctctggaagctgtggtgtgtgcctctggcaggctgctctgaccagcaagcggcagctggatgctttgtgcactgaactaaggctgcggtgggttgaatgtgcatacctctgcgtggctcccacagtacccaccactccctgttgtttcctgctcagtgtaacgttctatttcgttatctgggttctctgctgggcagtgtttgagtttagaccctgaccagagagagggagcaggtgctgtgccatgtggccactgtggcggatttatgcaggggcacccactccccggctgcccctgcctccaggcagttgagctgagggtgtttgctcagctgccctggcgcctagcctgtggggccatggccttctgcttctaggccatggaaggtggcatgggcccagagaattgggcaggtgtgctgccaggcccagtccccggggccttgggggcctggattggaagctgcagggaggtccctgggagtcctctgagcaggcggcctgcgttgggacaccctggccttttagctgttgagtcctagttggaaggggcattcattccagggacattctttctgtctggagcagagacttggcctgaaccttgaaccaaaaaccggaacaaactgcactcgtttgctcaacctcgaaccaaatccaaatattgtttatatcgctgagaaccaaaccagggttctggggtttggtttggtttgttttcccaccagagaacatttagggaacaaggctgagctgcaacaggactaggagggaacctgaagaggccctttgtgtggattttggactcagcgagctctcggtcaggggaacactgcaagacacagttaggtctgcagaggttgcactaggtggactgtagggctggagaagctatggggccaacgtctgtcctgaggagaggacagtcacaagtccacatctctgtaaacagtgctgtgtggtgtgggatgccccgtacattgctaccaggcagcagtgatgactaggggatgccaacggtgggtacagaactgcatacatggagggaactttaatgaaatcatgcaccgattgatttttctgaatttatttccggtttactctaggtcactcaatagccatctgcttagcacctggcgccatactgaggcagatcccaaagaaacagcaaagggttggcctccactctctccgagtccttggtacactttgggggctggcgctacagtgtcttggagatacactgtcatgttcaaatagtgtagctcacaa

SEQ ID NO: 45510 - DNA, 1733 bp, Homo sapiens
gagtaggtaaagtgaaatagcgttttactggtgggactgaccaatggcattaggatctcaactaggcaccaaatctccttttatcaatgatgaagtgcaaaataagggtgctgtttctacaatttatcttaattcaacgccgtactagtctgcaaaacaatgagctagagaaaaggaataaacagctataaaatggtgatgactgtgtgttcaaatcattgtgtttaatgccagcttctcagtggtgagtacggaacaggtggaaattctaaagcacgcttgcttatctacttggtttcgaagtttgttattaagggcctcagaggagttccatcttgggaatgatacggtctaggctctaaaacccacattgaaaccccaagttcggagaagggactgggtaaaatcacaactagtagtaaatgtatcaggcaggaacccacgtgtgcatcgctcagaaagctctccgtactgccccaagcggtgtaagacctcaccgctgagatttctaagctatcttttgttttgctctcggctttcgaaaatcaaagctgccacccggcggcctcacgtgcagccccgctccccaacgcccaggcggccgcagctaccttggtgtccacgtcggccaggcagtcccggcggaagctgtcaaaaaggccccggctcttgagctgctccacgatgagagcgatgagctgcgggtcgccgggaggcagcgaggccgggttgatggggccaccgcccccgctggccccagtagcgccagtcgctgccccggcagaggcctggctagttccgccgccgcccaccgcgccagttcccccgccgccgccgccgtccgccatggctgcgccccgggcccacaagggagaacgactatagcttcttctccaggacagaaggcctagaacgtgtagaggtggtgaagggggcggtgaaggaggagggccccaaggcggcagcggcggaggtggcgatggcggcaggggcggtggtgggggcggcggcggcgaaggccccctctgatacagcagaggttgtggtggacgcggcagaaacggcctgctcgattccaggcgcaccccagatggcgtcaacgttgacctttgcattgtggggcgggaagttttctgtggccatctccggcgttctttataggcagcggcctagccgagagaaactacaactcccggcagggttcgtgcttgctcgtcgcgatttcgcggggtaatatgggaactgtaggcgcaggcctcgtgatcgctgcaacccgccaggccttccccgccaggccttccccgcccactctctgctcacttcccattcaatcaacacgtcccagcagtgcccgattataacagtcatctgtggagctgattaaaagtatagattaccagaattatttcttaaagatttttatccagtatttacgggtcgagacctagcaatctgtgcttcagcatgcactcccacgtccttcttgaacaacatgttccgggaaattccggaaacagtggaacagtcaaacttctattgttcagaaatttgtgagtttccctccttttggttttaatagcaatgcatactcattttagaaaattggaaaataacggaaaagtgtgaagaagaaaataaaagttttccttaagtctgtcttatatgtgtgtggatttcctcccaaatattaaatattgtcaatcataagccaatattgaataattgaaaagtgt

SEQ ID NO: 45511 - DNA, 624 bp, Homo sapiens
tgaaattaaaaagctagttaccgaatcttgctcctaacggctttgtccttgccagcaattcgacagagaaatctggaagagagagagcctccacttcgcctgcagtgggttgaaatgctgctggaatgacaatgggattcgcagtgggaggaggagagaatgcgcagtttgccaggaatgaatgaatgaaagggagagagaaagaaagagtgaacttcgggctttaaactgaaaaattccagtgtctcagcagaagccctgatgcctttactcccagacctgctacaaaatgctgagcaggcacatttccccacaccagtgccctctggccctcagcctgggttcagagctaggggccggaaagctggagagttggaatttgggagaggaagtgacttcaaactggggcaagccctgggaggccagtctacctagccagctggctttcctccccccatctcatgtgtctcccctgaattcagacatcgtccacgcccccaaggaattttaagaaatcctcaaaacccaaggaattttaattgcccttaattaaggaaaaatgttctagaagaccactgcagtgtggctcaatgtgatatgggtccctgagctcaggagggtaag

SEQ ID NO: 45512 - DNA, 2010 bp, Homo sapiens
tgccaaataaaacaaatgcaggaaaacctggctgcctcttagagagccctaaacatcccactgctatctgaaagattgatattcatcctctgaaataaagtcgtttctttcccattatcttcaggagcttcagctaaggatgctaatatggaaaacaaggagaggtaagcggtttgattttcccccctttctctcttcaggaaattgctttcttatgcaagagaaatgcaagttcacccacagtggatcagtcatatgataagaaatctgtttgcaagacagggaagctcatttccctgttgagaagctgcatttgtttgagggagacaaggagagagaaagcatttttgctgggcacagggaagggattaaggcatcatgacaagcacattgcttagaaatgagcccaattaaaaaaacatgaacccatctgaccctcatgtgaaaacccagggctgtcaccgtccactccttgatttgagagaccagcacaattattctggagatcattaagattctgggggaatgagttttctggttttgcttgtgatttccatttttctcattactgacagaagctgcatttatggatctttctgtttaaaacaggagcttctcgggctggttttattttgaatcggcctccccaaaaggcataatgtcaaaagcttaaatgggctcatctgggctgaatgtgtgagaaccccggcccctcccacccccaccaacttttttttaaaatttttttttttcttgcctttggagatgggattcacgggcgtgggcaggcaattagattttaaagcgggagaactccgttgcacttgccaggaactgctgaagcaagcaggagagcccgtgggctttgaatcctggcacggaggcaggcgctcccggcccagctctcgtaggatgggtgagaggagtgtgtttgtctttgttctgaaaagggaaatttaatttcattccctgagcactatctgcatggcgattccatagctaggcgatactggctttcaaaagcctgggccattgcctagtttgggaaatgtcaagagttggcatggtccagcagagggtcagcttccagtggcaggccagtgcccaggcttcatgctcagccttcatctgtggccccgttcccaggagggctgctatctctctaaagatcgaaggactttgtgtccccaagccagccttctcacatgctgccggctgagtcacgaggttgggggctgacgtctgatttcaaagccactgagaaagaaatgccaacactcgttcaagaagctggctggtgctgtgcctagaactctggactggaagccgcctggagatggatccggacttggaggagcccgtttatgggaccccagaccatgctgctgctctcacggagcttatcttctcacagcggcgggtggtaggggaagtacatgatgaaatgaacagaaagatattgggtaatgataagggatgtgatgaaaatgagactgagtgatgtgagagatcagagggcttctcggaggaggtgacatttgaggtgagacctgatgagaaagagccagccatgcagaaatctgagggaagagcatcccacacagagagaacagcaactacaaccccactgagcagaaagccagcttggcatgtctttggaacagtgaggaagccaaagtggttccagcgtgatgagcgagggggagaagatgccatgagatgaagtcagagtgataggcactatcgtaggaaggagtttgactgagatgctaaatattttgcagaatttttggaagcaggggagagacagctgacctgatttgtattttaagaggatcactctgctttgtgcatggagaatccattgaagggagcacaagacaggaagcagggttgatcatcagagctactgtggcaaatgggcaaatgaagccatttttatcttcctgtgacaaggcaacttgtcaccaaagggacaggacatccttcttcaagtcaacatttctaggg

SEQ ID NO: 45513 - DNA, 2406 bp, Homo sapiens
gacaatctcttgaacccgggatgcagaggttgcagtgagccgagattgcaccattgcactccagcctgggcagtaagagcaaaactccatctcataaaaaataaaaattaaaaaaaagattgcttaaggcctgtctgcctctctttcaaaggggaaatccctcagcttctttaaataaattcaatcctgccaactagagatgagggttgattagatgagattgggggaagaagccctccttctcaatgagtggtccagaaaccagcagcatgggcaccccatgggagtggtcagaaatgccgacaccgagggccctgaactgctgagtcaggctcttctaatgatccctaagtggtctgcacacacatcatgccttggagaagccctgctgtgaggcacccacgcagatccagacactcactgaccatggtgggaggtggcacctattttatttttatgatgagagggaacctcaaactctactgtgatgtaagtggtctcaaaggccctttgaagtcaccattttatctaaatcagaaataggaaaaaaataagaaatggccagcttagaaagactcaaattcttttgcggggggaaaaaccaggaagaaagaaaagaaaaatacattgtttccttggccatctgtgtgaagaaataacaaaaccaccgttgacataccagcaggaaagaacactggagagcttcacttgacagaattattacaaacgcctcttcctggttcagggggaaaaaaaattccaaataggtttgtgatatttttttccctagcatgcttgcaactcccagtagagccaataaccagttttcaaaaccttttgattctactcatcccctggttaataatttccagtttacccagcaggctacgtaacatcccctttcctgggaaagaatttctgtgccccggctggcagtgaactggtccccttagcagctgacctcctcctccagccctgtggctgcctcctctccaacagggaccctcctggtgggtatccggaacagtgccttagtgttccgcaaaggggagagggaaaaagagagggctgtctcccagaagggtgagtctcttctttaatcatctggagctgagaagaattttctccctgtttcctgggaaatagctgataaaggacattttgtctgctgctgtttatgtatacctaggccgaacaagtctcaaaactctaccctctcctgccccctccggagctggtactttgaaaacataggacaataatgaaagccaagagcaggcagcctgatatgggcctggcaccccatctcctgtttcctcctgcccgctgctgcagccggctttatgccagctgcagccaccagggacaggttggcttctccacccttgatggccccgagaaatatttctttcagggcatggcagaaggggactttggggaaggtgggaccctccctgcagccaatagcacgggccccgtccctccccccatgcaaatctttggccagcagccttggtatcaccaaaccttgccgagatagggagtgccatgaagggctcagtgagtttctggcaatcctctcctctgtttatctgaatgggcccaaaggctgcaaaacaaaccggcaaacaccagggtgttcctgagagtatagctgcacttcctgtttacaggctcagggtgagaagcccctgagacccattctgcctgtgtcaatttctttctgcttcctctgagatccgtgatgtgggagggcaaagggtttccctcccgccgcctggaaaaataatatgcaggccgggaacatgagcttgcctgtgaaggctgctcaaaacgacacacttgcaatttggggtttgtgactaaggttgattcgatcccaggtcttctggtccctctgggagcatctcagaccccgtgagacaacccactttgggactcaagggtggtagggagtggggaatgggaagggcacctgtagaggcataaattgctgggccctgccaccccacccatcctcacaccactctcgccccacccaacctcatcccaccctactcatcacccccaccctcacccccaccgtcaccccactccacttgctgtgtgtcccttgcttcccatgcttccctgtcctggaccacagtgaagcagctgggaattccaagcacagggcttcctaccttcagcaccagtggtgacaccagaggtggattccaagaatacctgaatgacctacaacacattctgtccaggcaggaggggtggtggcactgcctccaggagatggccgaggtatccgggggttaggaccctctagtttgttgcagggatgtcacagagccttgctactgaaagtgtgtccagggaccagcagtattgtcctcacctgggagatggttagaa

SEQ ID NO: 45514 - DNA, 886 bp, Homo sapiens
atgaagtgagtctgggtgtgtgtgtgtgtgcacatatgaaggtgtaatagtgtgcttttatgtacatatattttggacggactgtacatgtgtgtctatatatgtatttgtgtgtgaatagtgtgtacttaaatacctgtgactgtgtaaactgtgtggctttgtgtacatgtatatagaggtggctgggtgcagtgattgctctgtgtgtgtgtgtgtgtgtgtgtgtgtgtgtgtgtgatagagagagagagagagagagagagagagacagagagagagactccaggctcttaccaacacagaagctggaaaaacactgctctccatgtgttctttcagcctccaagaatgtcagcctctccttaggtcagaaaagatgagcacagggcgaggagcttgacccaggccctcactccccaccctcaccgccccagcctgcccccacagtgccagctgtcagggacagagggcctcaggcctcacccccctgccagccagtcactaaggctaaacatttactgaggcctgaggccatgtttgtttaaacctccggggtcactgcacacatgcgatctgttttggatggcttctgttctgcaggctgaggggagcaggtgccggcttggcaaggtacccggggttgcagcttccctccgtgagatgcgctgctgaaatcaaggtttgcttcatctcacaagaagtttaaccttggcaatgcgttcgctgacctactctttcagagtaatgtgtcctaaactctagtgtctttgtcaaccactgtgtatcttctgtaactctcctctgtaactctcttctgcaactctccttacgcttttctttaaattgatctgcttctagaaacgtaagtacctattttagcttt

SEQ ID NO: 45515 - DNA, 589 bp, Homo sapiens
attaataagttgaatgaaagacaggagagagaagagaaggtagcaagcattgataattctctggggaagcaaaccaaacttgtccctggacagagggggctggaagaagtctatgccattctggcaacccagggccctggggacactcagttgctcaagggtggccccacccctcccgaggatgggacctcaggccaggtattcaccttcctgaggctcaggaaggctccttgccaaaaggaacctttgggaaagcctgggttgtaggaatgaaatgaggtaagctatttggaaatgctttggcaagcatcaagtcctttactcccgtgaagcgtgaaatcacaccatcccccggctggatgaaacatgaaagaatatagcgtcgaactgaattttgccgatgagcaaccgagtccagataagggtagtgaacttccctgttctcatacgctggtgaggtagaccatggccctgatagcccaggttctggagctaacctgcctgcgtcagaacctggtggtgacttgggagctgtgtgcctgtgggtatgtcatttaccctctctgagcctctgctctctgtaagacta

SEQ ID NO: 45516 - DNA, 6665 bp, Homo sapiens
ctcaagcctgtaatctccacactttgggaggctgaggtaggaaaattgtttgagcccaggagtttgagaccaacctggacaaaattacttctaaccatctatataactatttttttttttaaaaattagccaggcatggtggcacacccctgtggtcacagctactcggaaggatcgcctgaggccgggaggtcgaggttgctgtgagccctgattgcaccattgcactccaggctgggtgcctgggtgacagagcgaaaccgtgtctggaaaaaaaaaaagggttggggaggaggagagggttggtttagtctgaagtccaggaaggagtcaggatcccgtggataagaaacctctcagtgttgcagttctgaaccttagcagaaggttctggagcagaaaagcccagattggaagtacatgcaagaggcagctgtggaactctagtactttgccatagttgccatgggtggtagtcaattaggatgttttcaacagagaggaaaaaaaaagtgcagctgacagtggcccagataaataaggcattaagactcgctgaagaagagagttccagggctggagtcagcagctcactatcccatcaggagacccacgttctttctttccttctgctctgccatcctttgctgcgggcttttggtcaccttgctagcaagatgggtggtgtattctaaatttcaatatttccatgaaatagaccagtgttccctgaagcattacatttttctgggtcctaccagcgtattagctttgacacttgagtggactcttatctgtaatcccgatgcagacacagtgtggtgtcttgcagtcttttcgtaggaccgtaaagcattcgggagtcagcagggatatgtggaaagagtatattggggccacatacacctgcatttgaatctagcctttctgtgaatgttcaggaggtcacgtcctctttctgtcccttgcagtatctctgaaaatgagatttagggatggtgggtgtccagaagatgattttgtcgtgtctggcttgggccagcagtagctctctcctttattttgctaccaccctttccctccatctcatctcactcctcatgagggtatagtttaaagaacaaccccaggagagggctaagttcagtctcatgaagtgaactcctaatggggaatttcaggtagctgctggtggggagaggcatttgaggtggctaaggtagggaaaatatgggctacttggccactgcttttaaagcagtgtttaaaactctgctctgttcacgcagggctccccagtgaatagagtgtgcaactgggaagcgacagagtgattttttttttttggagatggactttcactcttgttgcccaggctggagtgcagtggcatgatctcggcttaccacaatgtctgtctcccaggttcaagcaattctcctgcctcagcctcctgagtagctgggattacaggcacccaccaccaaacgcggctaatttttgtatttttagtagagacggggtttctccatgttggtcaggctggtctcaaactcctgacctcaggtgatctgtccgcctcggcctcccaaagtgctgggattacacacgtgagccactgtgcctggccacaacagagtgatttttttaaagaaagtgatagacaacaacctacgtcatctttggggtcaagctatcagaaatagagcctcccttgccctcagatgtctccgtgcttagcctggcaaagctatgagtaagtgtggagctcattacaggagccggagacactctcttgctctgccttgagtcaggccgcctggtgttgatgagtcaccaccgcctgccctggccccctgcctaccaggaggccactaccgccggacatttttattttcctttgtggggaaagagtctgacctctgtgctctgtgtctctatccatattctgcctgtcccagacagaggcaaaggttctctgcacagccctccttttttcagggaaactgtgggggtgagggggccaaagaggggaatctgagcaggtctcaggcatgcagataatacagaggtaggagcctttcgggattcgcaagatgctcaaccaggcaccatccatcactgccaaaagcagctgttatgcaaagtagcttaattggcctacaggttggttgagttttaaacccacggattgtaccaaggcaaaggaaatgaaaatatttgacagattctgggtggggctgtgtggtttacacaaacatagaagaaaaacatctggggctagaatgggcctcaaacgacaaatgttcagatatatagtaatataatacacaaacatatatataatatatatgtgctttgtgcgtgtgcgtgtgtgtaagctgagaggaagcacgcagaaatgcaaacatcagcagcttttggatatctatatctatatatagatatagatctatggatatccactatatgtatctgtaaatgtaatgtaatatgttcaaaatacaatcccatggaaggttccagacagaggctggagactgagccgtcaccctgggattgaagacaacgtgacggttcattctccagagttacctcacacctggataagtcacagccggctgtggaggtcatcactgagttgtgtcacacagggaaaaattcattcatccatttcttcgtagagtctacagttgttgttttgagtgtcagtttagcaatcagaggcctggctttgaatggcttccccaggaatctgggaaacttgggtaacttatttaacttccttgggtctcattttcctagtctagaaattggtgtctatttcttggtctggagaggataaaatgaagtcatagaggtgcctggcatataacagaacgtggttcataatcatacataatacgtaatcatgtattactttttttgacacacttcagttgagcacatattttgcgccaagtcttgtgctaaacaccaaggatatagacttgtttgattcattcatttcacagatatttgctgagcacctactacgtgcttgacagacactgtgctaggctcccaggctggcaagggagacagacattcaaaaaactacaaataagtagtataggcagctcctccctcgctgactgccaaagctttgagataaagacatcaggcaagaaaggggcaagaaaatgcacaaataccagaggtattccttttcccaagtctccaatgtgggaagaatataattccgggactactgaggagggggtttgagtaggcagcaaggggtgatgtggatatatgcatgtatgtgtgtctgtgtgtgtgtgtgtgtctgcacccatttctgtgagtgtgtaaaatgtctgtgtatatgcgcctgtctgtgtatttgcatgactacacatggaagagaggcaggtgtgtttgcatgactgtgtgtgtgtatttgtgtgtgtgtatctgtgagtctgcacgtgtgtctctggggatgtgtgggtgttttgtgtgtttctatacacgtgtgccttttgatatgtctttcagtgtgtctacctgtctgcgtgtctctctgtgcctgtgagtgtgtgttggtgtgtctgtgaaggtctatgtgggtgtgcctctgtgggtgtgtggcatgacttgtctccttttctgtcctcagtcgtttctgtggagctgatctagcttgtccttcagaacaaagggaactgacaacgtcagtggcttgggctttatctcccagcctgccatcctgtcagaggaaatgaaatgtacttggcacagtctgctccttatgatgtcattctggctgtgacctgcacattccgctctcctaggtatttgtcttttgattgcttaacgaatacctgccaaagatcaagagaacacgagtgtgggttttttttttttaaagaatcatagctgcggccgggtggctcatgcctgtaatcccagcactttgggaggccgaggcgggcagatcacgaggtcatgagatcgagaccatcctggctaaaacggtgaaaccccgtctctactaaaaatacaaaaaaaattagctgggcgtagtggcgggcgcctgtagtcccagctactcgggaggctgaggcaggagaacggtgtgaccccgggaggcggagcttgcagtgagccgagatagcgccactgcactccagcctgggcgacagagcaagactgtctcaaaaaaaaaagaacaaaaaaaaaaatcatagctgcatggaatgttagctgtccattttctttgctgtgaacttgggagccatggtaaagagacagctttggctttgcagtggtgagagctcggttcaagtctccagtctgccccttcaaaagctgtgtgaccttggagaagacagtttagctctctgagccaagattccttaccttatgagaaggttccttggaggggcaaatataacaatagatgaaaacgttttcagaaatccacaaagtccttaaatcataggatgtcaaggcaagggggcccagagggaggaccctgggcgcagatgtcagggagatgtgggtttgggccctgacttcttcctttcctcaacatacgacactgagcaagttcctggacctctctgagcctcagattgtccctctgttaaataggatagcatcatatataaagcactaaggcaatgtgctggccaatgtgagggcccctaaaacgggagctgttaacatttttaatactacaaaggggctgacagcaatattaatgtctgcccactttcacactttcagtgagtgtagcaaattaaacctctgcaagcgcaggtataatgaatgcatagtgtgacagcagtgatttactatctctcgtttttactatttcaagatgcaacctcagcagagtgttcttggcattaccgcattcttggcaagcaccttgcgtttcatctagaactcagaggctgttctagttgcagagaggagctgagaacaaggtggcctctggcctacagtggtccaggccagctggctgggtggcagacttccctagtacctgtccccagtctctccaactggatcctttctacatgacgtcttcaccttcagcaaaacctcaaatcccccttgtctttgaagatgctgttccccctgcctggaatatccttggctgccactcgacccttcagccaatctgggcttggatccaggttcctgtgcccaggctaaggcagatatccctgctctgtgtccccagtgcaccctgcattcaccccactgtgcatgacgtccagggcatttgaaccgtctgcttctgtgcctggccgcctcccagagggtgccctccaggaggtcagggacagggtatccagcagtcctcggtggatgtttgcagagcaagcacacagagatcattcgttttctgcccccacaccctccagcaataccttcacatataaatatattcagttcatccgaactaattctgacaaccatttggcttaatagaagagatttcagagagctgtgcctcctctgtggctgctgatgttggttttgaagcagatgggtctgtctccctgcatctgcttgttttcaacaactgcaccacgcaggccagaggacaaaaggttcccaagtccttgagtagcttcagcctgagtgtcaggtctagcatgtgggtttgccgtgatggcagtgggcatccatgtggcttgacggcctccgttttggagagtggttggcaagtcaggctctgggattggactgcctgagttgcaagcctcagttctgccacttgctagccatatgatgtgggtgaggtattgagcctctttgggcctcagtctaatcatctgtaaaacggggatgtgtaatagtacctacttgccctgctggtttttgttggaattaaatgagatcagttgctggtgtagaaagaatatttaatgaagttttgctagtgttactattgtgttgcatttgtacccaatggtagtatcagaccaggacctccactctgactgtaacagagactgagcgtctggctagacaccctgcctccatcctgccagagctggtttcccagggctagatgttggaattactctacaatttcagatggatctttttatgatcatgaagcaccctcaaggagagatagatagttcctctgtgtctgagaagggttcttgcctttctctcacttaatagcaacctggcacacctagttggcagtctacttggcactttgcttacctcatggtatagtacaggggtcaacaaatgacagccctagggccaaatctggccccttgcctgttttgttaaataaagttttgttagaacacagttcatttatgtgttgtctgtggctgctttagcaataaaatggcagtgtggagtcgctatgacagagaccacagagcttgaaaagcctaaagtattttccatctggctctttatagaaaaagtttgccaaccccttgtgtaaaagtaaaggattaaaggtttatttcgttgagcaagacagaaacctgagcaccattcccacctctctgctctccctcagccctgacgctggttggccaccagattactttgcctcattctatctcatgcgactaatctcccatcgcttcctcaaataccactgctcagttcagccctgtcccaactcccattga

SEQ ID NO: 45517 - DNA, 1313 bp, Homo sapiens
aggagagagagagagaggggagagagagagagaggggagacagagagagaggagagagagaggggaggggggagagagagaggggagagagagagagagactctagtttatgatgaacattatctgaaagcctctagtctggctggaatatattctgacccatattaaagcaattatttgaacatatatattttttaaattttgcttttctgtctcttccactagacagggagctcctagaaggcagcaagtgtgttttatttatctccgcattccaagcacccagcaatatgcttcgtagatgtttctggaataaatgagaaaatgagttctaaatcctgaagctgaaggaccacggggtctcctcccgcaactgcaggggccaggatattccgttccccgcctccctcccctcccccttctcctgtgagacacactccaagctcgtatgggacgcagacgcctttctcaggatatctggtctccacagtgagaatacgtgatcacatctcactgccagggagagggaggaaagcacgagggaccctcaagcgagaaatggaggctccaaactgactgggaggaaaatggaaactccagctgacctaagagatttctataatgagagaaaaccaatttaaatgcaaatagcctacggtgtcgttggggaaaggcgccttgctacagaggaaggctggaaaaacaaacacagccctcatcacgaggctggttcaccgttggacggaaaggttgctttatccgtttaggattaaagtctaaacgagtgacagagtcacatgcatcgctggcagcatttcccggtgctccacggtgcccactgagaaatgggtgtcttcgaggggacctggcattggccaccgccatttcccgagcccctagcaggtggcaggtgctgtacaaggcacagagaacaaaagctgtgccatacacagctgccttgaggggcttacagcctagggggccgttagactctgaagtcgattctgggctgcaaagagaactaacatttttattgaacatttactatgtgccaagctgaggaccgaaaactgtatgtgatgatggctcatcaaattctcacagcaactccataaggaagagcctattatttttccagttttacggataaggaaactgacgttccaggacagtaaaaaacttacctcgggttgctgggcttcagacccaggccgaatggctccgggacggtggctggtatctccctgtgtgctgggaggagagcagctgcagagaagcccctgggattgtgctgcctgaccctgggttctctt

SEQ ID NO: 45518 - DNA, 2241 bp, Homo sapiens
ggccgggagcggtggctcatgcctgcaatcccagcactttgggaggctgaggcgggcagattgcctaagctcaggagttcgtgattagctttggcaacatggtgaaacatcgtctctactaaaatacaaaaaattagccacccgagatggtgtgcccctgtggtcccagctatttgggaggctgaggcaggagaattgcttgaacccgagacgtggagcttgcagtgagccgagatggcaccactgcacttcagcctcggtgacagagtgaaactccgtcttaaaaaacaaaaacaaaaacaaaaaacagcaacaaaatggggatattcatcctaattttgtttttctagacctctacaaaggctgagccagtaatgtgtacaatgttaaaagaaatatttgtggaatggaatgagcggatgttgtgtaaacattcattgtgcgtgtacgtatttagttctactaaccagaacactgggggaccagaaccagttaccccagtgtctagagaggaggaaagaaatctctctccttagctgaaaccttagtaagagctcagtccagagcttgcttgaaagtaaagatatgtcatccaatttaatccccacaccaaccttacagaaagatctttttatatccttatgctaagaagacctaccactgactgtgccagatctgtgcaagatgcttttgaaaaatgtaattccctttaagccctcacactatctcaatgagacaagaattattattactgaagaggaaatggggtcagaaagtttaagtgaactgctcaagggcaaatgggtagtaagagaagaaagaagatgagtcaggattgaacagaggcttactctgttcaaataaataaaattaaattaaaacggttgcctcttcaccaactgattccctgacattctcacatgcgttcagttggtgcttaataggaactgaattgaaatctcatggtgatctgttagagacttggatcttctaatagatgcttcaaagggagcagtttctatttccggtgcccacggagatctcgagggagatttctccccacccctgctctgacgtcacgatgttcttgtttttctctgggccctgtgactcagcacatggctccagatggcttcctgcatttccagcctgttggctggggtgcccaggccctggtaaagtaagcaaaccaaaactaagttgcaacaaagcatcaacacctccctgcccctgccctctgttatgaagtctttgtagtccactactcatgatggccagtccctccatttctcccctccctccttgccctgagatccccacacttggccccagcacatctgatgcctgaagatgagatccaggagtgatcattctcccagcaaccagtgaatgggcaaaggggcagttctttcaccctttgatcctttattgactttaggcaatttactttctcagcctcagtgatcaaatggggacgctaatattgtctacttctgagggttgtagagttagggttgccagataaaatacagaaagtccagttacatttgaatgtcagataaatgatgatttttttcagtacgcatgtcccaaatattgctcaaatttaactgtgtgtctcatgactttatttgttaaatctggcaaccttatgtggagtgtggagtcagataacaaacgcaaaaatgctttgtcacctacagaaagctgtacacttcatgatatcttttccatgagacgtatgcatgtgtacccatgacaaccagctttgtctggagcatagaacaggtagtttcaggcaggtagtggagaatgtgtaccacctgagtctatgatttgagatccctgggtcttgtttgtcaatggactgatctttgcacatttcgcttctgagccctcaatgcatccatcttgaattctctcaaatgcttgaatgaaaaatataggagcaacagaagcccaaaaggttgcctattactgattgactggcatgtgtcataggccaaatctccttttgattttgtggttaaagaagaaacaagtagaataatttataagtgtaaatccttatttattacatgctttattatgtaataaagaatgtatgtgcacaacatttagctctaatatgttctaagagccctgcttaacacagaaaaacaaaaggaaccagcataccataaatagactacagtgtttatttttgatttggggtgtctcctcctactagaaatctaaatt

SEQ ID NO: 45519 - DNA, 4260 bp, Homo sapiens
catgcttcaccgggcgcggtggctcacacctgtaatcccagcactttgggaggctgaggcgggtggatcacaaggtcaggagttcaagaccagcctggccaatatggtgaaaccctatctctactaaaaatacaaaaattagcctggcgtggtggcacatgcctgtagtttcagctactcaggaggctgaggcagaagactcacttgaaccggggaggcagaggttgcagtgagctgagattgaaatcacaccactgcagtccagcctggacaacagagcaagactgtgtctgaaaataaataaataaatgaaatgaaaacaaaagcatgcttaagcaaaaaagaatcagtccacacagctcagaggtgcatggccaggaggctaggtctctgcctagtaccccattatggtcctgctttcctgtggggtgacctgattctctgattctccactgtgcacatggaggccccagctgttccaggctggcatatttgcacagtgagcaatccctataggaaaagagagggtctcttcccccgcatttctcacaaaagtcttggaactgatcctcaatggccactcttccatcatgctcccatcctagagcccatgatgggcatgagagatattctgattggctgagcctgggtccttagtgctgggggtaggggggttgaggggtgcagagaggagagaatccaacctcaccttaactacaaagagtgagagtggagaaggggatctctggggtgctgtcactcaaagaagtgaggtataccaggcaaatataaaaaacaggtgtgtcttccagaaggagtttagccatccaaggaaggtttggaagtggaaggccaggaaatcaatagagtcagcactaaccaggcggttttgagcttgtagcccctgtctttggtctccagcaggcctcacaagcatgactcagtggtgaggctgccgcacatgtggttttgaaaccaacctttccccttggccccagcagtgcgttggcgtgtccctggggctggtcccagtgcccgcctggaaatgcccttggtttgggcccctgcctgaatctctggaaaggtctttgatctcctcaccccagctcttccattggcttcctcctcaccctgggacaaagtctggcaattgctgaggaaaaggccaaatgccaccttgcaatttgctgggtcatcctggaacaagtgctgctggggctccctgtccctacccaagcagaggaaagttcaggacagtgggcagatgccaccacccccagaaatgagtaaaccaggaggctgggcctggggtgctggctgagaccctggccaagtgcttatccacagtgataaatgaggtcatcatagctgctaaggtcagtcctcctcgggcatgtaaacagcaaataagctcatgattggagaacacccttcgagagaggaggctcctgcatgcagaagatccttcctgagcaccttctgccctccatgtccgagctgcacactggaacagagaggtgaataaaacgtaatcactaccccaaattgcttgccagcaatgacaagagacagacaggtagcaatcagcccacagtacggtacacagagtctgtttatagaaggacactctagagcttgggaagtacagaggaggcatgaaagctacagccgggggacaagtgggagggacccaaggagccagggactaagctggcacctgaaggagaaagctggtggggtgaagaaaggagggaaaagccatccatcctgggtggaagcagcatgtgcaaaaatgcagtggttgctcaggggcctgtaagtggagcccagggcaccgggagaggcgatggaaagaggggagattagaggggaagacgggaccagtgttctcaagttctttcattggggcagtgtcgaggtctggtccagactcattccctctggtccagatcattttctctaaaacaattaaacagaaactcatgcagacccagtgtctccctccataggaaatcgtcttagcaaggactcggcactttctgggaaagctaaagggatgtgtgactttctgggaaaccacatcccaatatttcctgcattctcaccccagagcccccaaatcaggctcgtttctaggaagtcaaatcaacagtggaggtttggactgttgcagccgccaggtggaaagacacgcagcccctgcacacctgggctggctggacaaagtggccaggcagatgcgcaggaaggaaagcctgcaggtgctgaaggcgcccccagaagaaagacaaaaccatctctccttgtccccttattttgtcatttgaaacatcatttaggggaaggtgaaggccgtttggtcatatattcccagctgcgtgaccttgggactttcagtttcctcagctgaaaaggtgatgtgagaatgcccctaggtctggcaagccaagcacctgtgcgaggagatgccaacttactcttttttctgaagaccctcctcagcaaagcccgaaagtgctctctctccccacgctggagaccagtgtgctctccagacagcaggctttccctggcagggtcacaaaccaaatgtctaagtattaaaagttttaaagcaagctaacaaactgctagataaaatatagcatacctcctcacacgatggcagagcctcctaatgacctggaaggccagatcagaatggctagactcctcggagtttcacattggcatgcggcagctactttccccgttcttcatgttttcctgcaccgggagaaaaacagaaaccgggcactcggcccacgtggccaagctctacccgggtcccacaaagcagctgccctttgtccagccttcagggctggagcacccactggccatgtggttcacactagggaaaatgggagaggtccaggaggcctcagaagtgggcatggtcatttggacggggaaccccagggtcctgggaatccagagcgtcctctggaagggaggcatgtgagttccaactgggcacagccctttgttccccaagactcctcactcgcagggaggggcagtgtctaagcaagaccttctaaaatgcagggcccagggctggagcccctcttaccctgatcagagagtgctggacagggaattggagatgcaagaatattagggttttaattaattaattaattaattaatttatttatttatttattttttgagactgagtctagctctgtcacccaggctgagtgcagtggcaaaatcttggctcgctgcaacctctgcctctggattcaaatgattctcctgcctcagcctcctgagtagctgggattacaggtgcacgccaccacaccctgctaattttttttttttgtacttttagtagagacgagctttcaccgtgctggacaggctggtcttgaatgcctcacctgcaatgacctgcctgcctcagcctcccaaagtgctggcattatagatgtgagccaccacacccggcaggaaatcagcttttttattttgctatttccaagtgagatctgaagtaaggcccacaacgtttctggcccttagtctttcccagagtcaaccaatttagtctctgtgcttccttctggctctggcccagggtcctaaagctggtcctgtccttcctaaggccagtggatatgggtcatcagctttgtaaaacctttctgcctggtgccagcacctccagggctacagttagccttagtatttgacacctggacttccctcagcagcaggcctggaactgaaaagcaagcaaacgcatgcaaaccttttatttctttcacctgtgacctgggatcatgaacgctgtggagtcctgaccaggctcacctataccagtgtccaggtcttccaggcaggacaggcctccatcagacccattcacagatctggctggctctcccaagccaggtctgtcatcaggatctttaaagaaaatcaatgaatgaagcaaaatgagaggacagagggctgctggcttagtgcagggaaaagctggtgtatgggcccgtaagttctgcagtgtttggacacagataaggccttacactgaatgtggggagaggaaggggaccagaggaggaggagaataattattactgttcagtgagtttttccaggtgccataatacgtgttgctttttttttttttttttttttagatcaagtctcgctctgtcaccaggctggaatgcaatggtgcgatcttggctcactgcaacctct

SEQ ID NO: 45520 - DNA, 989 bp, Homo sapiens
ccgggaggcggagcttgcagtgagctgagatcgcgccactgcactccagcctgagagagagagtgagactctgtctcaaaaaaataaaaataaaaataaaataaaatacaagctccctcgagctgctgtggagcagagattgccagggaagacactggaatccacgggagctgtggggaggtgagtgtgggagtccaggaaagaggtgaggcctgtccccttctcatatctcagcccatttgcccctgcctggtcacatgttggatcagcaggtcacacgttgggaaaggaagatgaggaaatcagagtgttgaaatccactgtggctgtgcatggcaaaggctctgccctgttggggaatggggcgtggcccatgctgccccttggacctaagcctcattcactcagcttgccatgggagacactggcgcaggggtctgtgggcaggggccaagggtgggcagggtggtggtttccaagggcattggcctgagggtcagcagagctggctcaaccccaactctgatgccagcggcacgccttgaatgaaggagctcacctccctcagtctcagtttctccatctgtaaaaggaggataataacggttcttacattgcaaggtcattgtaagggttcaacaggataatgcgtcttaagcttttaacactgtatccagctcaggataaactctcagtaaaggatagttatcatcattatcatcatcattattttactattctagatctaaaatatttactccatctgccccaggcacattaagatcataagaccttcccatctaaacttgtaagtccctttgattagtgaggttggctaccatttaatactctgggagaattttgcgggcagtgtttggatcttcttcatcattctcttctccttcaagtcacacagtaggcattcctgtctgtggtgactctacaccttcatttttgtggatagcactcagaattcctggagttacctg

SEQ ID NO: 45521 - DNA, 970 bp, Homo sapiens
acatcctatggcctcatttttcactcagggtgaaagcaaagtccttgcagtgcctgtaagtccacatactctggcactgtcatatctgagactttaactgctaccatggtcccattggctcaccctgctccagcttctccgccttcctgcagttgtttgcatatgcttgcaggctcttgccccagggcctttgcactccctctccagggcccctcttcctgctgatataaccatggtatgcttcctccatttgtgcagatctctactcacagaccgtattattggagagatctttgtgccccctctatgaggagtcatatccctccactgatctacctccttttctaccctttaccttgctatacttgtctatcaccatctgatacactatacgtctcactgactgttcttttacattgtctattgactccctaaaatgtcagctctatggggtcagggaccttgcctgactcttgcactgatgtttctcaagagcccagtgccaagcacatggtagatcttcagtaaatatgtatccagtgaatcagtgtgcacgtctgcaaagaggctgtgacctgcgtgagttttccagctgtaagagtcaatgaatggccgagactctccgtgttgcatctttcctagaggaaagggcattgctgttgcaattgcctcacaatcaactgtgctgggtggatttactgggtaattgcatggcattggcccaaactgcagaagtagatcttttccccatttctttagcgatctcctgaagagcctgcccagcaactagacccttcagctagcacctttactaacagggctgggtttgtccagggtaccggggtggggtcctggatcctctgagaaaaggtcagtagaagtgcaaatgctggtcccccagacactggatttgccggtcacacgcagcagaaagaacagcatgttctttacaagcagagaacaaacctct

SEQ ID NO: 45522 - DNA, 2223 bp, Homo sapiens
aaaacaactaatggcaaaaactgcaattacttttgtaccaacctaataggtaccataaaccagagaactttatttctcacagttctggaggttgggagcctgaggtcagggtgccagcatggtttggctccagggccctgctgcaggctgcagattgttattgtgtcattgcagggtggaaagaggaaagagagctctctggagtccctcttataagggcactaatctcttccatgagggatccactctcatgactcagttgtctcccaaaggacccatctccaaatatcaccacattggaggttaggattttaacatacaaatctggggagacagaaatattcagtccattgcgtgaggcataaatgtagttacatacgttaaatgtttgaaacagcatctgaatggcccatcttggtcgcacgctcctctctgattttgccaggaggatatggtcttaggattggatcagcctgggtcttgcacccagcctctgtggacaggctatcttggtctgctatcctaagaagtggagaggggaggaaatgtgtcggccgacacaaacagcagccacccctgtctatttcaccctcccggccctatgaccttgggcaaatgactcaatagatcagaagagactcaagttatgcttctgtcaaaacttctgagggaaatgatgagaactgcacaatccccaccccatacaaggtacccgacaaatgttaatccctccattgggcaaatggaaggcaatgtggccatgactggcagcggagacctgacttttggcagagcctagtcaattacccaagtttgggagctatcctctctgggggccagatcataccacaaactttcaaatcaatgtcaacaggaaggtcagctggaactttcaggccagggtctggtgcgtgggcctgggcctggcatctgtttagtaaacatcccccagccttcctcttggaagccttcctttactcactaagcagttttggtccaacctgttttccttttgtagctgggattttgtaagaggccaaattccaggctggggcaggataaacaagatcgcatggctaatgattggtgagtctgcctggaatgcaatttaccacagaatttcagtgaaggagactttatcaccccctggactgtttacagggaggttgttaaaacaggaaggaggttccaggctctgcggggtagctgcctggcattatttttctttgccttcttttagggaacaggggcacctgctatgaactaaaaattctctgcctcagtctgctttacatgtaaaatccccttggtcaaaaccttccattcatctaacaaattacagcttacaaaagattctcaattctaccactaccccagtttggcaggtggggaaatcagagctcagagcagagaagtaacttacccaaggacacgcagccaggaaatggcagggccaggattagaaaattttccacaaagtgaatcaggcaataatagtgtttgtgctccatcttcttcatctgcagctaacctttccctctgggtggggatacgtgacttgaatatagtctggtgatgaagggatgagaggagggtcccttgttccaatgtggatattaccacagtagagaaagatttttcttttaacccagctcagaattttagaaatttgcatccttgacctcacactatcccttctctgttcaaacaaacccctagcctctccaactccagtgttggtggctctctttctaaagggtgttgagatagacaggtcagtaaggagatttgagtctggctcctgggatggcagcaatactgatgtctacacgacctttggcaaatcactaactatccgtctccgggcctgagttttcttttctgaacaaagcggatgtgaagtctagatgaagtcggaaatcccatccatgcttctgaaaattctgcttgtggctgcaccactgaggagcaggggcccgggaaacgcctggctctagtctgcatcttatggccctgccttgctgccagcatccacaggtctccctaagccttggatgattggccccggctgccccgtctggtgagctcagcgcagcattcgtgagaactgatggtggagataaagataggcatgctgaaatgaggcacactctgcctctgcccccacacagccctcctccctcgagacagctgtggaccagcctgggggaggactggttgcca

SEQ ID NO: 45523 - DNA, 1651 bp, Homo sapiens
gaaactgaggctcagtgaagtgaagaggtttgcccagcttcctaccacaagtaagtaagtggtgcaggtgaacgctgccttgcagattttcaaacatgtcagccttctagtccaatcgtggtcttcatgtgattctcttatggcacctaactcactgctttgctattacagcacttgaataatttaaaaacaaattcttaatttaataaaatcaataaataaacctcatgatttgtcttcccaattgaaaccccagcttctgtgacattcgggcaatttctaagctagccagagaacctcctggtcatgttaggaataagcaaagccgtttgggttttaataacatggtgagaaaatagtgtgactttaaagtccttattagccctggaatgcattttccaaagcaggaattagctgacacaggcagagtgtcagctggaaaaacaaggtctgggttaggtggcccagaaaaaaacccgctttggtgcccagagcctcccattgatttcaattgctggttagcataggccagcagaacgattgtcccgtcggtgaatgtgccattagaaatgaccccaccagctaatgggggtttaagagtggcttgcttggttcttggtatggttcctgttgtcatttttagtaagaaaattacctgtctgtcattccctttaaacttgcacggtaataattaaccaggccccaaagagaagctggttacccttaaccttggctagatgaaagctcagtgacccattaaagtctgtgaaatcatttaactctgagcagctagggaggtcatgttgtagctgatatttggtggaaaatggatgtaagaactcacattggttcattatctcacaatttgcagagttcaaggtaaccttgaggtcatgagcaaggactgtcactcaggcgtcagcaaaccatggcccactggccaaacctggcccaccccatacttctgtaaataaagttttattggaacatagccatacccgctcatatacatatcatctgtggctgtttttgtgctataacagtagagttgagtagctgtgacgaagaccatatggcttgcaaaacctaaaatattcactctcctaccctttacagagtttgatgacctctgccctaattcacaaaggccaaatttgaattccgcattaaccccttactagctatgtgaccttgggcaaatggtttcaccctcattttcttcttcagtttcttcatctgttaagtaaagctgataagagcacctatgtggtagatacactagagctcaccaacaactttttcagcacacataatcttttgaacttgggcatggactgtgaacttggactatgtgacttgccctgaccaggaaatataaggggaagtggtgtacatcacttctagatagaagcattcagagctggtatgggttctccacactctctaccttgccatgttgaccaaggaggcaggccaggtgatttgagtgttgcaactacaggatggccagcttggattctcaagcaattacagtgaaaagagatcccctcagctcacaaagaatattgagcaggagtgagaaataaacctttggtatttacttcagcaaaacctagctcatgccaacaaattggcttacttcatagggttt

SEQ ID NO: 45524 - DNA, 2948 bp, Homo sapiens
gagaaaaggagatgctaaggagagaaagggaggaaaacttagggaccaagaataaaaggatggagagggagagggaggagtttgggatgattccaaagtttggcttaggtaaccgaaagaatgaatcatggcaccattaaatgagctagagaaaatcggaggaggactagggctagagggagggtgatgggtacagttggccacattgaattgacagcctctcattaaacccagacggtgctgtagaccactggttctcaaagtgtgttcaccaaaccatcagcatagcctggcaaattgctagaaatgcaaattcttggcgccacccatacttattgaatgagaaattctagtctggtttaactagttctctaggtgatgccgatgcatgataaaattcaaggaccactgggcaggagacagaattctgagtcaagatacctggagaaaaaaatttggattattttagacaaggcctttccttgggcctcagtttcctcagttgcaaaatgaaggattgactgggctataagatctccagtaagtcaccaaacctcactgggtctcagtacttcacccctaaattaccatctcccccttcttctttagtaatagaaccccaatttttaactaagtacttgggagtccagaataaagatcatactttccaatctctttggccaccaggtatgtgactaagttatgaccaatgtgcagagaatggaagtaatgtgtgtgtcatctgaaaagtttcctcaaagagaagagttctgtcctttttcatcttttcctctgtcctttggtctggaatgcagacatgatggctggagcttgatcagccatcttgtatcatgagggagaaatcacacttggaggagagaagagcaatgagttagaaggaagctgggtttctgatgactcattgaaaccacccactagctctatgttaactcttctaaacttcttttatgtgagaaaggaactattttattctagccatttttatttttgactttctctgctcctacattattactagaaaatcccttgtaccttatacttttattaaaaaatactatgagaaagccaaatcagaatatttgggggcagggcctaggaatctgcatgtgatgacctcccctgggaactgatgaactctaaaatttgaggttgggtgcctaggaattaactcatattattgttttatagttatatatatatactccatgaacaagggagtaagaaatttgggtattaaaaagattattttgttttttgtttttacacatattgatgactttctttgcactttttttgcttaagggtttggaattgaaactctttgtagttcaaattctgcccataaggaaatcatcagacaaactggaccagtgcctgtgagcttatggctatgttggggttagaattttgatccctgactcccagctctccgacctctggaccctgcagcttccctgcaacctctgaaaagttacttttttcccagcattgcaagtgaaaatcctccagcctagccacaaagtgttacagggcagctgttcagcagcatggccagttttgatagatgaagcgaagtgtgtccaatcaaaacagcaaagggtaatctaggtcagcagcctggccacataggtgactggagccacaaaagaatccaactcatcccaaagtgatgcatgtcacagtttggaaggtcaatcctctgttctagctcacctaaatctttgccaggatacgacaatttcaagtgaagcatatctgtgtcctggacctttccaaaccatttatccaataacaatgcactggagggattggcttcaccactcactatcaaaatggcttgttaactattcactctatgttaatgataatacctcaaatgggaaggcaggaagaaaatcatgtttaaaatgcagagggcttgaacaggttgcaaaacaaccaataaaagaagaaaacacgacccagcattagttaaaaaaaaaaaatcggttctttctaagtaaatatgcattctttccaacactgaaagagagtgaagatcagaagtggggtttaacgaaacctgctttcatgacttggttttgtttctatcaagcttgccttatggtagtgagcttccaggcactcttggagaagaggatattccaaaggtaatttcacctttctttcttcccctaccttcacaggccctgcctttgaatattattattattattatttttagtttcattaaaacatatattccaccactacatcagaatgcttattaacgttgccaggcaaagtaactgctgggtattaatctcttggaggcctggaccatatacttgtccagacttgtcttctcactacagctcactaaccaaaaccaataccaaggacacagtgtccttcaattcaattacagaaagttcctgggctgctaactctaaaaggatcaagtgctttaaatatttctgcaggcaataagcatggctcatgtaatgagctttttttgtatgtgtgtcatatttgtataatgtgcccctgtgtcttagaaaaaaagaactgaaacagggctgctgccttgtacaactccattggatgcattcacatactagtctgtggtgccttatgaagttgcacagtgcacaaccagggcagccttgggtagtggtcctgatttttggtcattagacaagcctctggggagctcgggtgtgggctattgggagaaggctgacaatgcatgcttcaaggaaagtggtgggagacattagagctggactggggcagagttcaccttgtgtgattatggggtgagatttctactgcttgccgagctttaaaagaggctggtgaaggagatattaatgccctgcttcctggaaggctctaggttctgggtgtggttgacctcaaaccccagagggggctgggcagtagct

SEQ ID NO: 45525 - DNA, 5919 bp, Homo sapiens
aaacaagcacgagaggtacacagggccgtggacgcttataagagagaattcagaagatgctgttggtggcttttgaactgattcctagaaataaataggaatttaccaaaggagaagagtggaaaggacatgtaaaaaggcattgagagtgtgtttggagggggaagaggcactaagatataccacccattaggtagaaaggcttgaataccagactaacaagtttggcctttatcttcgaaataatgggcaaccatagaagaaatcggagcatgtgagggtcaagataaaattttagttttggaattttccctctggtattgcgtgtaaggtgtactagatcgggatgatacgggggcatagccacagacgcctcagctgcatctctgcacctgggagactgcaccagatgcgagcctagcagaatgggagagtgggaggtgcgggtgagcgaatggaaggttaagggagagtccctcgtgaggtctacattctgggcaagggcaaacgcagttctaggcaccgcacagctgctggcaagacccgcctccccttccagatccctctggggcggagctcgggccagagcacgtgatgcttggagcaccacctttactgtgggcacccttctcattcatccgcggtttcacgggccgccacttcgatctccaacaccttgaccgtatgccttcgtgagcgaggaatccgttctccttgacacgtccctattgctcctcctgcaaagcccagttagggaagagaaatatcaaaggagtcccttgcccacacaaaagatggcgacctgctgcgctcactctgggtgggggaagcgggttccaggcgccgggcctcactaggcgaggcgcagacggaagaggcgtctctggaggtaacttttcgaccttcctgggagtagctctgaagcgagggggcgtggcctcgcctgagttctaacagatgattggtcttccggcaggtaggtggggaatgagtgctacccccacccctccctcttcgaaccggaagtgtctctgggtctttccagctggttgtcatttcactcggctcggtcctgaggagaaggactcagccgcggctgcgggacccgggcaccgggaggcggtggcggcggcggcggcggcagcagcggcgacagcagaggaggaagaggaggaagaaggaaagaaaaagaagaaccaggaggagtcctcaacaacgacagcggggactgcgggaccagggtaaagcggcgacggcggcgacggcccagcaaccgtgaggagaaacaaaagccttctaaattatagtttaaaaaaaaattctgggggaaaagagagagaaagccgaggggggaggcccttctcctttaaaataactacggtagtgggtttttcctttttttcctcttttttccctctctgcggagaatcgaactgagggaactgaacaaaccgcccctgggtcccatgagggaaaaaaaccccggagccgcagagaggggaagaggcagaaaccgcaggaccttccaggtcgccccctcggtccccgcacccccaggccgcccgctcaccctcgtcgagtctcgctaatccctcctgatcgcgacccccgcaagagggagaaacgggtgtttccaacccctttcatgggggagaggaagccgcggggagcccaggaacagcgaccgcagcaagatctgcacccggagcctcaggaacagccccagaggccaaaactgcaccctgcgaaagagcagaaaacaggaccaggaacagcagaaacctccctgcaatcatctttccattagtcaatgctgatttcctctcccgaaaccaggaattcacttcccaccccagataacctaatataatctatatatataaatatataatatataatgttcttaaattattcctgatttttttttaaccaagctgccaagaaaagaacgtattcccctcttagtcctattctaatttttatgtgagtgaatctaaactgctgaggaaaaccatatgtgattgttaaattatatatatctatatttttactccgcgcaaggcttattcttctacatccatagatgcttgagaagctctgtttttgtcattcatgtacattttcctttggaaaaagaaagcgcctattttactaaccaaagacttgatttttaccctcttcatttttattccctcctaaaaataagcccaattggatccaagtcaatgttttaagagatttttttaagagttgttttttctttcagagaccagaattccaaatcagaacaatttaaggtgataagctgcgatctttgagctagctataaataagacatttcaagcaagcaagcaaacaacttaaatttggggtagaggaaaaaaaaggcgtgagacatcaggttgtcattttttattgtgagattctgctcctaaagataataaatgggggattacgggtttggagtgctagtgcaaagcaatactgggaataaatctgcttttccagtcagattccatccacatctgcagcctccacaccatcaccaaaatgccacccccagccctgctgcttttataaataataacacagctgccaatggcagcagtgctgggtcagcttggctttttcctgctccagctacccataacattcaggatgagatcttggggtcagaaaaagcaaaaagtcagcaacaggaacagcaagaccccttagaaaagcagcagctttccccaagtccaggtcaggaagctggaatactgcctgaaacagagaaggcaaaatcagaagaaaatcaaggggacaattcttcggaaaatggcaatgggaaggagaaaataaggatcgaatctccagtgttgacagggtttgattatcaagaagccactgggctaggtacttcaacccaacccttgacatctagcgcatcgtctcttactggtttcagtaactggtcagcagcgatagcgccttcctcctctacaataatcaatgaagatgcaagtttctttcaccagggaggggtccctgctgcttcggctaataacggtgctctgttgtttcaaaatttcccccatcatgtcagccctggctttggaggcagcttctctcctcagatcgggcctctctcacagcaccacccacatcaccctcatttccagcatcatcacagccagcatcagcagcaaaggaggtctcctgccagtccccatcccccacccttcacacatagaaatgctgcttttaaccagctgcctcatttggcgaataatcttaacaaacccccctctccgtggagcagctaccagagtccgtcaccaacaccctcctcttcctggagcccgggcggtggtggatatggtggctggggaggttcccaaggccgagatcaccgcagagggctgaatggtggaataacgcccctgaactccatctcgcctttgaagaaaaattttgcaagcaatcatattcagctccagaagtatgctcgccccagctctgcctttgcacctaaatcctggatggaagatagcttgaacagggctgacaacatttttccttttccggtaagattatgttccattaatagattaggatgaataaggaaatagcatggtgtaatatctatgtaactagagtttgaagtgcccgtattcacatcagagcttttcttagagagaaaatgaatcaataaccagactttattttagcaggagtgtaattggaacaaaatattcagctgtttctttggcagttttctaaattgtagccttaatcttgtcatagataattatgaatacctggtagctggtgatgtagtaattattaactataatacctttcttgcctgacatgagaatcagggtcagttttttccctatttagatgagaataaataatatatagatataaatatatttcattgcagaaactattgaatgttttctgaagtaactatataactaaacaaatttcttttgacactataaggtagtgattcactgaaaaccagctattgaattacagttttctcactggttggttgcattttaaacctggaaactctctgaaccttgtaggtctgaacagcctgaattgatggacttggcaattcctcttaaacctctgcaaattttggcctacctttcatcagtaaggactatctagtgagagaaatgatctaaatgttttcttcatccccatttatttttgaacactgtgaaactgttcatctcagagtgactctttatgcctttcacccgtttgtttattttccaatgttaacattgaagatgtagataattaaaccattcctaaaaatagatccaggcaaagatcatttgtctttcttgctaccagaatatctttattctggcaagagtcattgatgtttttgaattaatgagcagcaagttaggttgatatgaactagataaagggaatttcataggtggttgaacgtcagatgctccactaaatgtatatactttgagggtatgattatatgtgtttaggaaatttataaggggtaagaatctagcattgaatctagttttcccaacaacctcacaagatgagttctgttattatccccattttacagatgcagaaattgaatatgagaaatatataataacttagccaagggtacacagctggtcagagtacaaattctaagttaaaaaaaaaaacaaacccaaggattgaaaatatgtatacatacatgtgtgcacgtacacatgtgctacagctagagggttactttagaaatatttctgcaaaggctgaaacagattatagaatcattgcactgttcccaaatacgatgttagccctagcagaattatctgttttaattagtaattgactgagagggaggggaagtttgctaagagaaccctatgtcattcctttcctaaggattcaggtgcagtgcatcttaaaatatgtgggtatatttagttttcgacttctaaaaacgatttttttttttttttgcctatcaaaaagctgttggcatttgctttaaagggtttcagttgttaaaaccaaagatcaattactgtgctttagtggtcaagtaaaaaggctgtttaagacattgacaatcccatgaagtctatttttaaaaagttgcctttgatattcctttgaacataaatttaaagaaaatttaatgcaaagataagttttatgaattattcttatattgctaatttaaaaattgtaagttaacattcagtacattttaactggattaagatttggctcagaactaaatacacctttttttcttattttgctactatatgctgacacagtgaatttatgtggcctcacagtttggttcccattctcagcttactgacttttgttaagattgctttaggaaaaatgaaaagttcagacaatgaataaaatatacatatatgcacattaatattttttcctattgggctaatagagtgtgtgttatgtgtgaaatctttttgaacagtttctttggagattaagttgatttatgaaataatagttagactaagattgatactaaaatatattgttagaaactaactcttcccttagaactgctgtcttttatattgattatgggaaaaggatggtcagtgtacctgactttcaaatatggtaagattcaaaagtaaattgttaattctgctcctcatccccaccatttgtagctctgtgtgtgtgtgtgtgtgtgtgtgtgtgtgtgtgtgtgtgagagagagagagagagagcacacgcacacatgtatgaggagagagctagcagtggggtgatttgaaagtcacaagagaaataaatgatttgaaaaaaatctctatgacaagaaactcctaattgggttttgaaaaagtctaaagaagtaagtaaactgaccactgtgattc

SEQ ID NO: 45526 - DNA, 1331 bp, Homo sapiens
tggaaatttgtaaattagaaggacctagttaaatatgagagatactttcttttcctactttcaaacttttcctttttgaatattgatgaacatgctgattgatatatcctctgattcaaataccttgcctatttgaaagcaagtcaattcagctctgttattgaataagtttaaaccatctatgaaaaaagtaaacttagtaacggccttcttttaccttcaggtcgtctaaactattcatatccaggatccgatagctctctgcttattaatggtaagtgataattgatttaccctagtgaagtgcacaaaactgatacagtagttgtgcttcagcagtggagaaatgacattagtttgttctgtaatgataactgtaagttgctattaaactatcagctattttaagaatgattcttttagctcacaattgtggcagaaacttttctttttaatatgagggccaactgattccctgtcctgaacttggtgacaatgagaatgaaaatcccataatgatacctaaagattggctttatctaatattagcttctgtagagtgacctttgaaatgtcaacataaaagccatttccacgtggctggaaaaatgttccaagaggaaaggataagcagagatctaaaaccagaaaaaggcagcctaaaaccacagtgcttgacattgcataggacaaggtcatttgctgtttgctgtctaacaaaaacaagaaacatgaagttttattggctttccagtgtcttcattagattctcctttcctgtgctaatgttctgttgagttctctttttatgcgcatagtgaagcaagctaagtttcaccaggaggagggaatatccactcacaagaattttagtgtctgtttttttagtatcatggtctaaaacaattgggtgaaatacagaggtcttgtttacttcttttctactaatttgctatggaatgtggatttcaaatttctgtgtgtagaaaatgtcttccatttgtcaaagctcattttaagtcccacgacctctaagaagtgttatggactaaatagctatattctcataattcccaaaacaaataaaaataaaaattcttccactccttgattttagtatgttgtgaatgaggagttaaaaattatttttataactggatctccttttgaaatcaatatgttgaaggattgttgagccaggagaagttagcaggagatttgatgtttgagaattgctgggtacatcagatcttctagagactaaatagtttataaaatcttacttggtcatcagatgtaggtcttttcatgctacagtgcgagaaataata

SEQ ID NO: 45527 - DNA, 976 bp, Homo sapiens
tctagaaatggtcctctaaatgtgtgattaccaatattagaacgggagcattttatgacaataaagtgacagctgacaattttgcctatagagttaattatggtctataatacatgaaataatgtcctatgaatttcttttatctttcagttttttgagtagcctaatcagaacactacaatttacttgagttaatttaatcttctctaacttccattcaatctcaatccatccgtccattcattcacttagtttgtaagtcattcaataaatatttactgaatcctttgttctgtgttatatcaagtatacaaacaggaatgcccttgaggtttcctgcccttttttttgtttgttttttaatcctgggacatagggaagacctcagcaagccctatttctcaatgaattgtactcacagatttcttttttttttttttctttttccacagccgccacctctcaccgatttattccttagcttggtgtttcatgtattcaacaaacgttttagtgcttagggcaagaagttcctgtcctcatgagtttatttcctagcagatagaactgtatcacttgccagtactactcagagtgtggcctgtggactgacctccagtctgtaaacttagtttgtagtgagataggaatttagaccagaatgtgtaatcaaccacattactgggcacaatgtttggtccagctggcgatttttttttcatagaaagcctttattgatgagggaagcaatatattgatttatattttggggtcacctttttatttcatggcacactggcactttcatgcatgctgactttgatatccatcactctgaggcattgtgctaaaatagattgattttatcgtgttgttctcaattcaagatgtaaaaatcatcaagtcagtagcagtttttgctttttatgtttcatgtcatgtacagtctacttcactggcagtaaaaaaatttaag

SEQ ID NO: 45528 - DNA, 1875 bp, Homo sapiens
gggacttggctttggggtgataccaacggggtttctatccttggactactgctgacggaccgagtgacccagaccacattaggtaacctctaagaatcggctttctcatgcattagaaggggcaaataatatcttcatcactggtttgaggttaggatttaacaaggtattcacgaaaaatgtgcttcagtcataatcatgaggggtccccagtatcattaacattattgccccagatctgaccattgttggccccaactacctaaggaaagtcccctcacctctcagagagatggagatatagcctccagcctccacccccgcagctagggtggaacagagacctgaccgcctctgcccctgccttgcaaaacaccccaacagcagtggctcattgccctggaaatcaaatccaccccaaggccttgcaagacctggccctggctcccagcctgcccttctatttccccttcttgacggcgggctgccgccgctctgcctgggccaccgttctggtaatgcaggtccccttccctggtgcaccgtcctctcacctgcctcctaggaaagtctctgcctgctcctgccctgctcccttccttgcttcgacccagctccacgtggagctggctcctcacttctccttctgcagtcagctggcacatcaccatcacctcctccctctgagaggacttcctgggtctctctgaagccctcctggccatcatgttttatttgttatcagaagcactcctgactcagcactaaataggatgcataattgtcactgcctatcatttgtttacctttcttgggggaggaaacaaacattctcttgctcgcctgtgtcctcaggacccatcatgtgccttgctcctggtaagcacttactaaatgtttgctgaatgggtgactaacaggatccctatgtgagctctctttcttagaccggctttcaaaattgccatgcagaggagggctgtgcttcaggattagaggcccacagcttatggggccccaaggctggatgtttcacaaggaaagtggatatcagaatgcctgataaaggtagcctggagcactcagagaagtacaggcaaaaagttcacctgaggatcttgtcaaaatacaggttgcgagtcagcagcgctgggagcctgagactacatctctaccaagctatccagtgggctccatgctactgcttctccatagaagttagttcttgagaaagccgtgaacgttcagacctgggagtaacgctgtcagaatgagtgcagcggcagggagagcagagcctgggggggttgtgggtgggcctcctgcctgacccaggccctagggacagggaggacaaaagcaaaggaagggctggctcccctctatgtctgagcagaccagccagatgaggctggaatctgttttctagaatttgccttagtcccagggaaaaaattccatccgggagtttgctcattcattcatctatttatttcttcaacaaatatttgttattcttaggccccgaggatgctgtggggacaagacaggtaaaggctctgtcctcttggcatttatgttctggagacaaaggcctgggtttgagccctgggatgtatgtgtgtgtgtgtgtgtgtgtgtgtgtgtgtgtgtgtgtgttgctgtgtcggattttggtgagtcacttcagcttcagcagtgcagccttagtgaaatgtgatgggcgtcattgggaagatctcgggaaagaatgccgtgaaaagataaggcactactgttatgcacagaaccactaatctgaatttgcgactttataactgttacccaaagttgttgatctgcaaaagagcattgcatcagggagtttctttattc

SEQ ID NO: 45529 - DNA, 1780 bp, Homo sapiens
ctctgcctcccaggttcaagcgattctcccgccccagcctcctgaacaggtgggattacaggcgcccgccaccacacctggctaatttttatatttttagttgagacggagtttcgccatgttggccaggctggtctccaactcttgacctcaggtgatccgcgcgcctcggcctcccagagtgctggaatttagaggcgtgagccaccgcacccggcccacaatttgtttattataaaaaaggaaatctctcttcccctcaacacatagaattggcctgggcctctttccctcacagagcagtcctggggttagcactttgaaagttaggggacttaggagcaaggtgtgttccggctccccactccccccgaatcagtcccctttccactcttgggaacacaatggaagctgccagaagctgtggcagaactagcggagggtgaaggaacagcatttcaggcagatgaggtgggtaggccctttcctgacagccatccccgaggtgtcctcaggggaccatatgtcccagacctgctgctggccaaatggaattcatgactaggaatatgcaccgtttggttaactgcgctcctgcagctgtttgatgaggggtggggagggaggagccagtcacctcttttgtgggctgaaattccatctcacgtcatggatcctgggctcccaggctgcgcacccccaagcccgcctgcctctctccgcttgcgccgcggctcacgggggttggagacgcaccttctccacgtgccgttttcaaaaagctcaggcagggagtcgtgttttgagttgaggctactcacttcacttcttggtaataataaaaattgagggaggcggcgtcgggggaaaaaaagggtttccttcttaaaggggaaggggggagatgaaaagggacgactttatccgggagctgtgactgccacctggtggacaatgtcagctgagcaagacaaaggctccccgcttccaatcagcccttcctgcattcttcactcttctggtcgactgtctccctccgggagaagctccgtggaggggaagagagaaacaaccataacacagtgtgacggatgctgtgattggcgcggtctcgaataggggctcaggctgtggcagccagagccacacagcctgggtttgagtccctgccccgggacttccctgccgtaactttggctgagcgacttaacctctcctgtgcctcctccttcttatctgtaaaacgaggctcacggcccctacctcacagaattggcagttcctgtctcctaggtcgtaaggatggaataacgcactccatgtacataccgagcacgggtctggctcagagacagggctcagaaattggctggtagcatggagagaagcctggagccacgggaacctctggatggtgtcaggtgctctgcggcccacgggggcgggggaaggactagtgagcagaaactcctcctcgccttatcaggtgagagagacaggcatgaacacttgaatgaacagaaaaggcacgttccggccccatggtctccttggggaggtagacttgtacacaggtgattataatttgtaataagcatattctgggatgggatgcagtgccataggagcttccccacctcgggagtgggcagactttggggaaacagtggaggtggcgcacgctggtactgagggttggccccttgctgcaggtgaaggagatgctggagatgatgtctaagtgttgagataagccacagtcctctccccctcttaccag

SEQ ID NO: 45530 - DNA, 649 bp, Homo sapiens
gtctttgtttgcttacttgttcattggccaccaaatcagacaaaccctgagtctagagcagagcacagtgcactgtagttgtagaatatttatcaaatgaaagaatgaaaccagcatccatccatcaaacatttgaggcacacctattctgcatttgaccttgtgcaaggcatggagaggaataccgcgtggtctctgccctccagaaacactcaggagctcacattccaggaaaggaaggtaagtagacacttgtcgcccagtgcaataaattagtaggcgtgagggaagtcagtgcgggtcacagtgagttaacaaatggtccagagtacaggctacatgcctggcctgctgaatggaagggagattaattaattactcagactctgcctgccaagttgtatggaactctgcttgatctctgaccctctcgctttaaatactgcccttaagtcatatattctgagaaagaaagagtcatctccccaacttcagacgaggaaatagaacagagccccaagatctgtcttggttctttccttgctaacaggccctctgagtaaatccgagtaaaaaattaatcagacctcactaataggggctgtgtttttggctgggtaatagaatgtgctgagtgctgcggccgccg

SEQ ID NO: 45531 - DNA, 1021 bp, Homo sapiens
aataaagtggaaatttcaaattaccctaattagcattaattatgtttctgttgactcccatggaagagtcttcataataggttatggtttttcatatttggccccaacaatcagacctttgaggtggatattttcatctgtatctgaaagaagaaatgaactgaatggtgggggatggggcaaagtgtgtgactaaagttctcggcaatgtccctttatttagttcagaaaaaaaaccaaaaaagagtcaagagaaatattagcagacctgatgtggtggatctaaagctctggctgggagctaaagttggaaataacatttaataatgctaataaatcatttttaagttattcattttaaataagcactcttctgacatcttaaagggcaacaatttttttttaactttaaaatctcattacattgcaaattagaacaaaaagtgaaggaggcagaggcagccctggcttgaacctaaattagaaaccagacaaacatggatttaattctcaattgcatcattttctcaattgcataactacagctgggggatctgggcagtcattctggtagaagttcctcaagccatcacggatgcaatgtgcataatgtcacattatgcaatgtggacattgggaattcctttgctgtcactttagcctacaggcatggttggcacaggataaaagtcgcagaagccccagacatggtctgctcgggtgaatagttttgtaacccattgcaaaggtcagacccagggtacctgagacctggagcaattggtgtcccagttttagggccagggttgaaataactgccgaatttcatgggcatatgacatcttcctccttctgccagactggagaatgatggtctcatcacaaagagaacagaagtgcaaacagtgccattccccctcttccttatcccatcagtgagagtagcctgaagttatagtggggaaacctaaaacctgtgaagctttgtttttctaagtgaaaaacataaaacacagagaaa

SEQ ID NO: 45532 - DNA, 397 bp, Homo sapiens
atccggctaattttttgtatttttagtagagatggggtttcaccatgttggccagcctggtcttgaactcctgacctcaggtgatccaccggccttggcctccccaagtgctgggattacaagcgtgagccatcgcgcccggcctttggcaccttggcttaagatgaaaggaccatattgctggcacagaccctccggtgcctgtgcttacagctgtctcctcccacccatggcctcgccgtcacacacagcgtccaacagactgggggtcagagacgcaattgttgccacacacattccccaagaactgcatttctgtagagccctaagtcacgcttaacgtaacactttcagatcactttccccaaggccgtcattctccaaacttcttgacttt

SEQ ID NO: 45533 - DNA, 816 bp, Homo sapiens
ttttacaatactccttattctaagtttcatataggcaactggttctcacaggatactttcattgatttttgccaaactcttggattcttagccaacctatggttgcaactgatcaagtttagttcaggcatcaccttgcttgatgtagtaagacaaactgaaaccataaagatgtatgtgtgaacttcacttattagccaataacatgagcatctcccataattgagctaaaaaaaaaatctctatctggagccctctttccaccggggtgattgaatgtttatcttagttaattcgaagtttacctacctcctcattttctagggattacatctaatttccaggacatagtgggagggcccctgtgatcttgcgacagttcaaagagctcactggttacatagttgctcatccgtctgtcagtacttgtgtttacacatccctcattcctgtccgtgggacactttggatctgctagctgttttcatatcccacactgagagcccaagaatctccatgaagcgaagtccccatctcccaagactcatcaccatgctctgtcagggaagcaggatgcagattccttctccgtggagcacattaatatctgagttttccacgttttccctctgctctcctcttccttcagcctgatgaaatcatttccattctgtgggagcagtaaatcctgacatgccttaaacgccctgatccagtttagctgagagtgcaagggaaactggctcactctttgaagaaaaataaagctgaattcctacctctcataccgcatacaaactctagacagattttaga

SEQ ID NO: 45534 - DNA, 1320 bp, Homo sapiens
gtgcagtggctcacacctgtattcctagcactttgggaggccaaggagggcggatcacaaggtcaagagactgagaccatcctggccaacatggtgaaaccccgtctctactaaaaatacaaaaattagctgggcatggtggcgtgcaactgtagtcccagctactcaggaggctgaggcagaagaatcacttgaaccagcgaatcagaggttgcagtgagccaagatcgcaccactgcactccagcctggtgacagagtgcagcctgatgaggctctgggaaaaaaaaaaaggctaatatcatctggaatttaaagttttcattaaagagttcatttaaacaaacaacaaaaaatatggttctcattggattacctgtcctgtcctgatgaaaacttcactttgtgatacattcagcaagatctttccttggctccctgaacttttgctatgctcagaaatgctcccaacctttgctgatttaagcattgttttgtttttgctgttccctgaatggtcaaagtccatattaaaatgcaagggttttgcaacttttgttgatgcaagcctagcaagaattcccaagcattcgttttctgaatcaaagagaaatgtcatttcagctttatggaagctgtttctgaaatggttgtaattgaaacaatgactggaaatcatacaaacccttgctttccacttttaattccctctcatttttcttccttcatccatctgcttttcccactttttcaaatttggtcgcactagctcagatgtcaccacctctatgaacatctcctctcctgttagtcagggatggaaattcaactcacaagagcttaagattttaaaaagaaggaaaaaggaaaaggaagggaaaagaaaagagttggggtgggggatgggggttattgactcccatagctggaagcccaggaggtagaccaggaggcagatctagcctcgggcttggctgagtgtagggcctgacatgatgtcatctgacttctgtctctctcacatcttttagcctggcttcacctccacagctctagcagcccttaatccacattctcttagattagctgtctcaatatatgtgtgtggtggggaagggaggcggggaggagaggttacttctcttccccagtgcctacatataaattcagggcagaattctgtttggcccagcttgggccatgtacccatgactgtggcaggcaggaggagatcaagtaccatgattgataatcagacaagatcaaatgaaatgtggcaggggaattccccaagagaaactgagatgctggaaagacaaaa

SEQ ID NO: 45535 - DNA, 2746 bp, Homo sapiens
gccaccatgcccaggtaattttttgtatttctggtagagatggggttttaccatgttgtccaggcttaaacttcttagctcaggtgatccacccactccggcctcccaaagtgctaagattataggcatgagccacagtgcccagccaagaaggggcgatcttttatatatctttttgagcccagcacttggcacagggtatggtacagagaaaaagctagttaaacattcataggaatttggaggatgaggaatagcactcaaaatatctgtgacatattgcttaagttttagaagttttgtttttcacgtttggatcattaatccacctggagttgagtttcatgtattatacaagtagggatttggctatcccagtactgtttaatgaatatctaacctttgtcccctgacctgtgatgccaactcacagcaggtttctacatgtgcaggtttctacatggatggcaactctatttggctccgcgaggctctttgttgaccccggagcaaacacaccacctttgttatttaccattgttttataacaagttttgtatctgcaggacaagtcactctgccttgctcttttcttaaaagcttgtttggctgtttctggctctttatttttttcatgtacattttgcagtccgcttgtgcagttataacacacactccaccaagcacactagtgttgtcgaatttttttttattgtcataggtcatttgggagagaatttacatctttaaaaatggaatcttcctatgcaatttatgatgtaattcaccatttattagatttcatttgccctttaaatatgcccaggttacccacctggtccaaaataccatgattcctctcctggataaccacagcatctggctaaacagcctctctgcctccacatcccctcccacgcagtctgttctccataaagaagacagagtgcgccgttgttgttgttgttgtttaagacataaatcaggtcgtggcactaaagtcctaaaatcgccttgtagcgccagtcttgccaagctccacactttaattgggtaaatgactgcgtgaacggatgctggctacgccaaggccctgggaataaagaaatgataaagaagcagtcccttaagggaaacccaaatggaacatagtggccccagcccgcgcagagccccacaccaccgtgaggatgggcttggagttcctcttggacccggggcgcggtcgctaagccagaagcggagtcgcgggcgcggggcggggcctggacccgggcctggacccggagggcgggtccctgggcctcgtagctcccgggcccggacgcgcgctcacaggcgcgcgcgaggacgcgctccggggacgcgcgaggacgccgtggcgggagaagcgtttccggtggcggcggaggctgcactgagcgggacctgcgagcagcgcgggcggcagcccgggggaagcggtgagtcgcgggcggcaggcccagccaggtgggtggggaaacgcgcagggggcccggcggaggcgcgcaggcttgggcaggctcgggccgtgcacccgcgggccggctgcggggagaccccgggctcggaggtcggaagcccctttgcgggccggggatgcctcgggccggggggggggtccctgcacctggggatccctggcatcctgcggccggacaacaccacgcttccagcatcccgaggcccagcatcccgtgggcctcgtccccggtgggaagggccctccgccgcgtccccgcgcgcctggccgcgctgtcttcggcgcctgcgtggcgaactcgctccggggacaccaagatggctgcctcgggggcagcggcagccaggtggcccagtgcctggcccagcgctccgcgctctcggctttgcctcctggtgctgggggtcggaggggagaccacctggttcctgccctagaactcgcaatccagtagggaggtgatgtgcaaggaagtagattcttggagtagtagttggtcctacagggaccttgcattttcacgcttttctcctgaactttcacgtctgtcacaggtctctaacctgcccagaatgacaataaacagtctactaagtgcgtgccaggtgacttaggtccatatacttttacactcttccggccctgcgaggtactgggtgttggctctataatccacatgagaaaactggggctctgagaggttgagtgcccaaggtcacacagctggccatccatagtccaaggccatctgagtctcagtcgtaaatactgcgttctcaaagacgcttttccttggctatgctgtctaaaattgcaccccccatccccccacacaccctttgtaacacaaactctgggttttttctctttagtgtcttttgtcactagttgaaattaaaggtgtttacatgttttcttctcctcatgtgaacagggcctattttgtgttgctcagcctatctatcccctgcgcataacaattgcctgcaccaagaaggccctcaatgagtatttgttgactgcctgaacgaaaaagcctagctctgcttcactccagagcctgggcacttagctgctccgtaggcaactcttttctgcgcccccatagctttttccctgcacatttctcacagtcctagtccctcttctgcgttgacttctagattttgacttgggtgcctttggattctcccttctttgtccatcccccttttactgatctgcttcagtgttctaggcatt

SEQ ID NO: 45536 - DNA, 610 bp, Homo sapiens
gagacaatgctcagcatctttagtcattagagaaatcaaaaccaaaatcacaatgagataccacttcacacccactaggatggttagaacaaaaaagatgaacaatgacgaatgttggcaaggatgtggaaacttggaaccctcatacactgctggtgggaatttaaaatggtgcagctgatttggaaaacagtctggcagtgtctcacaaagttaattatagagttatcacatgccccagcaattcacttctcggactatgcccagcaggactgaaagcacatgtccacgtggaaacttgagcccaaaggttcagagcagcatgattcataatagtggaattccacttccaccaagaagtggaaacaacccaaatgcacatgaactggtgaacggatcaacaaaatggcatatccatacaatgggatatcatttggcgataaaaagaaaggaagtttttatttatgctacgacattcacgagttgaaaacattgtgctaagtgcaagaagccagacacaaaaggccacctattatgtgatttcatatgatgaaacttccataaaacaacaacccatagagattagtggttagtagggcatagggaaagg

SEQ ID NO: 45537 - DNA, 1442 bp, Homo sapiens
tagatcacacagccagaaagtgctggggctgggtaggagcccaggttctccagcttcatgcccggtgccctgtccccagcacccctgagcccctacccatgtgtccttgtcctgaggcccccacttctcacagctcctccttcctttgaccagctcttttctccttttatcttccacagtgagaactcttttccttttgaccagggacagccaggccttcgtttgctggatcaatcttaaagctccctgctgaccccagccttcctgccacccttgctgcctgccatcccagcctaggtttcctccataaagtcactggggaagcaaggactcttgattgcatgacacagaaccctaactcaaactggggaggcgcaaatagtccacgcaacctttctgagcctcagtttgcccttcagtgtaatggggtcataatgctacatgcagtacaattgatgtaaggatgaaaggaagctatgcatgtcaaagccttagaaccgtgcctggcaggtggtgagcactcattatcagcgtactatttgtattattattactactgttattagcactactcaaggcatgcggggtcagagacactgccccatcttcaaagaactcactgttaagaaggaaaagcctaaatatgtatacaaagataagtaaacatcccaagatcacagcagcctacgagacagcagagccagagtgaattttgcagtgtcagagtgatacaacactgcagtcaaacaggtgtaccatgatccagcgccacagtgggagcgaaaaaattacacaatccattgattccacaaacatttaccaggtacccgccatgggccaggcgctgtgccaaggcatcggggctgcaacaatggccagacagacgtcatctctgcctctgggggactcccacccagcagaagagataaacccagaacaaataattattgaagttcagtggagctcagaagaaaaattatattaggccataaaatgtctaccagaaaacagagcttagtctgagggtgtagccagcaaggcttctttcctgaggacctggggattaaagggcatgacagtcggcagggagagcagctggatgagagcaggagagtagacattacacacagtatttaggggtgacatctgccttctaccataaggcagagcagtcgaggttcagtccagagtcgaaatgtgtggagtctaatcccagctctaccatgtgctagccgtgacctctcagccaatataagacacctcttttagccctagttccttcatctgcgtaatgatcacaatgtcagtaccccactggattaagtgaaataacacatgtgaactacttagcacaatgccagtcaatcctattttagatgcaagtgatagaaaaacaaatgtaaatggtttaaggccaaaggagttatatttgttcatgtaac

SEQ ID NO: 45538 - DNA, 1471 bp, Homo sapiens
ccctctgtggttgtgcagtacacaacctgcacagctctatgtggtactcttgccttacagccaaatgcccagacaatgccattgacttattctactctaataacaccccacgtaggtctataccatcacacaccaacaacacgctgacataggagtcacatcccatcaggagggaaacaccaccacacaccgagagtcagagacgcacgcctgccctgccacacgctgatgatgacacacagcgcctgtgtcactgcacatgagtgctgccactctcccacctgcacagtcccacactgctgggcactcaaatacaccattgcacacttatgggtttgccctcacaccatgccattccatgttaaaggaggtacactgggaccctcacagtgatggcacccggccattgtcagtgacaagagggaaggcactcatcagatgagcaaggtggcctagagcccttctctgtgtaccacccccgcagttctgtttcctcgggcacacggccaacctcccaaaccaagaccaactctgcccctccaggcttaggctagaatgacaggatgtgaagccagtgtctggagcatttgaatgtctccctgcacccaccaacgtaactcccagcaagctcaggaccagccagcgagctccagatcagagctggtgcctggcatttcctagacaccccctcacctcccacatggcatccaggatgccctctgggctgaggcaattgcagggaagaaatgggctgacctttggacaggcaccttacgcaagctctctcactgatcaccacgtttatggtctgtgacagttgtcattcctcacacattgttcctcgatcctcacacaaagtactaacattagctctcttgattggcttcctactgaacattcaaggcatatacataacatcttacaaatctgttcaaatctgaacccctcctcctgcccccagggctcataaataaaagtggaaattcagctccagtcaggataagtcacctgaagcagagccacatctatattttaccaggtgactcttagaagctgtctacagagcaggctcggcaagaacctgcggctgggcctgtttgcactcccgctggattagagatgcaggagatgaaggaaatgctggcaacccacatgacatgaggaccccgatctgggtgtgaattcgtggcaggtttttttttttttcttttagtgagaaactggagaacagggaagactataaatgccaatgtaaaaaaaaatctgcagagcaaaagttacatttccataggctgtgggatgtgtcaggagagaagcagccccacgtgctggaaggaccacagaactcagtgtcaggcaagcctggtctggaaccctggctctgccaaagattcattttatctccctgggcctcaactttcccatcttgaacataagtgcttgtgtaaattaaatgagaaaatgtaaatta

SEQ ID NO: 45539 - DNA, 1497 bp, Homo sapiens
atttctgtgggtcaggaattctggagtggcctaagtagttctggattggggtctgtcatgaagctacaatcaagatgtcagccagtcctgcagtctcatctgaaggcttgactgggctggaggatccacctccaaggtggctcagtcacgggactggcagctggtgctggctattggcaggaggcctcttttccagagcctcttcatagaacttctttagcatccttgcaatatggcagctagcctcccccagagtgagtaatccaagagagcaaggtggaagctgcaatgtctttcatgacctagcctcagacacataccataccttctgcagtattttattagccacaccaaccagctgtgattcaatgtgagcggatgctacacagggcatgaatactgggagggaagctccctggggagtgcccccactccgcgccccccccccaccccttgcaggttgtctacctcacaatgcagacctcagcacacctgcagctctttctttagtctctagttaataaacactccttcattcatccatccattgagaaaacatctcctcattcctttctgccatcagcaagtgccttcctaccaagggcctcctcacagccaaacccaggctaagcactgcctttcagacccaaatctgacatggtcaccagagcctgtagtcgggacatgcaaatcaacacacagcaagcagcctatcatgagcaaacacttggaacctggttccaagccaggcttcatttgaccttgatcacattatctcatctctcagggcctccgtaaaaagagataagacttgcactgcccagtcatggcaaaaatatgttaaagtgcccagcacaaggcaagttctcaataaatgatgactaagactgttaatattactattctaaacaaacagaacttgcacccccaaacccgaacagtcacacacctaggcttcccccacccttcaagagaaggctgggctcttggaccccaacgctggcccccagttcctgccagccaccttctccaaggcctagctgagccttgccttggctctgcctgccagagcctccccagctgccagccctaatcagccgctccagccaagacctcaaattgatttgccatcgtttagctgggaagcaagagctcttcttgactcctggccaaaatccattctgtgatagcagagtaatcacctccatggcgggtgtccggagaatgtgatagagatctaggacacaaagtctccatcctaacgcccagaactccagcctcgctgcagcacacctctggtctccctcctccctcctgcacctgtgcggccaccatgtgtgtcctctgcagtagcatgtcccctcctgtactttacgtggtctgatgcagtagctctaaaactttgcagcacagcagactagcctggggaagctccaaaatatactgaagcctggccctggccccctgacaatctgattcaattggtatggggtgcat

SEQ ID NO: 45540 - DNA, 1266 bp, Homo sapiens
cccgttcgcaagcagcagcatcttctttagcccgtaagaaacctctgtgagttacgtactatcaactcacatcatagttgaaaaaactaaggctccaagaggcaaagaaactcatccaagagcacaaagttagtaagacacaaattcatggctcaatcataaattcctgttacctggagagagattaacacctctaataagtggcttccatttatttaaagtgatattcactgcaactacactctggtgcaaagactttgaggcaagcagatcttgttccaaatctggattctgccatgtactgacattgagacttgaccttatccatttctgcatctctaaaatggagcctcaaattccttcctcacagggctacttactaatcctttgtagatcttagtaagtgaatctggaaactgctaccctgacccaagaatgagggccaccccatggagttcatcaaaatgagagtcaacatgtgggttttgtttggtttgggacaaaaccaaaggacagtgatctctaaacaggaactatgaaaagatatataaccaaaggcagctttctttaaaatatttgaaccatgtagtcatagctgaacagatgcctagaggaggtattcagagggttccagtgagaagaggagatgagagcaacaaaactaatgaaactagatggataataactgttttagcagaccagaggaagcagaaacctaggctactggtggggaagctcagaagctggccgattagcactgcaagtctccagaaggcctcaggaattgaaggcaccaaatacctctgaaagaggcatgaagatgggacttaaagcaggtagtctggttgaaagtctgtttaagaagcagttggaaccaaatgatcaaacagcatcgccaatagcaatccctcctgacatatgcctccgggtgaagtacatagctttggctatgatatcttcctggcaggatgtttaacctgaatttaaaaggcctgtagactaaactttcaatccataggaaatacaggggatagaggaacaagtcaagtgaggaaataatcagcaagcctagactgtgggacgttctagaagactggccttttcaaaaagccaatgtcatagattagaaagaccaaagagatacaacagccaaatgcaatggatcctggtttttggtttttctgtgttttttttttttttttaggccatttggagaaatttgaagatgaatcagatattaaatggtgaggtagccagcctccaaga

SEQ ID NO: 45541 - DNA, 704 bp, Homo sapiens
tgaagaagtttagttagcttgttataaggttaaaaaaaaatccaagttctcatatcaggtttcattaggatgaccaatcatacattcttaagactaaagacacttggacctggtcctcttcctggtagaccaactttgagctgtttaaaaaaaaaaaaacaaaaaaaaaaacaaaaactggggtaagtgggaaatgcccggatgtttccccttctccagcagagcttgaaacagtaacagcagcagctgccgccactgagcactgggccttctgatcctcacctcaacctgccagtgaaattccccattttagagcggggcagtctctgtagttaagtagcttgcccaaggccacagtgacagagctgggaacatgagatcatatcaacaaagcagcaggaatgcacctaaatcagataagatgcttaacatttggcaaatcttccacttaataaatggagcttcaatactgacatgattcagcagccaaactgacattttttaggataaggtaaggcgagcgtgttgcagtatcatctccaatcagcttgtaggaagcctcaactcttccctgcccctatggcactctactctgagggtgaagagtgcttacttgtgatcagagaattcatgatgacatgggtagctttagccttcaccactgggaccttgtccacactgtcaatggctgatgacagggtcat

SEQ ID NO: 45542 - DNA, 1466 bp, Homo sapiens
tgggcgacggagtgagactcggtctcaaaaataaaaattaaaaaaattaaaaaaatgttaaaaataataataaagagaaggaaactaaaaatcagaggagttaagtaaatttgtccacggtcacagataagtggtccgtgcgcaaggtaggtagtttcatgcccagtttacaggggagttaaaacgagggcctgagaaagttactcttgtttttcagcttgctacaccgtccctctatcccgataggactcagacagagcaaacaagttattgatagttcttcactaacgagcatcgcaaaggccgaattcagccatcctcccagtccagggagcattcccgccccagacacgtccccttcccctttccctttccctgtgcccccaccccccagctcaccgtccctctgcctctccttcacaatatacaagacggtgccgccaggatacgaaaggccggctgcttcacccacccctccaggctaagattagggccaggaccctagccgaaggcggggtgtggggagatgaggttgaggacaagccgcgggggctcgggctgggctggtcccacgaagcggaggggaagcccgtacgggagctgcagggcattcccggagagaagccccattacggagaccccagagagcggagccagggaggcaagaggcgacccagccgagctcgaagccgggatgaagggttaagaggtgcggggagaggggagtggcttggaggggccccgagatcgggcctcgccggaagcgcccctcctgatcgccagagaacgcagccccaagggagggcccaggcccgccatctgttcacctgtgatcctgctgccgcgggactgcctgcggcccggagtccggcactaaaaaggttccgagggcccacgtctcccgagaggctgtggcgcagtctggacccaagccattgtgagagcggcggcgatttcgaaggtccccaagacccactaggtagcagtaccacccagcgggcaggcagcactgcagataaagcctccggagaccgcgggatctcgcgcgagacttggcccagcggagcacagggcatgctgggagttgttgtccacgatcgcgagacccgccccctccccatgcccttcgccgcccagcgagttgtggagccgcagctccgagtgtggaatccgccagccccgagaggaaacgccacacttcaccaccacttcctcagcgcgtgtgctgtgcctgggtccgtgacaagctaagggaagacggaggtagcatagtaaaatgacacccacaaacccaagccctcaaggctcaaaaagggctgccaagtgcgagcacttgtcatcctgtttttcccacttcacggaggtgaagctgagactgggagagatgagaagtcacttcgattagcaagcggtgcagtgagcacggactgtctcccaaaacagcggggttaggcagggttcgtact

SEQ ID NO: 45543 - DNA, 2661 bp, Homo sapiens
gttaacctaatgaatgggcttcgcgaatgaatttgttccattgccttaggcaagtttctttttattctttcatgccagaggaaaatggcactaccatttcttgaataaatgtgaggctacagccacacagttagatagtccctaaggcaaggagtgttatacccattttatagataggcaggcagagaaagatgaattgcttgcttttcttttgggaacctggattcttttaatagttgttgaagcctccagggggccaggcggatcacttgaggcccagcctggccaacatagcgaaaccctgcctctactaaaaccacaaaaatcagccgggtatggtggcacacgcttataatcccagctatttgggacgctgaggtgggatatagcttgaacccgggaaggagactgcagtcagggaagcctagggaagcctcagaccaaggatgattgaataacaaagaaaaggtgtaagtaaagatctccaactcttagggagtactaattaggaaagttaagggtagaaaaagataaattaaggaaaataccgttgagatgctaatgggttaatttcagagaaaaaagactgagtagagggggtatggggaatgtgtgctggggagggagtgtgacgaaggtcgtaaagagacccttgctcaacgtcagttgagcgttctgactgtggggaggtcgaaaactcggaagggcctgagggaaggaatgggcagtaccacgttctgacacctaggtcagtatggcgggggaagagtaaagaagacaaggaccgagaccctgccatgtcagtacctttctcttacggaggggcaccgccctgttggggtccacagccaaccccatctcggccaggttctgccgtaccgatttagcgtggtcccaggcatgtcggatgtgggagctaccggcaaagagagacatcgcggatccgtcatctcgcggaccgtcccggccgaggcccacggccacccggaaccccagccccctcaccattcgatccgcggcgctgccttccgtcgagcattccggttcagacgctttcggttgacactgtaaccaaacttctgcctccgggttttgcccttggccttgggcatcgcgctgaccaccgcaccagcagctcaaacacgctgcctctgtctctcagacctcgtgtaacaaactccttccggaaggcgtgcacaaggctttgcgggcatttggggaaatgtagtccttttgtagcactaccgtgctgagcactacgactcccaggatgcaacgagcatttgcgcctgcgtacaaggctcaatttattcgtttccccgcccctttcatgaccttcaccgggaggctgaggtcggagtcccgattttctcctgctgctgtggcccggacatggcgactcccggccctgtgattccggaggtcccctttgaaccatcgaagcctccagtcattgaggggctgagccccactgtttacaggaatccagagagtttcaaggaaaagttcgttcgcaagacccgcgagaacccggtggtacccataggtaagtgggtgcggtaggaactgcacaaggagaggacagtgatgtcggagggaaggaagtagagaaggaccagagcgctagcggggagcggaaggagagcggactagagaagagacgagggggcggggcggtgaggggcgaaactgattggagcgggagcagcgggtttagggggcgggatttggggcctaagattgggaggactctgtaactaggaagacctcgactcgacctaccctcgccgccctccctccgctgtgatccagagatcttggctttggggaagcgagacccaaagcggggaatgacctgcggggcccgacctgctgtttcccagttgctttgtcccctcctcaggttgcctggccacggcggccgccctcacctacggcctctactccttccaccggggcaacagccagcgctctcagctcatgatgcgcacccggatcgccgcccagggtttcacggtcgcagccatcttgctgggtctggctgtcactgctatgaagtctcgaccctaagcccagggtctggccttgaaagctccgcagaaatgattccaaaacccagggagcaaccactggccctaccgtgggacttactccctcctctcctttgagaggcccatgtgtcgctggggaggaagtgaccctttgtgtaactgtaaccgaaagttttttcaaaaatcctagatgctgttgtttgaatgttacatacttctatttgtgccacatctcccctccactcccctgcttaataaactctaaaaatccacttgtatttaattcagtatcatccccatggtttttggtctttgattttggaggaaacggactttggagtggtgcttagaaatcgtgtagtctagtgattcccgaactttcctagtaacagccacccagggcactttgaaagcagagatttggccaggcgcagtggctcacacctgtaatcccagcactctgggaggccgaagcgagcggatcacctgaggtcaagagttcaagaccagcctgaccaacatggagaaaccccatctctactaaaaatacaaaattagctgggcgtggtgttgcgtgcctgtaatcccagctactcgcgaggctgaggca

SEQ ID NO: 45544 - DNA, 1821 bp, Homo sapiens
ctttgtggcccacactccggtgtctaactcagagccagacacttggtaggcagtgtggtcaggtggagagggcttcaagtccgacaggaacaggtttaaattcacggccaggtgtggtgactcacacctgtaatcccaacactttaggaggcagaggtgggaggattgcttgagcccaggagctcaagaccagtctgggcaacatagcgagaccccatctcaaaaaaaggaaaagaaaaaatatatatgtaaaagaaaaagaaacaggtttaaattcttgatctgccacttactagttatttcaatagcatactcccttgagcctcagttttaccatctctgaaatgggttcaatcacgtgtatgaagtgattaaatgtaaccaaggcgcttagcccagcgactgccgaatgccaggcggtcaccggggaaggttagtgagttcctggagcacccaggatcctcttttttcccagctgcaggagagagctaagcctgaggggccaggagggctgtgttctgcccacacctgcacacttagctgggagcctgggacacccaggctattaggaggctcaggagggactctcaaaactgaggtggggttggattccagagccgggcagtggggaagctggcctggggatgaaatgtcatgaccgaattcctgtcccgggagtcaccagatccacagccccaggcgaggcctcatccccagctcggaagtcctacatggagatctccaagaagattcttccccacgtctcccagctcctgccccgggtggcctagagcaggctctcttccctgtgcccctgggccccggccggggtcccccgggtgcgcgccctgagcccctctccaggccccgcgctgactcacccccactcgtggggcccggctgcgcgggggccgcatggctgccggcaggtgccccgaagccctcgtcgttctctatgcctgcaatctcgctctcctgctgggccaggaaggcggccgccgggtcctcctccgccgcctccggggcaccgctctccgacgacgagaagaagccaaagtcatcagccattttccccgcgcctccgccggagcctccgctgcgctcggctctgcccgcgcctgccccgcgctgcgtccggcggccgcgacgctgtcacccgagccgcgggggagccggcgtcggcggggacgggcttggcgcggaccgcacttcctctccgccaccgggcccggctggctgtcactgcggtgcgggcgccgcggcgggaggagcggagccggaatgcggtgacgtcaccgcgggggcggggccgcagggccgggaggtcgccgagcagcggccgcaggagggcgcctcaggactgggcgcagcgctgggcccgggaccggcgcggcgcttccctccctccgcagcggcgcccagctgctcgcgtcgaggacacctgggctaggcactgctcccgcccggcctggaggcgaaacgcagggcacagagtggccgtaccgtgcacagagctgcgacaggaggccacctctggcctcgggagcgcagacctggctcctgattcattctgcagaagtttcttctcctaggttgggatgtcatgcacctcattctatgagcctccgcctctgtaagaagaggaaaattgaggctgggaaaggctgccccgcaccttttcatgcaagtccaggtcctttcccactaggccgtgttgttttgtgtatttttttgtgtatctcccttgaggaggcttcagttcatacgaccagagtttggatggccagctaggccccttaaatgtcctttaggtatgaacca

SEQ ID NO: 45545 - DNA, 2533 bp, Homo sapiens
gatccgcccgcctcggccacccaaagcgctgggattacaggcgtgagccacagagcccggccgacaccatttttaaacggaaagatttcatatgcagatccaaatttgcagggtttttgttttgttttgttttgtttttccaattagcactttttgggggttgtgttttagggcgtaccatgtgctgtttttccaggacgtcgtggtttgtgcagacctggtaagacctgataagtcctgaaagaagtagccaaaatttcatgtactcttcacagaaccagctctcaaagccttttctgtctcaccggatcaaccctgcaaggggacgagggtggggcgcaggcggccgagagccttgctgagaatcacacaggtggtcagtggaaaagcgtgtaccagacccaggcctctctggaaggtgggcagaggaggcgttcggcgggagaggtggaaatgaaaacgggaaatctaaagagaggtggcggactagaaggggcaagggacgtgcagaggaagatagagattgaggggtggtgatagggtagtgtaagcagcagaagggaagggcaggggactgcctcgaggagaaggggcggcggcagcacgtcaggggcttttggggaatctcattcaacaaatggcaaaatggagcccaagtggtttgcccaaggatgtccagcagttggcaaggtggcaactagaacccgcgtctcctaatcccggtccagggatctttcttcgcctgtcacagagacaaggggccagtgcagcgctagtgcggagagacaaggctccaggcacggaaaagcagatgccgggccggggttccagcgccgcagtcacggcggtggacggcaagctgtgcggacgactgggggcgccatgaatggtcgaggatccggggagccgagtccagatcttcctgcaagtgaccccgaagcggcaatggaacggtggccgaagtctgcccacagcttccgcttcgaaggcggcgtcggaaatgccgcgccagtatccagagcccttcggaacctcccgagagatggtcaggagcttttggaaactttaggtcaggggccagcgaccaaaaggctggtatttcggaacggctgcgtctcccgagaaacctccaagagtatctgaggttgccggaaaatggttagagagcagccgaaatcagccgaatgccattcgggatgctccggagcttctcgaggcacattcgggccctctcggctctgcaagactgcactggaatcttaggtctcctttcgtcgcctaatcttagcagatcctttcgtcgcctaaatggtaagagcgacttgtaccgacagtccctcggcaatttccggaagtgttcgggataggcccgagcgtggcgccctctggcggcggccagaggtggcggggggcggggggaggttagtgggccagcgcgcgcagacgcagttgcgcgccggcggccgttcagaccggatgtggttgtggctgaggtcagttccggcgggtgacggtgcggacgggtcaggagcgtagaggcggcggcaaaatggcggcgcctgaggagcgggatctaacccaggagcagacagagaagctgctgcagtttcaggtagcagcgagtactcggtgcagcagatgcctccgtgggatggggagtaggcccctagaggagttcagaaccctcctcagattgggttcagatccttctcagaccagcaggccggccccctcccccccagactccaactgccctgattcccccggcccccaagcctctgttggaccctagccttccagccatcgctgcgggcagacccgcctcgtctgtgcctctgtgccctcagcgtgtcagcttccctggtttgccttagcggcgtcagtcctcagccatccttcccagcccggttatcggtcggaccctctccgcccaacgagtctatatctgccggagaagcttagtccccaccgcggagttggcgtcatttcgggtctctgacaggaaaacctcctgccagcatcccatgccatttccacatacactcccacaaactggggcctcttggataccaggtttcgtgttgggggttccggtcggggagggggcacctacacacagatctggtccccgccctagaggtgtgggaggacaccaagtgaggaaacaatgcaagatgataagtgtcatcagtggtctgtcgggatttattacttttggcttattcctggattcctgtgcttaactatgcttgaggagggtggtaacttgcagaaatgttatgttaatacaagatgttgtattaagaacatttgccactgatcacttacccctgagctggagaatggttggaggataccactagggtgggtaaccttggcactttgttaccagtttccttatctctgaaaggactgtcttaaaaatgtctacccccaggccaggagcggtggctcacgcctgtaatcccagcactttgggaggccaaggccagcgaatcacgaggtcaggagttcgagaccactctggccaata

SEQ ID NO: 45546 - DNA, 610 bp, Homo sapiens
tttcatttctcctgctactatcagagaaggcatactgcctattacataaagcaaagcaaagctgtctgtgtggtcggaaggagagaacaaagattcctagtttttgccaagtttctctctgggaataactgaaaacaagacctaaaatatgcattcttagcaagctaaaaccaacaagccaattggaatttagagagtacttaaatctcagctgagatttcacaccaaccccgtgcagcgtttgttagtataaacagatgagatatggaaagataaactccacttaggaaaatgaggagattacaccctggttacccaatccctatccaaatagctgtttgagccatctggttaaaatactacacaccatctattattgtttgtgataccttctttgagtcatgctttagcaagagatagatcgggatcacagtatttcgaaagctagtctgcaagtgactgacaccttcttgtcttctgacttgggagaggaggaagtttgaccaaagctgcagtaggaaagtagttcacacacttctgcaatctcccgtatacattttacaagatgtttgaccaaagctgaagtaggaaagtagtatagaatagttca

SEQ ID NO: 45547 - DNA, 442 bp, Homo sapiens
aaagaggatgcactgtagtcaggtgaggctggttagtacattcattgcttctgcctgtttaactggacaacattgggcaagttgcaaaattctacagggcctcagatttcccattagtgaactagaactgtaatctgccctctgataagtttaaactgaacataggtatgtcatgcagtgagccagatactctagggatcatttagatgagtgagacatggttttggaattcatggagcttattggccagtacagaatgtaagactcagagaactaatacagaattaaagttatgaaacattttgttaagagagaagcaaatagcttccttgttttatttctctctcatttatgcatttatttatattgggggaagtgcttatgtctctaactttgtttgttttgagacagagtttcgccttgtcaccctagctggattgca

SEQ ID NO: 45548 - DNA, 5002 bp, Homo sapiens
acctcagggttccgctcaactcaaagttgggacgaggccctggcaggaaaagctctagaacctgtcaggccctgcaaagctgaaggatgcgtccaacaggaccagatctttgttgttcctgccacagggaggctcgttccatcccttccccatctaacaaaactcctatgcatccttgatacccagctttcaatgtcacctccctgttgacacagccagggagccagtgtaactgtcagctcaacacctagttccttcctgccaacagcggcaagaaccatttcctctgtgctgcacttcacaagcctgggccctgcttctcaaaaggagcccgcatgggagaccggggcccgaccagcagagggtgtgggcagggccagggaccaccttgtgtccagctcagggcaggcctgatgtgagaaatgtgcacggaacagagccaatcacacaggtccaaggtcacccagtctggcagcaatgccaacaactgacagttgggagattacaaaacacctggcttctcatggcaagcctggtcccacttgtttctgcctggccccctcactgggagcgagagctttccctccaggtcacccaggcccaacctctgcctgcccatcatcggggaatgggtttgtgacccctggcctgggccaagtgcacaccctgacaggcatgtctacacacacagcctcccgaactcctgccaacaaaccagccaagcaaacaacggccaagggagactcaggaaatccccaaataactgaaacagcagatgcctggcccatcccagtcctcctggaccagacactttggagggatggggaacaagggcacctagatgtttaacaaattccccagaagttgtcacagcacagctagatttgggaatctctaccctagctaacctcagaaagctggggagcccatagttctgctggtgcagaacagtcaccataataaccatgctgtttccccggcgccaacttggtgagtcctcccagcaacactggcaggtcaggacaccaaggctcagagaggtgaggtccaaggccagtcagctggaatcgtgagtgcgcaggtgcatgacctaagcagtctggccataaagcacccatgactagccaccaagccagcagccttgactgctcctcttatgtcaggatgtcttgcagatggctgagtagtgccaggcccaaggcactcctgcagaggcccaggcctgtgggtgtctgctctgtggccagccccctacaaaggcacccactccccagggcagggaaggtggtaaggagctgtgaaagcaagccaggagacagaagggcctccagccgtgggtaagaatgtcagccctcacagactcacacatgacagtgacttctagcgagattcttgcctacagaccgtgggcaagggcttcccctcccgagcctcagtatcttcatctgtaaaatgggaacagcccaataactacctcccagtttcccatcaaggactgctccaaggcaacagcagaagcaacttgtaaagtttgaacttagcttgggtgtgaatgatcattattagcgaatacgacacgctgacctccatttccaacctcaagcagagcttgaagggtgccacttccggggcagcaggcagatatgccactctaggggaatacctcagctggtaagagtggatcctggttctttaagccctgccaggaacaggggtggcgtagaagggttacacccacttcatggctgagaaaactggagccgagagaaaggaagtaagttactctaggccacaagaccagagagaacggaattggtcctagttggcctcctaggcccaaactcccccaagccataactcctgtggcatcagtagctggaggaaatcacctaatcccgagtctccaagccatacaggaggctgggagagcactctctttcaggcacccatctttagctctgtagtacagagaagcaagcaaggcccagagttggagctagcaacttgctcaaggtcaaatagcaagggtggccaggtggcctcccctaacaactgctctgcccgtccacatctccatgctgtcctatcacggagctctgtgtgaacgggtcttgagagtcccgtcgctgagccccgtccgccccaggcacgcaatgcattttgcagttaacataaccccccacacccacccatgagagccggccaaccccttaagtccagtgccccaagcacctaccctgaccttggtctaagagccccagggatctgtttgcaggaagagacactcccttttgcagataaaaacaaagtcagaccctgggggcatgagcagactcagccaggaagagaagccccccttcctacttccccacaccccacccgaaacaagcaggctctgcccagcgcaagcagagcttcccaacgtgtggtgcctggaggccgctgagggccggaccaccagactaggagagaagactccctagtgaccttggtcaaggaaatccctttgcttctgagcgcctcagttggcacagctataaaatgggggtggaaatctttccttcccacagcgcccaaataaaaccagaagagtccagaagaaaccaggtggtcacactagtgggggaggaaaccagggtcctggggaagggggggctccccaacgcgggccaagtgcacgctgtggggctctgggaagcttacccagccacccctccccaggcatagtgctggggggccgaggcgcggacacagccccgagaggggcctccctcgtccgcttcctactcttttgcgccgctctcggagggacaccgggggcgggaggcgagactgcagcgcaggggccagaacgctgcgactttaagagccgaggatcccggaccatgtgctcggcgtgagacaaaagcaacaacaaaggaagtggcggccgcagggggaggggggcggctccttcctctccaaccgcagcgctcagctgcaggagaggggagatacggcccggccacggggggccttggggggggttcctgatccctggggtctcgctgcccgcagtctggaccgcccgtgattaacccctacggagccacctagatcacggcccccattcccaggggaggggaacagaaggtccatgggtgggggaataggaagttgggggccctggcaccgactcacctttggccgcccggccacacgttgactcctttgttcccgatctaggacggccaaactgggcagggggcgggggagggggggggtgcctgtctggatcctttaagagctcccgccctgcggaacaatgtgctcccctccccacccccgggtccgggggcagcccggctccttccggggcctctctctttgttgtccgcccgacggcgtctgcctcgcgaggcccacgcgcgatcagtctctctcggcccaggccctcagggagcgggaggcggcgcaggacgcagctgggtctgcgcggcagccggcggctggccctttaagaactgtccgcggcggcagcggaatgtaacaaaccccacatttgattcacaacattcgaagcggcggggtcgcgcgccagacgggagggggctcgcgggggcgcgccgggaggctccggcaaacagtagcccgctgcaagcccgcaggggccccgccccgcgccgggagctccgccctgagagccaatcactcgccgcgaccacgcacgtgactagtgggccaccatcttgaatttttttaacctcctcctcgcccccaccttcgcacttaaagggaccgcagccatagtcaaaagcaaggggcggggccgcatatcctgacataaagatggggagaccccagggtgggcaaaaccgatcggctgcaactcgaacttgctatgcaaactcgctaactactcgcgcctctgaggctcagtttccctgccgaagaaatgggtcccgccaggagaaccggcagtacggacttactgtgtcatggtcccctcctcggggacagggtgccgcctgagatactgaagtgcaatgggtctgacctctgacggggcgagagcggcccaagtggttatgctggctctaacaaccctgggccggccaccttcccggagatgacgtcacccccaagagctgcagcaccgcgctgacatcatggcccggccgccccacttctccttgtttatactacacggcgtctttaaaaagctggtacggcccagattgcccaacagaccaatggcggaccacccatgcaaacgagctaacgtctgccgggcaaggagattggccctgctcgcgctgacgtcacagagacatttaaccgccacgcccccagcgtggcggtggaggaagagaggcggggaacaggttgtagtttaaagcaaaagtgcaggcgctgggcgctctagctgctaggctgggcttgagagtttggtgtccccgcggagacctccctagccagggaaactgggaactaagcccagtgaagcgtctatactttagttttctattcctctcagcagctatgagacggagggattactatagccagttcattttacagatggggaaagtgagggccttcccttactccagatcacacaactagaagtgtggcggagcaggagtgtgaacctaatccaaagccgagcctcgttctcctttgcctcgaagcccacccacccgggcaaaatttatacaaaatggggtattacctccaccacaattatataagcagaaaatcagtaatttgctaaatatccaagagctggaacaggtcgaataatgaatattgggtgcatgcatataatcaataacgactcttgggcagttaccacaaagaggcagctggaggcgacacggggctatctccaagacagccataaacaaggcgccaatgcaaaatgttaacatctgttaacctgtgtggtgggccatggggcagggggatggggggctcattttctatgctgctttggtatatttcgtaatcctaaattttatat

SEQ ID NO: 45549 - DNA, 2078 bp, Homo sapiens
agtggttctgtgtgtgtgtgccggccaacttttcgggtctgggtccgcatttggaggtgtgcgctgtgtgggtgtggcgtgggggcgttcccctttctgactcctcctccccaacccgcagttctcactgctggaacccccaggttctgcaaagggggcaggaaccgtcacattgttcagtgatgaaaaccgagggctgcaggagtgcggaccctggaagatcgaggaagacaagtctacccgaatcccccactgtccctccatcttactcgtcctccttccctcacttcccagcccccggcaccagctcgactcgagcttagtggctttcaggcaacggaagctgtgtgaccttgggcaagacacggactctctccggaccccgcagcgttccgacatccagaatgcagtaaggacggcgctgaagtgcagcggtctgttccccggacctgcagccgctccagggcagggcttaggccgctctggctccccggcggccggcacagggggcgtcggggaaatgtttaggacggacatggcgaggccaaagaactgcagcgcgtctccggctcgcggtgccggacgcctgggtcccagccgcagctgggactcgccgggggtggcggtcgggacgtgcgcggggcgcagggcacgcgggggctcggagttccccggggctccccgagttggggcgtttggacctagcggacggggagaagagcggcgcagctcccgctgccgggcccgggactgcgagctcccgccgtgcgggcgccggcagaggcctggcgggaagaccccgcgtgcgttcctccgccggcccgcggccgccccctaccgccgcgtgctcgccggccctgcgcccggggcgctcggcgcagggtccgggcccggcgttacctggggccgcggcggggctccacccccacccggcggccggcgcgtcgctcccgctgcagcccaggctcgcggtgcggctgcggcccgcgcgccgcctgccgcggcccctctccggcccggtgcaggggaaccgtccgcggacctcaccacccgggcgcgcggggcccacaccggctgcgcagcttccaggacccccgccccggccccgcgcgaatggagctgcctggaccgcaccacgcgtgcggggcggagcctctttcggccgcgcccgcccagcgtcagtcggccaggggtgcgtaagggcgcggcgcctggggcctggcagcctccgtgaccttggaggagtgacttcgttttctcgcctgtgaaaagggaaacaatacgaccccatggtcgttcagagaatcttcgcttcccggagagtgtgtcccctcccccagccccggtgggcgcggaggtagctaatagctgtctggggtcagcagatcttggttccccgctttgggccattctctgaccctcacttttcaagtctgcggaatggaattgatgataccttcttcaggaggaggatgggagactccagtgacaacaaaacgaggcggccggccgagacatcgggagggattacgttccccgcaacccctgtgtccccatcgctagagccaacctggaccagggcatggccggcaccagctcaggccgcgggtcccggcgccggagggtagccccaccgtccccgcctcctgggcgcattaggccagcgaaggctgcaccccgccgcgggccgcgctctggctggcatgcaggtggtggtagtccctgcagaccgcgcctcccacaagctgcacaaccaggtcgtctgcttagcccaggtttagctcctctgcggagggctgatgagacggtggagcggctgcctccgggtctacttagtttttaaagctgccgtttgttgacagaacagccacctaaaggagagctttagagggaatgagtgccctggaaggaggctctggggtggggagaagttggtctcatgggtccccaatttctttctttctttcttttccttccttcctttcttttttcttttcttttctttctttctttcctttttttcttcctttttttctttcttctatttcctttcttcttttcctttattttctttcttt

SEQ ID NO: 45550 - DNA, 1450 bp, Homo sapiens
accccacctccaggttcaagcgattcttgtgcctcagcctcctgagcagctggcactacaggtgcacgccaccacgctgggctaagttttgtatttttagtagagatggggtttcaccatgttctacgtttcaccatgttggccaggctggtcttggactcctggcctgaagtgatctgcctgcctcagtgtcccaaaagtgttgggattacaggcgtgagccaccgcactcggccgagaagtttttctgattaaaaaaaattttaaggcacacacttcagacagtggctgtgaaggaaccctgatgtgtatctaaactgtcgcctcgtgcacatcaccccattacttactctgtgctaagtgctgtcatgcattacatcattactccttagaacaggcctatgaggtggagtctgcattaggcccattttggacaaggacaccaatagtgtgggaggtggtgtaccttgcccaagcccccagcaggtaagtggtggtggggattaggacccaggtcacttgagtccatatcctgggctcttagtcccactctgcctggctgcctgctgctccgtgaagccaaccctggacctagacctggacctggatcgtcatagcccagatccctgtgtgcttcccaggctgccttgtggcaggtggatggtgcccctcgagatgggcagggcaccatctggccacacgtgcctcatcgtgatgggtccaaaggtctgggcaggccaggacacacctctgtcaaccagagcagtgactcagagctgtcggcctcagccgtaagggcagggagagggggcaggggcttgggttggggtctgccctatttggggcacagcagagcgaccaggctgactcccatggtctgaggcagagcggggagcctggagccttgggtggggtcacctgcctctcttcttactggttaagccaccagcgatgactagtgcctacttccttcagagaggaatctgacggctgtggcaggaaagtcaggggcaagaattgttgcacagatatgctaatatctcagttctgccactttctgtaatctcgggtggtgatctaatctgtctaaggtctattttcccatctgtaatggggaaaaaaatcatccctggagttattggcaggattaaatgaggtgatattagtaatgcaatagtcaccaccatgcccccacgaaaactaacattcattgagaccttattgtgttgggcattgtgctcaggacttcaaatgggtgacttcattacatcctcaccatcacctgcccaggtaggcatcatgtattacctgcaacttacagataaggaaaccgtcttagagaggttatgcaacttgccctgccaaaattgaacccattgtgaatatacagtagataaaaaaaataataaaaataaaatgaaattaaaaattgtggctgggcagggcggct

SEQ ID NO: 45551 - DNA, 1388 bp, Homo sapiens
aggagcctgaccgggaccctggccagtatggaggacagggggtgtggctggggaaactcagccaccaagggggcttgagccaggttccggggggcatatgcccctggcagggcgcagccggcgtggcaccaaggcccaggccctcgtttggcctgagtttgagtcaggataagtagagctggatttccgctgggtgaaggtgagcctgatgcgactccacaatgacaaaacgtcctgcacgtgttaaaaactcaatccggaccagcttccccattcgcctgccagagcagcagttaaccttcccctgggatgggctccaacagcaggctggggattgggatggcgctggtacccagcaggggaagcaaggcttctacaccccggcggcctccggcgccatcagccggcgtcccgggcgggtctgcaggacgctgggaaacgcggcggcggcctgcgcgggggcggggcctggccgaaggcggggctgcgaggaggtccgaatcaggctgtgggggcggagctcgggaagcggagccaggtccagaggcggggctcaggcgggactgagttgatctatgggggcggagccaggtcaggaggcgggactccaaagggactgagggctgtgggggcggggcccggtccagaggcggggacagcagggctccgggcaaggaggtctggatgctgagggcggtccctgaggggcgggcggggcccgaccggcgctctgtgtggccgaggccatgaagccgcagccgcccggctaggccccgggcggctctagcccagggcggcccgcggggcgctgggcctggctcccggctccggtttccgggccggcgggtggccgctcaccatgcccggcaagcaccagcatttccaggaacctgaggtcggctgctgcgggaaatacttcctgtttggcttcaacattgtcttctgggtgagcgcggggtctgcgccttgccctgtgctggggggtggtgggagagggagattcagtcttttgctgggggagaccactccctgccccaagagtttggagctcgggaccatccccccacttctgccacacccacgcccacttccaggaccacccgaggtagctacagaggcccggattgctgggggcgggtcctagcgacagcgtggggtcggggttggggtagggagtctccctaaataatcccgaggcctggtggagaaagggaaggtgtttccttgaagaccccaggggcgtgctaggtgcaggttgccccctctcgcccagccctccttcctaccctgggatgtgggatgcgtgccaagccccacccctggtttagccggtaaggagattctggcgtgaagggagccgccaggccccttccccggcctcctttccc

SEQ ID NO: 45552 - DNA, 1701 bp, Homo sapiens
aaacacactttcattcgactacaaggcactgcctcccttgacaggaaaacaataaagacagaagcataaacttttcactttttccgggtgtcatttctatatctcggtgcgatgtagtgattaaatgaaagaacactggagtccagctgctgggattcaaatccagctccactactgcccgggactcgcgccccgttaactgagcggcagggcaccagcccgccggctgtggcgctcgagaagcctgcggcgctgcctaagcacctggaaacgcgccggccctgcgggggcgaaatcgtctaggacgatagggatctccaaggagtgcgctgggggttattttcggggcaaataattagagaaaacgaggatcacacaacaaaacagcaacccggcacgggaaggagcgcgggcctggcgccccgaggcgtgaggcggcgcggaccacggctgagggagctcggcgctcgcccgacgcccgggaggatgcaggccgccccccaggtgtgaaagggacccgcccggcaaccgaaggtgcaaagcccaacctggcgttccgaggggccctgcgtggcgtcaggggagacccaacccgcgtcccgaacccacctcaaccttgggaaggacccagccccggcatctggagaagcccaacccggcaccagtaatggccggtcccggcgtccggaatccgccccggaatcgggagggtcccagccccgcatcccgagcccacttcggcgtccggagggacccacccccgacttcggcaaggccagccccggcgtccggagcccacccccgcgtcgcgagagacacaccccggcatcaggaagggccgccccggcgtcgggagaggcctaccttggcgtcgggaagcgcccctcccggagagtagcgggccgcggacccgctgaggaagaaaaggaggcagggaggggtgggcggagctgtgcgcaggcggcgggtactcactcgctggcgcaggccgctctgtagaccttctccgggttgccgggggtcgcgagccgccacacgttgggagcgcggggggagggggaggggcgcgcgcgtccgatgccagagacacgctctcggggcgggcgcaggcgcagcgcgcggagacttaaccaacccccgccgcgggggagccatccgggacgtaccaactgcgcgggaggcgctgaccgcccgtgagccggctcgcaccttgcgcggtctcagttgcttgcgctttgggggaaagcaaggagtaacaacagactcagagatagctgtggggcaaaatgtatagaacggccacttttgaggacaattccgtgtgatgaaatttaaaatgtccattttatgacccagcaatttcacgtctagaaaaatacggaaatgccgggtgcgatggctcacgcctgtaatcccagcgctttgggaggcagaggcgggcggattacctgaggtcgggagttcgagaccagcctggtcaacatagagaaaccccttctgtactaaaatacaaaaattagccaggcgtggtggcgcgtgcgtgtaataacagctactcaggagcctgaggcaggagaatcgcttgaatccgggaggcggaggatgcagtgagcccaggtcactgccactgcactccagcctgggcaacagagcgagactccgtctcaaaaaaaaaaaaaaaaaaaaagggaaagaaagaaa

SEQ ID NO: 45553 - DNA, 2085 bp, Homo sapiens
tggtcgaagtaaggactttggctttttttttttttagtcggagtttcgctcttgttgcccaggctggggtgcaatggcgccagctcggctcacagcaacctctgcctcccgggttcaagccattctcctggctcagcctccgagtagatgggattacaggcatgtgccaccacacccgtctaattttgtatttttagtagagacggggtttctccatgttggtcaggctggtctcgaactccggacctcaggtgatccgcccccccttagcctcccaaagtgctgggattacaggcgtgagccaccgcgcctggccggactttggcttttactaagagtgagatgggaagctgttggaggatttgagaacctaagcgtcatgatctgacttgtcataagaggattcctggaactgctgtgctgggaatgccagtgaggttgctactacaataacctaggcaagagatggtggctcccaaagacacgggaaggagcagctctggggttggaagataaaatttggggtctgacagctacattggagaagcctattagccattcgagtgaactgtggaagaggcaactggatgtatacaggtccggagtctcggggaagatcagagctgggagctggcacttggaactcaacaaatagtatgtattattagcagtaatatggaaccttagctgtactactacttactagtagcgagctcttgagttaaccatttttaggttctgggcctcagtttccctgtgaatgaaatggcgaaaacactcccacataacgggaccttgagaacgaaatgaaaagtatcaagggctgaccgtgagcaaggtgagagccatgagccaaaaccacacgagcctctccgggaggggggggtcactgctgcggaatcagcgacaggtttccgaatccacggcacacgctctgaggtaccagaggtagcaaagcaaaataagcgcggggtcccgcacggcagcgcgggtgcagcgcccaaacctcgcgagatttgttggctgggccaagtaccacccaccaaatctcgcgatacctaggcgcctgagaggctctctaccggtgagggtttgcggggaagatggagtatcccgcgccggccacggtgcaggccgcggacggcggagcggccgggccttacagcagctcggagttgctggagggccaggagccggacggggtgcgctttgaccgcgagagggcgcgccgcctgtgggaagccgtgtccggtgcccagccggtgggtagagaggaaggtgagtcgggggctttggaggcagaaagcccctcgcccgctgcgcggctcgcggggaactgcggaagcgccgacggtcacaccccctggcccgcctccttgcgtgctgcgccccgggacccccagacttgtgctccccatccgggcgcgggcaccccaagaatcgggcccccagcgcgctgagggtgaagggccgctcacgctcaggccctgggttttcctcctcctccttcatcattcactacagcgcagtttttcccacattcgaggactgtcatccctatactcgtcctgtcggagacctacagtctttgccatcccggtaagccaagccgagtgcccctcaccactccttgactccccatcgtcccaatctccagatttcctcctagggcctctcgcctcccttctctcaagccccacacttccgagggctctggaaggccttctccttaccccctgggttcctcctggtcttgatgactgagccctggcttacccgtttttagctctctggcctctacttgctgggtcccttattctaaggtggggacaaggagcctgagaaactggtctgggtttgctttggctccagcttctttgtgtcctacacttgacccaaagttgctgagaacagtgtatgcaaagccacgttaggggtcactcctgggccgaagcgccccagcttgctctgcacttgacctgagactgggtaagatgggatgaaagaaagagaaggatggaaaagagctgtcctgacctgcttgtgtgactcccttcactgtcctttacagagccagctgcttga

SEQ ID NO: 45554 - DNA, 1319 bp, Homo sapiens
aggggcggggtgggacaggaggtgggccgctcgcggccacgccgccgtcgcgggtacattcctcgctcccggccgaggagcgctcgggctgtctgcggaccctgccgcgtgcaggggtcgcggccggctggagctgggagtgaggcggcggaggagccaggtgaggaggagccaggtgagcaggaccctgtgctgggcgcggagtcacgcaggctcgaggtgagccggaacccttgtgggcccgggctgcgctcccagccgccagggggcgagaggcggcggggctacggggactgcccctcccggcgcaggggacctgggcgtccgccgggcggcagggggtggagggggcggtaaatcagtaacccgcagtgcacacagggccttttgtcccgctccgtccaaagagcaccccggccgcggagctggttactcattgcccaccgaggcgggggcaggctggccctgtgcagctaccctcgggacccattgattcgcacctccccccaggctggcccggcaagggtgggggaggacaagcgcgcttgtccctgcggctgtcttcgcgccggcggcagagatgagggacctgaggccccgaaaagttcagtcacttagtgcccgggggcctccagcgcgagtgcgggaggctgaaggagaacccaggactgtctgatgcctaaggcaggccctccattcccacgtggggggtggtcggtcagcggtcagcagccatgggtgactcgactaaggactctgatatcagggcagcctggggtaggaataaactccccgggcctccccacccactcccagcccaagctgtgtacccaaagagctgccctccctgccaagccgagcttggtagggagttttaccaaggaggatccgactggattcgagagttgaggtgggccagagacagcagtatctgagtcaggtagagaagagcaatgaggggcacagagggatgggcaagagagcacatgtgcccagttttgaaagccaatggcttcagcgctcctgaaggggcagacggtgtgaccaaagagataggcagcggcagagagggagccctaggatgttgagctggatcctgctgggcacaggtagccattaagggcttgcaagctggggggcatgacatggcagacttgcaggtttttttgtttgtttttttattttattttatttttttattttgttttttttgagacggagtctcactctgtcgcccaggctggagtgcagtggcgcgatctcggctcactgcaagctccgcctcccgggttcgcgccattctcctgcctcagcctccc

SEQ ID NO: 45555 - DNA, 3290 bp, Homo sapiens
ccgggcggtcccgtgtcccggcgcagctccgctggggtccagatgcccggccctcaggggcgaggcgcgcactccccggggaaccgggctgcggagcaggcggcccgctctgggcggcggtggcacgagagggccatctgcctgggtgccgagaactgcagcgtccgcggtgcgaggcgcggcccgtcccgtcccggcccccagcccggcgcgcacgcacatacccacgccggccggcgcccgctgcccgagcccccgtgccaggcccagaccttgactaggcgcgggaggcggtgcagggactagaggaccccctcccccggcgttcccctcgccccgcccgaggctgcgaggacccctgggctcgggggtggtgagggagcttcgtcccggctgggcccgggctggggactcggcctccctgggcgggggccgcacggctgcaggccgaggtgcggacgcgctgtcaggctgcagcccggctcggtgccgggggtgggctcagcgctggggtcgcctggcttcgttcccccgcggaggccacggccgggcgagcagtgccggggcgggtaacccgacccggctccccagagccgctcaccccgcacggcccggcaaggggagggagagggatggggggagggggaagggaaggggtggtgggtgaggggctgtgggcaccgcagggccgagtccccggcccgtctgcgctgctgtagggcggctgcccgcggcacccgggacgatccagcctctgcctcgcgggcgtcgagcctgagacaggagggagccctggggctgcacaggcttggctcagggaggcagacccgagctgctgcctccattttgtttcctgctcagcttggtctgtggtggtggtggtggtggtggtgtgggtttggggtgcggccgggtagggggttcgcctgcggccgcgtctgctcggggcctgaggcctcgaagaccccagcccaagcccccaggtgagccctgcggcaggaggggggttgccttggcctcgggccgaacccagcgggctgagggcaggtgcccagtggatggggagcctgggctgtaacctaagatggaggccgggactgacgcgggcccgagcagggctggcgggacgatcggacaggcctcagccgcgccaggtgccgcctgggttggggttcgagacgcgtagggtgcgggagccgtgtgcggcccgaggccagcgccgtgccccgaggtaggtgaggggatcggaatgccacccacgacgcccgcaggccccgacactccaaggaggcgcgcgaggcccctggggagcccgcctcaggccccgcccgggcagccgggccggcccgtaggccccggccgcgagcgggcgcgcagggggaggggagggggcggcagcggcagctccgctgattgggcggcgctctcacaagcccgacttcacccgccctgaaccccgaagagtgagagaagggaacgcgcgcgctcggtgggggaaggggtgcgcgcgcactcggggcccagccgcacgcgggccggcgcgaggcgctcggtcgcacgcgcggccgcgggggcgcgcgcggtgggggtgtgaggaggaggaggcggcggcggaataggccggggcaggtcgcgctcgctgccttctcccctgaagagagacgcggggggaggggggtgcggcgagcggccccgctctctccccaccgctccgctcgcaccccagtgtaatgagggtcaccccctccccccagctggcccgggagggggcgcggggcacggtaactagtgcgctggggtgggcggcgggcaggcgcgaggagaagggagggaggagggtggccgggcggggaagatggtggtggccgtaaggtgaggggctcgggggagggccaggcgcgatgcggggttggtggccggcggcgctgcagccgccggcctcctccccctccccctcctccatcactaccagccgggctcaggcctagctggccgggctgccgcgaacttcctcccggcgcggcccgtgccccgccggccgcctgcgaacacctcggcctccgcctcccctcaggtagcaggctgcggggcgcggggccggctgccctcccgcagcaaactttgcttgctgctgaatattgatgagagcgatcggctcggctgggaggtgctgccgcggctgcgggaaggagcgcggcccgggcaggcggcggcggcgtcggcagcagccatgtttttcgagctgtagcagctgctgctaccctgactgggcttcgctggccgcctcggtttctccctctgccgggtccaggcctcttcgccctgcagctgcggatccagcaggcctgcattcaggaaggcgagctctggggtgcagccgcctcggccggctcgcctgcggcctgcgcaccgccgctgcaaaggctccggcgctggctgggcgcagggtgcagcgctattgtgaccgctgcgccctagcgagccaggaaggggggggtacctttttgtgcagggtccaggagcccccctcggaccccgcagccttttgcttttgagagatccagctgctcgacccctggcgagggagggggaggactagtcctgtttgagaattgggaattttgacgggcagaggggttttaattttagttcatcccaagtgtccaccagtctacagaggaggaaaaagagacgggctgtttctatgtagcaggatcggcccagcttcgggaaaatggagttttcagaggctcatcgaggccattttttcatctccagtcgggggaactttttctgcccatggaagtgcagcagaaaggcatagaggccactaggccttgaagtggctgccattttaaagagtcgagtcagatggcctattaactcagattaattgctgtgcttttggattccaggttgatgccggcccaggatggatcagacctgtgaactacccagaagaaattgtctgctgcccttttccaatccagtgaatttagatgcccctgaagacaaggacagccctttcggtaatggtcaatccaatttttctgagccacttaatgggtgtactatgcagttatcgactgtcagtggaacatcccaaaatgcttatggacaagattctccatcttgttacattccactgcggagactacaggatttggcctccatgatcaatgtagagtatttaaatgggtctgctgatggatcagaatcctttcaagaccctgaaaaaagtgattcaagagctcagacgccaattgtttgcacttccttgagtcctggtg

SEQ ID NO: 45556 - DNA, 4970 bp, Homo sapiens
aggagggaggattgtttggggtgagagcagaagccagccccagagatagtacgaggtggggggcggggggcgcagggatactgtgaagctaagcccttcctccaagcacgtcatgggaatagtgtgtttcctctcagcagccacagggctgcccaagcctctttctccctctgttgggagtggctggtttcagtttcagtctccctccacaggaagcccccatcactcatgaaggaagggcagtttgaggaattggtttttaaaaaggaagtggaaccaaagcactctctgagtgtgagtctgaccatgttggctaagttgtacatttttccaaggcaggtgttggccactgcagaggactcagcccaggcctaaataaaggcaggaaagcagaggcaaaggataaaactaagggaaagcccctggcctggggccacaccctccataccagaaagggctgcaataaatttccttctggttgagcagcaagtgtcagccctgtttacagttaacacctgattcctcagaaatatctggatcttctttggggaaaacttgggagtttgcttccctttgtgacctagtcctgaacttcctgccctttcagcaaaaagtgcttgggaagattgggaaaaacatttagtactagagttactcttcactttcttcacaatccttgggctgcatagtagtcaccttattttacagatgagaaactcaagatgaggatttaagtcccttttctaaattagcagctgaattggaaccaaatctggatccattagacctttctggcttacagaacttaggactttcctaccattaaaccacattgtaggatgtcactgggaagctcaggacctgagtcacaggtctgacataggggcccaaacatgacagatgcagtagagctagtcagaccaacctgtctcaggtaggaatgcttgacccttttatttcgaagcaactcatgcactcttttcagcactcagaaggaactgtgagcttttatactactacagccccagtatctcagcggtaaccatggggaaaaaagtcttgttttccaaaggaaaatgagagttgggaggagccttaatataagcagtgaggccagccgggtggccccaggaagaactaggtgtcttgacacctaatccacacagcagggaaaggggctgggtgtgatgcacagtgcactgattttatttacagatcaaaagccacttaaataatctgcagacacaagtgctgtccagggcagaagcctggggtccaaatcagccttatccctcctcatgcccacagtcagcccaatgctgtctccgttccatgggccagcacaggcaggcgccactctgctgacatgaggacctggggtagctcagacatttgactacccaagcccagaaaggagctgggtccagcccttacggggaattcctttaattcccccaggccaggtgagtgctgactcagtgatgacaacagctgtagaagtaggggtttggcttctggcccagatccacgcccttgtcctctgtcaaaaagagaggtggcagctcagcaccattctgttgggatcaggtaactcaggaaaggggctagatgctgtgggcctagagtaagtctccataaaggctggggaagcacacacctgtcatcacctggaaggcagccacactgacgtaatcctctgccactttctggaagagctcgtctggcaggaaaaatgatgatcagcgagggcccaatgccagtagccctgggatctcccagtgacccagccctctgtgccctattcagcttcctctggtgcccctgcatgttcctgctgtgaggctccagcacagcactcacccacactctggcctgtcttgctggatgtttcaaagagctgagctttgatatctgtaaagagaagtgactaaagcctcatacctgagaattagataaacagacaaaagggagggctagcagttcagggagtctcctggaccccacagttcaaggaggccaggaagacctcctagagcaccttgccctggcagccaaggcagtccctattttctttgatccacccagacagccacacacccccaccccccaaagggctgaggagcagctactgtctgcatagtcctggacgtcgtggaagtccacacgtcgacgcctccggtcttcttccagcaggtcactcttggtgccacataagtagatttggcagccctgaggcagaagacaagggtcacctccacaggccaacaaaaccccagcccctagtgttctagtgaggtctgttcacctacctcctctaggctgcgcagttccttcacccagaactttgctcgctcaaagctgctgctgtctgtgaggtcttggtgtgcggcatgcaggagacaaccaagtggtcaagggctgttctctggctagcctggcacccatcttttcttgtgagacagcccaaaccccccccccccttaccatagcagacgatggcagccttggcaccccgatagtagattctactcatggcctcatagcgctcagagcctgctgtgtcctaaagagtaaggcctgagtcaaacttaaggccacgttctccagaccccgctattttccagataaggaaacgggtctatgagaaatgggtctgtgaggccacaaatcaaccagtaataggcaggacctacacctcctcaggaatgagtctcccaagaatagatggccgggggacttacccaaatacctaatgtcacagtccggtctccgaccgacatcaccttggccacgaaggcggccccgatggtctgcaacgagagggaagagatcggggccataggtgcagattaccggccccccactcccccgcccaccgtgcctggcccctccggatgcactcacgttctgataaggccccaccagaaagcggtcgtgcacgtagcgctccaccaggctagtcttgcccacgtactccttgcccagcatcaccaccttgacgtccacgcgctgcccgctcatgctcccggggccgcttcagccacgtcagggtcctgagcggggacgggaggcaaaccccgatctccgctcggcccaggcagcgcccaagcctcagaccccgaccccaaacggcgccaacctacgactccagacagcgcgtcgggctcgagctctggccgtggccttgcacttcggcagcgccccgtgtgcccccgctgttcggccccgggcgccgattatccttcgaagaccccaagcctcggggcggcctgggagcgcgcgggacagcgtcctcaacagcgcagcacgccgccgtgcagctcgctactccgtcattcgctcgcctgcccggcttaagctccgttctggctgggaatcccaaccgaacctggggtctcccgcaacccggctcctacccgcagcgccgcgactcccgcgggagggggctagagggcgagggggcggggccgcaaggtcacgtggcgcgggcgccggaagcggtggctactgtgtggctgcgccggaagtggcgcgcggccggacaactcatggcggcggcggcggcggcggcagctgcttgggcgcggtgcggtggtgactgagctacgagcctggcggcgggtgtgcgccgagccccggcccggcccggccctcgcgtgcctcccaggctccgcacccctgatgctgcgcgggtgctgagcccgcttcggccgggacgatggtgaagtatttcctgggccagagcgtgctccggagttcctgggaccaagtgttcgccgccttctggcagcggtacccgaatccctataggtacgtggtatttggaagagcaaaaccgcgccatctcgctatctggagatcgaattatgggtaacccccaagtactgggaccaggaaggactcgatatcgaatcctaggtagaccttatcggggaagcggccaggccaggcctgcaaggtcctgaagggaggttgggcctgggtggtggtttacttgagaccttagtgtaagattcttttctcagtgtggtgagacaagaagaggcggcagtatgggagttgggagggatcttggagttggaaatcctatttctctgcccgtggcgctttcctggggtgcaataaatcatgaggtccattcctgctagaaggcaggaatccaggtcagtcagatggcgggagtgggaatttgccctgggatgggcccttaactctggtttgaaccatagcacataccaccctgcaaggttacgggaaggcgtggcctctctaggcccggagcctccaaatgggaatcccctcgggcagtctcttaggggcaagcttctgagggtcaccttcaccctgacacctgcagcaaacatgtcttgacggaagacatagtacaccgggaggtgacccctgaccagaaactgctgtcccggcgactcctgaccaagaccaacaggatgccacgctgggccgagcgactatttcctgccaatgttgctcactcggtgtacgtcctggaggactctattgtggacccacagaatcagaccatgactaccttcacctggaacatcaaccacgcccggctgatggtgagacacctcctgttgtgattctgcacctccccctctcccctccccccgagatagagagctcctcagatacatgtggctagagagccataaggcagcttttgtggccggaggcaggtctgggttactgagggttgacagctgtagagtatgacctcaggttttcttcttttcagctggccatcctctctggacctgtcctttgactcattcatacagtgggggaggggtacctatcttacggagttgtcctaagttctaaatgcaaagcgctcccatctggcatctatggcacagatatatgttggactcacaggagtgatgctgagtggcggaggcagtgcttttcttttttttttttctgttttttgtttttttctggtgaca

SEQ ID NO: 45557 - DNA, 756 bp, Homo sapiens
tttctcctcaatttgctaacttaaccatttaatgcttctacagactagattctccctctgatcacaacttcccacttgtatgagttaggattaggtttggctgtgagcaaaagaaaacctgcaacaatgcatacacagtggctgatttctctcccatgtaaatgctgtccccaatgccagtgggcccagcgacagtggaggtccactccccagatggctgtgtgcccagcaatctgctgcctgtgggtgcatttgcaagggtctacaaaaataagtaattcagaatcaatgttgttggaactttaaattactttgagccttaaaggaatgtgattatggaggctgagtcatgtggtaggcagctgtaacctaggcagctgtaacctttgttcctctgattatagattagccttttctttacctacattgttttgtaaaatgttgcaaaagactagggctccagaaaagatgcttttcctcttcaacttgatcttcattatagattaactttcctcttaactacttctatgacctcatgactatcacactgtctaagatggaatgtttaaatatacacttttaatttggaaaaggagcctggatcagaacacgtggaaaaagttaatttaaaataagaaaagaggccaggtgcagttgctcacgctggtaattgcaccactttgggaggccgaggtgagtgcatcacgagatcaggggtttgagaccatcctggccaacatggtgaaaccccgtctc

SEQ ID NO: 45558 - DNA, 466 bp, Homo sapiens
accggccctggagtcaggccccagttcccatctgggctctgctgcttcctgctcgtatcttaggaaaaatcctttcagttttcaaactcccaatggttgagtaaaaagggaacgagatggccatctgcctaaaaatacatcaggtgacatcacccgtaaggtgcctggcactgatgacccctgaccagtggtcagacacggctcccctcatggtgcctcctccactctgtgctgggctctcccaacagctgtgagagctgccaccggccacagcactggtgctgctctgctcctatcaagaaccctccaaagacaagggctgaaacagtgtgatgaagttccaggcaacccggggcaggagggaaaccagccaggcgcgagctggaaatgatgaaagctggttggcaggaagggtgcttaccagacctctctcctctgctgggtatgtgactgaaaaacccccaaa

SEQ ID NO: 45559 - DNA, 1839 bp, Homo sapiens
ctactttctggctatgtaactttgggtaaggccctttcaaacctgagtcttagcttctcagtgggtaaaatggagataacattactcatctcgcatggcttttaaagtgaggaggatgtaaagtgtcaagcgcagctcctgacacatagtaagtacccaatacccatcgcctcttattattggtgggtgtgaccgagatgaggaaaaggccagggacggaggtgcaaacctataaacgaagctggggtctcagctgctcgggaggcagggactagcagccaaccgcacagtacgcctatcctcttgagaaccactcacctggtggttccagatagagccctctttgctgcgctcgtcaggggtcagacgtacgtactggctcgtgagcatagtgctgccctggaagtcccagaggggcatagagctggaaccgacccctgtgggaagagacaggtgctaagaggccacgccaggactggcctcaccagaggcaggaaacccacagagatgctctgctcaggagaaagggcacgccttcccctagccctgttcagcctcgccctcactcttcactcattcccgccccaagggcttcaccttggtagggcttaatgagcgaatgctcccgcttgagatgttcactgttgccgtcagttatatccgcagtcacagaccccaacaacaaaagaagaaagagaggtgtagtggggccagggccggggccgagaagcccaggccttcccaggcaccgccggccccagccccaacgccaaatccagccttccgccgccattctcctctcctctcggccacttccgccctagaacttccgccttccgggggtcccatctattggcctccggccggaagctcttcaactttactgtcgccagggagtcaaaaagcaaagcctccgcagcagacggggcggcagctgcattggccgggcagcctctcatcctggttgagtgcagtttcatctccttagaggctccaaggcacacgccggccagccccagcaatgggttctttcgagcgacaagagctgtaaccagtcacggaacagcacgttaggcttgcgagccaatgaggagcagagggatggttggagccggcgggagcgcgagggccgtccgcgactcggggcatgctggaatttgtagtttttgtcggtcgctctaatggggcggattcgcgaagactaggacgtcttgggcttctggccgcaagtcccgtctctggaataaccttttctagtcctggagaaaggagctctgaattgaaggcggagtcctgcattccaacccttgtcctccccgggtggccctgggcaagcctttaagccgtgcctgccgtcaggcgccccagcttcgcgcctttggagactcagaattcccaattatttgagggcctccactaccctcaactcctcaggcctagtcgggttgaagcaagaggaacagacacagatcctggcctgggaccccagtgatgactggaactcatccctatgcaaaagagcgcagtgcctggtacagcaagtaacgtccatggaaggcccaggaaagctgtgaatcagaggtcgaaaactggtggcctgcagctgaatagagctctgttttacctgccaatattctaataaatggcttaactaccagtattttaaagtcagaatatagaggctgggcgtggtggctcacgcctgtaatcccagcactttgggaggctgaggccggcggatcacgagatcgggagatcgagaccatcctggctagcacggtgaaaccccgtctctactaaaaaatacaaaaaattagccgggcgtggtggcaggtgtct

SEQ ID NO: 45560 - DNA, 1982 bp, Homo sapiens
gccatggtggcgggtacctataatcccagctactcaggaggctgaggcaggagaatcactcgaacccaggaagcggaggttgcagtgagccaaaattgtgccattgcactccagcctgggcaacaagagtgaaactccatctcaaaaaaagaaaagaaaagaaaagaaaagacacaacaaaagtcttctgccactcccctcgcaaggagtgtccccttccagagatttatctgcacccatacaaacaaaaacatgcacattccatgggaccttcatggggctgggatttttgtcagctatggtcactactgaatccctggcatctagaatagtgcttgtcacataggaggtgattaataagtaactggtgaaagaatgaatatttgttctagaacctggaattgggtcatgaagaatgagtaggagttttccgggaaaggtaaaggcattctcagcagagagaagaggagctgcaatctagggagggatgtgtgagagcagatgaaatacaagtagtttggaatggctgagaagttggagttgggggctgcgggggagctgaagccaaaactcaaagggccttcaattcccaagtaaggaacatggccttttcccagaactcaatgggatatttctaagcatgggagtgaccaatgtggattcctctagctatggtgaggagaagagattggagcggggataatagggagactggattcatcatgatcgggggagagagggtgaggcctaagccaaggaggtcttcacagagaagaaggatctgaagtcccagccagagactaaatcaggaactgatgccctgtgggcagccaggaagggagaagtcgaggatggtgctttgtgggtggaggtactccaccactctcatggcatggagaagactagataagggctaagagatgggaacagccagggctagctgtggtgaagatgtggtcagagctagaactggcatccatggtggagagaagggaagaggtgtctctgcaggagagtatgaacttcaaagggagtcccaggcagagactgtgactgtcctttggcaggaagaagatgagctgtgggcatctgtggtggccaaagcccagttccaggcaccccaagcacactcacagcttagcagatctctaagaggatgtatagccttgggcaactcacttctctctgagcctcagtttcctgatctgtgaaatggtaataataagcaccattcacaaagtggttgtgaggactaggactgtaaagccacctaggaaatggcccagatccatggcacagcagacaggaagtcttcacccatatcacacaccctacaacccccacaggcacattgaaacagtcacacaccttattaagaccaccattggcaatggtccaggcccaaaagcaacctccaccgtaacccctttcacacatcaagtctgactgaatctctctgtctgtgtggcctgaagcaaggtgtctggagagaggtgaggcagtgctgggagaagaagtgtgttaactagggcagtgctagctgctataacaaataggccctaatgtatataatgacctgaaaatttttttgatgtttcttttttttttaactatttttacaaggtttgtgcatctgtcaggaggctcaaaaaattttacttcccacttacataatggtctgaagctggtttccaggttgatgggtggcttgccttcaggcactgatacacagaccctgctttttccttcttgtggttccacaatcccctgggcctcctcatcttctctatccatccagctgaaggagaaagagggagggtgcagggcacacacttacttcttcaaagccttggctcaaaaatgacacatgtcatcccacacattttcaattggcaagaagtggtcacatgtccacatctgactgcaagggaacctgggaaagtaaagttagccacgtgcccaggaaaaaaggacatgaattt

SEQ ID NO: 45561 - DNA, 1147 bp, Homo sapiens
agagctccctggtcctggccagaccaggctgggctccttgctgggcacacggaagcctctgccttgtgttggtgcccgtgcgggatgctgccaggagtgtgttggtggcgtgtgtgtgcgtgaacgtgtgtgtgtgtgcgcgtgtgtgtgtaggaagaggcgttcgctctcttagaccttgcttctttctgtggtttggtttctatagagacacttcctgtggcagagaaaagaggtagtgagcggtgtttcaggatgtgagggcccgcaggagccgagtcaggctctctccactgcctgcccgccaccgtgcaagctctggccggcgctgcccacagtccccatggtgggcagcccccgcggcggggacccctgatcggcagcggcatgccagggaagcccaagcacctgggcgtccccaacgggcgcatggtgagtgtgggctccgggccagggccacgaggagggggtgggcacacccagggtggagcccaggaggcacacccggcagggccaggcaagagcccacgggctgccagcaggcgagagaagttgggtacagacagcagcaggtggtaggacctggtgctctcacccctagacccttccagatggcccagccgggagcctggtacaaccctggcagtgaggccagagcgggcacaggcttctggtccagcccccaccactccctcacctgctgcatctggggctgcatcccagggtctcagggacactcgatgtgctccttgccccctgcccatccccacagtggctcaagcccctacatcccgctcagcctgagtcctcccctcctcaccccctgctccaggtgcccaaggtcatgttagtggcagctcttgctgggtcggtgtcctccagccggagctactccagaggcttcctgccagaactagcattgtttgggcagcccgggatggggcagcagggtcagactaggttgatgcagcttctgcctgttctattcctgagcttccaggaagggctgagcactaagatccccctggctgcagctgccccaccccttaaccctctccctggctgcttagccccagatcagagctgccctcagaggatctggctcttctcattcattcagcagatggggcaagctgtgctgggcctc

SEQ ID NO: 45562 - DNA, 1408 bp, Homo sapiens
gagggcagggcgtggatggagcttcaggctggccagagtggggtcctctgtcagcttcctcatctagccttcctgcagcaccctcttcctcttctcccagctgggaacttttcttccttctccctgtccttgtctctgcctctcattttctctccctgtcttcagatcggtctggctccgtctgtctgtctggccctgtctgtctggcttggtctcttggccctgtctctgtcccaatctttttgatcacatcccccagtttggtctctgtgtctctgagtctctgcctgcctccccctccttcccctcccaggagttcctgaagaaggagttcagcgcggaaaacgtgactttctggaaggcctgcgagcgcttccagcagatcccggccagcgatacccagcaggtgggggaagggggagctggggccgagggctggggagaggggaactgggccacgctccctgaccaactcctcctgtccctcctccttcagctagctcaggaggcccgcaacatctaccaggagttcctgtccagccaggcgctgagcccagtgaacatcgaccgtcaggcctggcttggcgaggaggtgctggccgagccccggccggacatgtttcgggcacagcagcttcaggtgggcgatcctggggggattggccttgaaagggagacaaaaggagcaggggcggggtcggaccctggcggggagtctgaactacaaagcggagggggcaaatttggaggcggagacagagccaaatgccggggcaggcagggcggagctcagagggcggtatcagaggcacggggaaggacagttagaggcggagcctagctgagctcggggcgggcttggaccccgggggtgggtataggaactgaggtcggggcggggcttgggaaatccagccctaggtttggggcggggccagccccaaggacccggcctgggtgcaggcagcccagcgcccccaccccagccccggctcacctgttccggggtcgccccgcagatcttcaacttgatgaagttcgacagctatgcgcgcttcgtcaagtccccgctgtaccgcgagtgcctgctagccgaagccgagggacgccctctgcgggaacctggctcctcgcgcctcggcagccctgacgccacgaggaaggtgcgtgggactgggcgagggactgggcgaggcagggggtcctgcggaccgcgtgcaagaggggacgcctccgggtgcagatctgcgagtctgtgcccacggtctgcatgcgggctggggcccagcccggtgccagcgcctcccctgtacccacagaagccgaagctgaagcccgggaagtcgctgccgctgggtgtggaggagttggggcagctgccacccgttgagggtcctgggggccgccc

SEQ ID NO: 45563 - DNA, 637 bp, Homo sapiens
tatatgtcatgggtacacatcctcagttggcaaatgtgtgcacatgtgcagcacccaggtgtgtatacacagcacgtgtgtgggaatcagcgggtggacccgtctctaggtgcccatatgcctgggtgtgcatacatgtgttcctgcaggaggacgtatctttgcctgccttgggagtgcgtgtgcatgcttgagccccagcaagcttacctatctctgtgtacctgtgtgcatgcccttgcatgtgtacacataatctcccccactcctgccatgaatcagagccaccggaagagccttgggagcacggagggtgaaagtgaaagccggccagggaagtactgctgtgtgtacctgcccgatggcacagcctccttggccctggccagacctggcctcaccatccgagacatgctggcagggatctgtgagaaacgaggcctctctctacctgacatcaaggtctacctggtgggcaatgaacaggtgggaacgtgacctggctccaactctaacctccttcctgatcctgaccccaactccatttctgtctctgctcagtcatggctccaaccccaattcaagttctaaacccaactccaaagcaccctcagcaccaactttcactcactcagac

SEQ ID NO: 45564 - DNA, 1046 bp, Homo sapiens
tcccttcaggccctgttctagctacctggctccccaggccccgcccctcgtgctagccccgcccctgggacaaaccccgccccctacaagccagtcccaccttctgcagttcaagctccaccccctcgcgtttgtcctgggaagggtttggcggggggccggccctccggccctctgctgcccgagggttcctcgcaggctggagctgacggcgctggagcgcgtggtacgaatctcagccaagcccaccaagcggctgcaggaggcgctgcagcccattctggagaagcacggcttgagcccgctagaggtggtgctgcaccgggtgagcttccgggccgcggggcggggcggggcggggccgggccggggccggggccggggccggggccggggccggggccggggccggggccgggcggaggcctgtaccgcgggctgctgacctctccccacagccaggcgagaaacagcctctggatctggggaagctagtgagctcggtggcggcccagagactggttttggacactcttccaggtaggggacgctggcctcggggcttgatctggaacagctgtggcccaggaggaagggggtccaggtgggaggcaaacactaactgtggccctctctgctgcaggtgtgaagatctccaaagcccgtgacaaatctccctgccgcagccaggtgagcgaaaggcgagtggcctcttccaccctctgcttctcccctcccgattttggctctgaccccaaattctcgcagggctgcccacctagaactcaggataaggccacccatccccctccagcgtcccccagttctctggtgaaggtgcccagtagtgccactggaaagcggcagacctgtgacatcgaaggtacatggtggatgagctggggatcagaaagactagggcagtggggttggggaccattcagggtggcatcagagagccttgagctaaggcagggggctgggtgccactgggcgtggaacaggaaggatgggggttggggggtcaaaggggctggaacaggggg

SEQ ID NO: 45565 - DNA, 434 bp, Homo sapiens
gggccaggagaaggcacctgagagagtgaggggtgtctcctgactgcctcaaacaggtcacgttgccttccccattggaatctttgcactcgctgtctcctctgccaggaactccccttacctgccccgtgcgcagtcaactggctcctcctcctcctggaaatctgtggggtttgccagccaccctgtcccactatgggagcttcacacctctgccccctcagcccattttgtttggctggcataaccggatccctggcaagcctggctgatcagaatactccattccactggccaatcagcgtactccattccactagccaatcagagtagtacctttccctggccagaatttggttcagacatagtcctctgacctcaggtgttccaatcagagtcccagtcccggtcattttctaccgtctcctggggtt

SEQ ID NO: 45566 - DNA, 1998 bp, Homo sapiens
gcccctgccggaagtgctgaggcaacagccccaacccccagggaggtgatcacaagatgcaccccgcagggtgtctagcctggtagtcaggtgaccctggcttttgagcgggtgtagaagaagctggaagtcagctaccatggggagacaaaggcccaggttgcggggaacacacttggttcgttacattgaatcagatgcagctcaggctgagcacaggatcaggaactgcccaactccagggggcaccattcacatccttggtgggcctggtgggctcaggaagagctgggaacatgaatgtgtccatgtggactgtgaaaactgtagggtctgggcaaggggtgctcagtaaccatcttagcacctgtctccagagaactggcttggggttagaccagggacagaaagcaaagggaggactgccatagaaccagcatcacccctcaggctggcctagggcgctggctgccagcatgaagtcccagctagctaagaagggtaggtggggataaccccactagccagggaggtcactgtgttcctgacccagtgctggggagctgaaggaacctggaacccagaccacaacctggagccaggagtgtggaactggaagttggagcccagaacccggaagctggagccaagagcctgaagctcagaacctgcagtgtggaatatggaatcagagcctggagcccagaatttggagcccagtgtctagaaccagagccccaagcttgacacccgaacccagaaactagggccaggggactgggtctcagagcccagagcccagaacccagagcttgaacctgagaatttagagtgcagagcctggagttcctagccgggagaagatcccagaacctggagatgagctccaggcctgaaatacagagcctaagacctgaagtctaaagccagacctcagagcttcaggtccggacctggacaccagagccggggcccgccttggtagcatgctgtcagcctccctctctggcctggtcctaaggccagtgtgataggctagagccatatgtggaagcgagctgcaggggaagaggtgacttctgagaaaagcccaaagcagcctcagctcttttggccacagactttggccttatcagtaaatgagtgaccagtgccttggccaccaagattaataattcacgcagggcacttatcccctaaacaggcacgaggcattcacaggtcagccaaccctgccctggacccatagcatttattttagccttgggcccctatctggaaaatagaacttggaagagacgatgtttcagggccttgcctgctctgtgctggggccaggcagctctgttgaagtccaggctctccaagagaggacaaagtcaaggaggccaggaaagccattgctttgttacccaaagggaacccaccggtgagaaccacttttttgacaagagatatagaggggatgtgcccctgatgtgtgcagcgcacactcgtgactgtgtgcatggcaattgtgctggtctgaatgccgggatgagacgttcactgccatacacccaacgtacagcactgtgctgactcatcgtggagcttagatgtttgttgaatacataacatgcttgtgagaagaggtaggagctctcaaactacactgatgggaaagcctgttacgctgttatgaggttatgctggttattagtcagtttcccatccccccaaaatgaaaatccaggtcatggacagaatgctctttctttctttctctctttcctttctttccttccttcctttctttctctttccctctttctttccttctttctttctttctttctctctctttctttctttccttccttccttcttccttctttctctttctttcattcttttctttctttctctttctttctctctctctctttcctttttttttttttttttttttttttttgagacagagtcttgctctgttacccaggctggagtacaatg

SEQ ID NO: 45567 - DNA, 1156 bp, Homo sapiens
agctggggaaactgaggaaggctggcaggagcccaggtgtgatggcgccagcagcacatatctcaagcacctgctccgagccaggctcgtgggcacttagacacagcccataccctgccctcaaggatcacacagctcacgatcactctagtgcccatgggcataagacctagcaccaggtaggcactagactagactgccctgagactgcacacactgcaccatacacatccccacccaagggttcccgggaggaggagccaggccacttaccgactgtgtgctcttcagctttgtacttatgctccttgggggcttcccaaggtggaatctacaagggagagaagaaggcagggaactgactataagtcatagcctgccaccgatctgttgctagtctgcagcttcctctcacagcccagaaatgcagagatttcttcccaagacccaaaccctttctacctccccccgttgtcttcttaaggcccatctcccccagaaatgcaggctgtgcccttgtatccacccagtctggttgtctgtctcctctgcctgggccttccgggctggcctcacctttccacataggcctcctagtcacctggacccacaggtcatgagcagaggccatggctcatggctgtgatagcgaccccccagaacaatcctgggacaatcctggttcccacagcactcaccgaaagtgttgactccaagctcaccagcaggaaccccaggagcagcagagccctcatggcatccgtccgttggtccagctgcctatccaggagtccagatcaataggactggccaaaggtcttggaaatagagattggtcaagctgccctcctgagcctggtggggcacaggctgtttgtggaaagccaagtggagcaacttccttggtcaccccttgagggccggaaagttgggagtttgtgggtgggggtgaaatgaagagctgggctcctcctctcttttctagatagtgggactggaagcagaagaagggacattcttatgctctgggtcctgtggagatcaggaggttaaggagatcaaagatcatggggatcttggagtccactgtgaagtgtgttcattttctattgtcatgtaacaaactaccataaactcagcatcttacaacaatacc

SEQ ID NO: 45568 - DNA, 2338 bp, Homo sapiens
cttctcctattccctgaacacaccacttagtctggcttagagcctctgcgtttgctgttgcttctactggatccgctcaaatgtcacaccctgagagtgtcacacactctcttaacgtccgaagagcagttgtcactctctgaaaccatctatttgtttatttacagaataattacctttatctcaccctgccctcacttgctccctccacttctagcaagtaagcagggagcctggctatcttgctgccatcactgtgttctccagcacctggcttggtgcctggcacagaggtgttgctctgtattttcggatgaatgaatgcataggaactagagaagcctagatggatccggctctgccttactcgcggagtttgggcaagcctgtttcctgctgcgtgaagtagggggtggaggaagcggggtgttaagctacaaggtgttgattagctgtaagatttcagccttgttttctccgtagtcttcgggctggagccagccacttgacgtccggcgcctcagctccccacctgtataatgggtgtgaactcatcccgaggtctaggggtggtagcgctgccttataaggcggcagaggccgagggaaggcgaggccgagtgggtggagagaaatcacaacatccggctgcgggggctgggcggggcgcctgcggcgaccgggcaagaggtcggggaacggctgcgaggccgcagcctcctccctgtctctccctctttcgatgtgcgccctcctgattggggccgacccaagggaatacggccacacaagtggaccaaacaaactcgctgccagcccgcaggaggcccaggatacggagcgcgtccccgacaaaaccctagaaaagccgtctgcgagccaaaggccgccgggccacaccttcaggcgacgacccaatcaaaatgcagtacttgagatgacggacgtcttcttcacccaatcacatattcggcctcctgggcgtgccccagagtacccacctccattgtcccggctgagggctcggccctaattggcagtttggtatcctacgaaagcctagaaattcgaacctaggggctgaaccccgccctcagaccaaccaggaagaggtgacgtgattggtcccgcccccgtacttctttgagcgagtccccagctgggggggcgggggaaaaaatgaagaggaagactaatgggaagacggcgcggggagcttctgcccggtgattggtcaaatgaggtaaacagagggcggggcagggcgggccagcgccggggtggcccccgggagggggcggagagtgcgcggctggctgcggcggccggggaggccggggaggccgcggcgcggtcactgcgagccgagccgagccgcgccgagccgcgccgatcgccatccggcctcggcactcgcgcgcgatcccggccggcggcgcggcccggcgggccaggcggcgccacagcccatggagctcgagaacatcgtagcgaacacggtgctactcaaggcccgggaaggtgaggcggccgggtgggcggccgggcccgggtgcgtggagcgcgagtgcgctgcgtctgagctccgcagggctacccagccgtcggatcccctaggcccgcgggccctgcgccttacaccccgcccagacacgagcctttccggcccgtcgtcttcctcctccgcacctgcccccgggattcggggcccaggaaggggcgggggtcaggccgccgccctcgcggcgggtgggggtgaaggagtgaaagaaggtgagacgaagagggaagggtgggaccggagccccaggagagcctgtctgagaggcaagcctcctccaggggagaggtgtaaagatgccccacgtgccaggggcccagaccccagcaccctagcctaatcccgcgcaaagttggcgataggtaaagctggagaatgaataaacggaccctctgcgtagcacagcccacctgacttggggaaactcctggccacaaatgctacttataggactgccacttgctccgtgcctcaggacactgagggcagaggtgaatggatatttgccctcagggagcccatggtctagtggggctagcggacacagaaagaagtgggagcagagcatgctgctctgtcagtattgtaagctcagaggtctggctggggaaaccagtctggtggaccgagtgtgtgtgtagctcctcgtggctcccaccccagatgttatcaggcacttgctctgtgcaggtcctgggagacacagaaggaccagatcgggtcctcactgccttgtggtcagtctgcccccacctgccacactccacctcagtaaca

SEQ ID NO: 45569 - DNA, 2056 bp, Homo sapiens
acctcagctgcctggctgtgcatccagcgtgcacgaccggtgtggcctgggctccagcctggagtgtggaccgggtcggccggcgtgtgcctcccctgtgagggtgccctggcgggtgtgagcccggcgggctggagaaccgggtctcggcgccgcaggtgggtgaccgtcctccccctccttccctccgggggcagcctcctcgcggcgtgtggctgggggtgcggggccctctgccggctgccgcgcgcgcgcacgccgggctcagcacccgccgtgtacgcgcccgtgcgcgcgccccgcgcctccagcccagcgctcggagccgctttcgctgccactgtctgctcccccgggccgccgccgcctccccccgcaggcccggggctctgtccgctgggcccgcgctgctcgccccgagccaggagaacgagctcgaggaggatgcctgggcccgtgagtaccgcggcggctgcgggccgggcgggcacggagcgcgggcggaagatggtcccaggactgagcccttccccgcgggcggctcagcgccctggccccgggtcgccgccccggtcccccgcccgggccgcgagcagcccctcccccagtccacaccggagggagggagagcgccagtgagcgagggagccggaacggggcgcgagccgccaccagttcgcttggaaacggttgccacagcaacggggttgcgctccccggcaacacgactgcggggcggcgacgccccctccccctccctcccccctcccccgacgcgggcccacagcccgggggtgcagggggagaggggtgcgcggcgggggcatgtcgcccctctggcccggctgggtgtgcctgcctccacagcccgtcgagggtgggggtgggggcgaacggccgtgggcacgagctggctcccacgtggctgcagtcgtcgcagcagggctcctggggtggctgcaaacgtgggggcggcccagcccctgggcttgtcacgggaggaggaggcatggaggctggcgctggggtctttgcccatagaccccccacccacccacccaccgccgccaccacctaatcgcgccggccctggacatggcctgagccgagctgggttccccaggggcgacgtttcttaccagggtagaggagcgaagcttgcatccctcctcctcctcacggccgaggcacgtgccaaaccgggcatgggcccgcggtgagtctctgctccgtgttcctagccaccattctccagggaggggtggaagcagagtgggcaggagcagaggaaaggatattgctgacccagggaagctgaagcccaggccaaatgggagcgacccagcccattgtctggatcacaagtgcccctttcttgtctgagcacaatgccccaactgtactgagtagcatgcaggttggccggcagggaggcacgcgccacatggaggtgcctggtccgccaggggagctcctctgggaggagaatggcctctgactcagaggaaatgacctctggctcccctcccaacctcccctcagcgggcatcatgctggagagagaaatggccctcctgccagctctcccaggcctgactcagcagatgccagccccgaccgcgggcttcagatccaggatcccagcgaccacaaccgtccttgggtttcctttcccatccggggaggcatcctagaggtgactggcatctggggcattggaggccttggcataagatgcccttagatgggtggtgccctggaggtcaggcctgagtctcctgcaggcaggggcgcctggggaattactcacgggtgcctttcattcccttcctgctctgtgagacctgtgttgagtgctctgcatccattatctcctaatttttttttacaacagttgcgcaaggtaagtttattatccccattttagagatgaagactctaaagggaggctcagggaggtgagtgacttgcccaaggtcacactaccagtaagtggcagagctgagtctacactgcaggcttctctgggggcaaagctcctctctgcctgctagct

SEQ ID NO: 45570 - DNA, 2461 bp, Homo sapiens
ccctacgggagcggcgggagacccggagggcgcggtgcggagccagttgttccgggctttgggcagccaggggctgccaggcgtctgtacagggcgtcgggtggctgtctgtggggctctaggagatgtaccaccctttccccgccgcacagcaacggcgccgagacgcctcttcagggacctggtgcgcacaggctcctgaaaccctttggccccgggactgcggatggcgaatctctcgttcggactcagagctggagtccgtccttcgcgcgccccctgctggcccgcctcggctcccctcggcgcccgggctccgcggcggcggccggggctcagatcggggaaaccctaccggggaaacctcgaggcgtgacgtcaccctcctcggtgacgtcaccgggcccccggggagcgcgaggttcccacggaggaggctttccccggactgcgcagggcgcgggcgggggccgggaagtcgttgggggccgcggcgcgccttcactgcgccccgtgtctgccctacaggtcccgcgcggccccgggtgaggcacgcccgcgcgcccgccggcgccatgggaaggagcgggcgccgctgctgtcccccgccggcgcgcgcacgacttgagacctgccacgggcagcccccggccgcgggtccccgagtgacgctggcggcacctgagagtgtggcgcgggcccggggccacgcagcggagcccagtgtccagtgaagcgtctgaggacccgccgcccgtgccgccgccatggtgatgtcccagggcacctacacgttcctcacgtgcttcgccggcttctggctcatctggggtctcatcgtcctgctctgctgcttctgcagcttcctgcgccgccgcctcaaacggcgccaggaggagcgactgcgcgagcagaacctgcgcgccctagagctggagcccctcgaactcgagggcagtctggccgggagccccccgggcctggcgccgccgcagccaccaccacaccgtagccgcctggaggcgccggctcacgcgcactcgcatccgcacgtgcacgtgcacccgctgctgcaccacgggcccgcgcagccgcacgcgcacgcgcacccacacccgcaccaccacgcgctcccgcacccgccgcctacgcacctgtcggtgccgccacggccctggagctacccgcgccaaggtgagtaccgacctccgccagggggcgatccgggccgccggaagtgggcgggcgttggagggctcgctgcttaccctcagggcttccatccgcagcctccgggagaacacgggcggcggcgggctcgggttcgggctagggctggggcgcgggcggcccctggccggggcctctgcgagaggctgggaaccggcggcctcacctcctccgaccgcctcccactccgcagcggaatcggacatgtccaaaccaccgtgttacgaagaggcggtgctgatggcagagccgccgccgccctatagcgaggtgctcacggacacgcgcggcctctaccgcaagatcgtcacgcccttcctgagtcgccgcgacagcgcggagaagcaggagcagccgcctcccagctacaagccgctcttcctggaccggggctacacctcggcgctgcacctgcccagcgcccctcggcccgcgccgccctgcccagccctctgcctgcaggccgaccgtggccgccgggtcttccccagctggaccgactcagagctcagcagccgcgagcccctggagcacggagcttggcgtctgccggtctccatccccttgttcgggaggactacagccgtatagaggggcgcccggcgccccgggccccaccggcggactcctggcctgactgcggggctttttaaatgcttccctggactgcggggaggggcggggggagggagggatttcttatcccgtttgttacattttgaggataataaaggtgtgtgatctggtttggtacaagcggagggtgcaccggctgctttcgcccagggttctgtgtgaccagacaagccggggccttggcgggaaggaccctcaacgtgcgtttccgccacaacagaacctaagggtacagcactaagtctaagaccaacccttctccggtggttgtaggtgccaagcggcttcccctgggagccttagcccctagcaccgcccccccaccccgcccccgcctggcgggccttggaattagggtgaggacgccccctggtggcaaggaggtgctgcggcctcggaggtgggaggagttgggaacctgggtcagggcaggcggcagcccgaagggatctggatttctttattaacagacatgagcacgacccgttacagaagtttgtgctttccaaaaaaaaaaaaaaaaaaaaaaaaaaaacagttactaaacgtgaaaaaggaacccaagcaaagaggaaggagttggggaggggccacc

SEQ ID NO: 45571 - DNA, 811 bp, Homo sapiens
gagagctcggcggccccttcctcactcgctagataagaagacttgcttcagtttattgagcaccaactatgctacatattgacactgaatcttccaacaaccttgtggagtaatctgggattttacccattttgcacttgcaaatgtacacagagaggttaaacaacttgcctcaagtcacccagctagtaagaggcagagccaggaagtgtctctgaccctaaggctccaccactgtgggccacctctgctgagcatgggggcccaactgaggggtcagcccacctggagacaccctgagccactccctcacctttagttcaatccaactaaatcaaccccttatactgtgtatggggaagtgacaccccagaggggaagtgacttactcaaggtcatggtgagtcagtagaagggaaacctggcccagccactccctgcccacagggctggctcctgggagctgtgggctgagcccgaggtgggggtcttggggtgcagctagctggctcctggagagggggtggggggcggggacggcttcccttcccagagtgaggagggcaggaagcacagaggatgaggggtgttcagagcgtggggagggcagcaggagagcagaagacagcgctgggcgggtggctggagagaggcagggaggggctcaagccaggggcagggtaaggccagaggaaccaaggagggaaaaagccagggggctggaccctgcatgaggtgggggtgagtcagcctgagcagcccagccccccagtcccagacgttacctcatctcccaggcctgggcccacag

SEQ ID NO: 45572 - DNA, 1088 bp, Homo sapiens
tggggtgcggcccctgtggagacagatgggggctgggaccctcaagcatagcttggagggggatccttccccgagcccagtggggggtggtgcctcccacacagaactgctcccacaccgacgtgactcagtttccccttagtcccccgcccgggccccatgcattagactggccccggccgcaggaagcggcgcaggcgccaatcggccccgccgcagccggcttagcggcaggaaggcgggggcgggggcggaggcaggggccagggccagcgggaggaagcacagcctggaccacgacccccagtgccctttgtggtcctcagcaggccccgggcgcccgcctggtgcagcccaagacgccccgcgcggtcgtcgatacctgcttggcccggccagggcgctgctctgcgtcgggctccagggagcctcgttgggatcggccgccagtgttctgaccccgcccccacagccaccctccactttgagcgcgcggacgggggcggggcaccaggccacgccctcgtcgcgaccacgcccactagactttctccgctggtggaaagccccacccagctcttccgtcctgcccaatcaccaagtcccgtcgggcttagagctgagaggcctcgccgacccgggccctgcaacggggcggagtcgggagggggccggggctgcgggtcgcctccttagggaagcgctgcctcgcccagtccctcgcaccgcccgctggcggagggagaggaaagcggaccttcaaaccagaccgacctgggacatagtagtctctgaaccttagtttgctactccgaaaaatgggacgatcatactcgcctcgcagggctgccgcgagtgtcggtatcgtaggcgcaaccctcggggactgcagaatctgtaaatcagaggggctgggggagacaagttgagggggacaggggcgtttaaagctagagttgcgcaacgctctgccgaaggcaggaaaacagggcaggagcggacgccggatgtccctgcaaccccgagccgacccgcgcaccgtcggaagcgccgcgtcccgctccaccttggccagagcggactgcgcc

SEQ ID NO: 45573 - DNA, 1943 bp, Homo sapiens
gatggggtcatcatacgtaatgcccttagccatctccttcactgacatcaatgctgaagagagagacatggctcagggctggctcctgcttctgagaagccagatcccttgagatataacatgcctggggctgggaggagaagactcagtccaccttctcactatcctggctacaaccatacctcggccctcggcaacactctccaggatcttctcttcttccttcagctgcttctccttggcagactctttgcgcgctgagaaaagaagtggaagatgtcagacagataccaaaacggtgtaccaggctcagcttcttctttctcgcccaggcagtgctgcccagcccaccttcagccttctctttaaggtgctggtgctgatccaggaggctgacgttggactgagggcctagcgggatgtcgtcctcatctccccggggttcactaccgctgtcctgctgctcttcctccgcagctcccttgcgtcttcgctgcagcagcttctggagctgaggttccacccgggatccacagataggatgggcatggagtccacaaggtcagcgtcaggatcctggctttggggcgaggatcctgtgcccgaggcgcaaagctgccctacccctcagatcaagccgtcggtccctcgtttgtctgggggccgcgccctggtgtactgaagctcactcctcagactgccctcctccccacggaggccgaggccacgcccgccccctgcgaccccgcggtcacggccccatccctccccggacgcgtgcccctcaccagtagctgccggcgctgccgtaacggcacatagggcacgtagtcctcgtcgtcctcatcttccgcctcggagcggcttcctccggcaggcacctcgtcggtgcgagcccgctgcaagcacacgccagtcaggcacggcctgctcccctcttcacgcccgctcccacacgcgcggggtctcgcctctctcctaccttccgttcgggttccgactcctccattctttgctgcacgcatgcgcgccacggcgaaaccccgcctcatccttgcgtgagacccaatccgatgtgaagaggcgaacgacggcgcgtaggaacgacctcggagttccggatcgcgcagagggacaaatttgttccggagatactatcgcacggcgaggcatggacgctttcatgggtggttacgcgacagttgccaggaccgagggcgaaaccggctgcaaggcattgtgggacattggaggacttggaatatgcgctagaaggctcaatccaagcccattggaagaggaagacgtacgcagcggagacagctgatccggagtcggggcggcctgccaggtgcccaacctctcccagagcatggcgtcttgggcacgcccctgccggcggacagtgcgtcctctagggccgggagctgcgggccgagttcgcgtgggccctgcgctttcatccctgccggggacgccggggttgcgggataaaccgctcgacacaccctgcctccctgactgcgcctgtgtgacacatacgttcactggtggggcacgcatcagatacggatggcagtggttttgaagtgggaggccctgtataaatgtaaacggttattactgtaaatgctctaacagagctgcctggggggcgcttccagggaagcgtggcaatctcaggccgggagaggagaggcgtcctgggccagggcgctgcaggaatacaggtctggcgatgtgcaagtacacagattcaccaggcaacagcattgcggcaagggtgggatggggaagccagacctaaggccagaaaaggagattgcgaccagagcatgcctgctgtgactgtcagagtaagtggtttcaactttattagagacttctaaggaatgacttggtcagctctgtgctttcttgccttcaagagtgtgtgctgggcg

SEQ ID NO: 45574 - DNA, 1794 bp, Homo sapiens
cattctgtctctgagggtctctctaggatctgcttgtacacaggtgctcctcaggcctggaggatgatctgcagaagccagtggagcagcaggcccaggctctgcctctgtgccacgtgtaccacagcagcagggcatgccagacccctgagggccccagatttcagacaagtgggaaaaaggttctgatgactctctagcttatgtaccaaaattaatggaattatatactgctcaacactcataattctgggagcagacccactttgaagaactcagctccttcatttagaagtatgacagtaaatcatatttacataataaaccaataacccaagagttttgtctctgggtctctgagagttatttcagggtcaaagaagacttacacagctgctaaattagctaataactattacggcttacactgccaatctcttgggcatttaaattcagtgcttttatacccatcccttaggtggggaaatcaaggcctaggaagacaaggttgcccaggtcctctgtggtgctgcaggggtcaggtgatctaagtcctatgactccactttctactcagacagacctcaccggatgccctcttgatccaatgtgaactaccagagccaatgacaactttgagaggcaaacgtttttctattagcagtatttttcaagttcagagttgtggggaaaggagttccagaaatagtcaaggtctaagctgcccctgcttccaccagaacagttccacttttacttattttagtaaccagtcttatgatttgtttgaacaaagtggataggaaaacacagctgtccacatttatagggcctggctctctcccgagcctggagactcaccggggatggtaggaggactcccaagagagctgcctggcatggccccactggaatgtggggaattccagaggcccgagagcttatgtgccgacaggaacgagctaggatcccagtctcccgagttcccagggcaggaagaggaggacgaggatgaggatgatgaggaggaagacgaggacgaatgagagtcatctccacaagactgtgatttgcaggatgtgtgtgacaaggagatctggagaagggggaggaaaaaggctcacggtcaaacagcaaacatcggagctgaccctctgctgcctcagcttttcctgagggagctccttctcctccagaccatgtgccatagcaaaaacacaattaatacaactccagctataagaacaaatgagggccaggcctttgctgggaaagggctgcggtggtcccacttacatgcaatgtgtggagactggggagagagactctggtaggggcagagactgcctgtgaactgcgggcctttggggagtagagagcggccaatgacaggaagggccttttgaccaggagtcctgaagctaaactgttcctgggtaaaagggaagatctgcagcgacgtgagaaatgaggaaagtctggccatcgtgattcatgaaacagcagacttagatgactcccaagtgtctgtccttctaactagggcacatttcagaccctcaaactcatctctgtctcccatgtcatactggttggctttcaagctgccacagagccgaaggcagcaggctcgtgatctaccagtacctatgagtgggccctcatcctgtgcacagaccaccctgagggactgaccggtgggctgccagaagtttctcttcttcccccaaatctgaacttgagctgccaatgctgtgccagtgcagcccagaagtctctcagtgcctgggcatg

SEQ ID NO: 45575 - DNA, 2154 bp, Homo sapiens
ctgcctcagcctcccaagtggctaggattacaggcgcctgccaatacgcctgactaatttttatatttttagtagagacagggtttcaccatgttggccatgccggtcttgaactcctgacctcaagtgatccgcctgcctcagcctctcaaagtgctggcattacaggcatgagccaccacacctggccattcttctaattttgttttggaaaatatagttttcattaaaaattgttatgttaacaagatagctttaatattgtctttcttaaataaattagtgacaaaatattttaaagctttctcagctttaatatttaatttggtaagtatcaatagatataaacaacacaaacaaaagctctttgggttcctcaataatttttaggaatatataaggtctcctgaggttggaggattgctcaagcccaagtgacggaggttgcagtgagccaagattgcaccattgtactccaaactgggtaacagtgagagcctgtctcaaaaaaaaaaaaaaaaaaagatagctctctgggggcatgactcaattttctagcttggcctttctgtccacaatttgggaataacccattgccagaccagacagctgtcaaggactactctgaagctggattgaatttccagcactcagcgtggcctcattcatcccatggattctttttcatctccagagtttgtgtatgttcgtacaggattgccccaagacacatgctgtatctaaccagctgccctgcaacaggtcccaaattctattttgaaatggcccattagagcactctactctcaaggcacccaactccaagagcctctctgtcaccaaggcaggcagaggacaacaccagcagctaaaattccctttcagaagcagagaaaatgattaatcctcagcctagaaaaactcattgtcatagttatcatcagtcactcttccattcacccatttattccctcattcaacattgtcagagtccctgtctcctgccaattgtgctaagtgccgggaaacatctacccttgacaattcctattcattccctaagattctggtcaaaggtcaatgaagctcttgctggtcaagctaagcacaactgattctatttagtatagcatcatcaaaatgtgccacagatgtattctgtctgttcctaaattcctggtagaatgtgagccctctgggggcagtgtgtggaccttggtcatttaagtatgcccaggaacctaggcttggcttgggcctgacacattgcaggcattcactgaataaataaatgaaagcttaaagcccatctggctcatgtctcagctgttcaacacaaaggcagaatttaaaacagagccaaaacagtgcatttcccaacatgctatgagtcactctgagccactgatgagagggcaatcagtgagaagaatctcagactattctaatgctgacaatcagagctgcagttaattctaagagagctgacacaaccccacctcagtgccctggagctgttacccaaacttccatgcaggctgtgggctcaggcccttccaggaggtagaacagctgtttcacactacgagactagtcagtggagaatcctttctggttgtacaagctcggttgggagtgagtctctctgatcctagtgaccttaaccctaaaactttctgttttaatatccccacaaggctagctcatccgctgaactgcctcctgggtgcaatgagccacaaggagggcccaagccgcagatttacctgaatcctcaggtcaaactgccactctgctactctaaccccagcacacgttactcatggaggaggaagagcatgaattttggggacgagacacacagttgtgagttcaaatcccagttgccattttcaatatgatcttggaatattactcaatttctttgagcctcaatttcctcatttatgaaatgggaataaaaccatattttacagagttgtgaggacagaaggaaataaattatgtaaagtacctggcctgggcctggcacaaagtaggtgctcaatacccgttagtttctttcctcttctgccctggaagaaatgacagggaaacttactaagtgagacttgcccaaaccaaatttatttcttttttttttttttttgagac

SEQ ID NO: 45576 - DNA, 2370 bp, Homo sapiens
gctgacattttcattaattaaaaaccttattgtgatctgagacacaaaggaaatcagcatgaaaactgggttacaataagcacgggttctggaccgattcattttctctctcattcacctagttatttttattctgtgttagcaaggccctgggcgaggcgtggaagatcagagaaagatggcatagcctgtgtccctgtggagttcacagtccagggcaggcaacagacatatcaacacaatgtttcatcacagaaaggggagtgctaccagagggaggcacagagggctgtgggcacagagagggcacctgacgcaactggggaggtcaggggaggctttgtgggaaggtaccccaaacggcaaccccactcacatgcacaattccagagattctactagaaggctgtcaagagccatgccttctggctgcaccagcctcccagagtcccctgctgcccgatgcagtgtctgcagagccaaacgcatcttccgccacgcctcatcctcatccggcgccgcatccgaccctccaagactcctgcaggagcctgccttcctgggcaggctcagccaaaagaccaactcaaaactcttttgtcagagcaagcttagggagagccacccagccccgagtgccacaaccctcccagagcaaccgtggcccatgtcacccccgcctctcagtgaactttggcagggtacctcccgttatctcctttgctcaaaagaaagtgaccttcttccaggtggcaagctggaagctttggggaatcctcctactgttcgctctcagcaggattctccaaacctgggatctcaaggtcggggtgggctgccttgcggagcaggggagggaagaagggcaggttctgctgggtttccacctcagtgcagaaaccccaccaaaaactcctccgggcagcctggctgtctgctccaactgctctgctgggtatggcgaggaggcgccaggagacacagctgctgagggggccgcggctgcaggcgctgcaggggacggagtggagccgttcccgggggcagagggaagaggctgcagtcgtccagtcccagagccccgagatggcctgtggctgagggagcaggtgggcccgggggaggtggcgggccgagagcggagctgcggcctcgggatcacagcccagtcccagtcccagtcccagtgtgggtgtacggccggaacgcccggaggcggcggggagaggggagcagcttcagcctagtcgcaggagcgcggaccgagcctcggctttggggagaggggtccagcctccattcccgccccgggggagaaagcttcggcgccggacccgggggaaggctgctaccccagccgcggcaggatggcccatccccaaccccgccccactcccgctcccgctcggggaaggtgaaagcgcccgagccgccgaagtctccccgctcgctcctacctgcgggccgggcaccaggttgggttcgtcatcctccctggggccgtcgtggtcgggctccgccggcgcctccggagggcctgcacccgctcccgcctccaggcttggcggcggcgggggctcgggcgcctggggcttctgcggccccgcggcccgagcccgctcgcgcctgcccgcaccgccgctcggcctgctccgcctccgcgtcatgccgccgctcgcgccgctccctcgctccacacgccgccgccgccgccgccgccgccgccgccgccgccgccgctaccgctcccctcacaggacaacagccaatatggcggcgcccggttccccccctccgcctgctgccaacaggtcagagggcacgcggagtccgcgccgccgcactagcccccgaggccgcctgcgccattttgaataaggtcaccacccggagttcgctgggagaaaaacttggtggggagacgcccttccccccctacgcgggacgggaaggatgcaacctgctggaggaacgcgtgtaatgcggtggtaatcgcgctgcaccaccctagcacttaataattgcctgttaaatggatgagtgaattaatttctatagtgttacaatactttcacacccatcgtctgactccttccgacagcacagcgaggcaggtacggatcattcccattttgcaggtgagaaatattgaggcaacataaaggcctggaaaaggttgctgtacatcattttgttggaactcctgggctcgtggacggcctgagttgaaagggacgaaggtctttatttgcaacatatggtctactgggagtccagcgttctgtgcttgggacagtgggactcaaacccgactccttgttcccgagtctgatggggaaggtagacacgtaggtacatagttacaaccgg

SEQ ID NO: 45577 - DNA, 1099 bp, Homo sapiens
tcagtttcatctatgaaaagctggtaaccatcgtcagttgccaggccatgaagagagtcaacggaaataagtttttattctagggcacccgctctctctcaggtaaaagccgcgccccaatcaggtactgccgcgccagggccgcgggacatctcgggatttgtggtccacccggcggaactcgcggtcccggcaggcaccgcggcggcggcagggcgacgtggcgcggccggctgcggctgcgcaggcaggtggagcaagatggctgtggagctgggcgtgctgctcgtccggccccggcccggaaccgggctgggtagagtgatgcggaccctcctgctggtgctgtggctggcgacgcgcggaagcgcgctctactttcacatcggagagacggagaagaagtgctttattgaggagatcccggacgagaccatggtcataggtgcgggggcggggaggaaggggcgagtttggaacgtgaccgtggtcttggggcgggggatgcgagacagtcagctctctagagccgggaggagacggcctcgccgtgcccaggcggtcgcggaacccatgccacctcgcgctcctctgacctgggctcgccctgcttccctcaaggaaactaccggacgcagctgtatgacaagcagcgggaggagtaccagccggccaccccggggcttggcatgtttgtggaggtgaaggacccagaggacaaggtgagccaaccgcccccctcctctccgccagcctctcagctaggcgggctccggtacttcctcttctagttcctgcatctgctaaagtgggagagacagttgatgttgtgggaatatcctgctgacttgcagaccccgcccggtctgtgaaatgggcggattaattgtggtgataaaaatcaaagagttttgtcaactcttaaagtcatctagactttaagatttcacagaacatgatactttccccacaaaatgagcagcttttaatcttcccaagtaaggatattaaaacgaacggcaaaacccttcagctctcaccttctgtcacttttcgttaaaaaactcatggcggggtgtggtggctcttgcctgtaatc

SEQ ID NO: 45578 - DNA, 1336 bp, Homo sapiens
ccctccaagcttgcgcggagaacgcgccgcctgggccgagacggggaccccgggacgctcccgcctcccctcggaaagaggacggagatgcagattctccccgagcgttggtttgggagtctggactcttaggtccagtcccagcccagtgatttgttgggaggccctgggcctctgggcttcagtttctcgggcttccaggcgggtcccggggcggctaggaaggagccgcccagagagggaggcgcgcccgcgctgctcgcaagcagaaccttggaggcggcggctccgggagctggcggcgcggccggagcggcggacccggcggaccggggggcggggcggacaggcctgggcggagcgggaggcggaggcgccgcgtaggcccgggaggccgggccggccgggctgcgagcgcctgccccatgcgccgccgcctctccgcacgatgttcccctcgcggaggaaagcggcgcagctgccctgggaggacggcaggtgagcggcggcggtgggcccgggccccgtcctcccgggcgccgctcccttctcggccgccggcggaatctgggaacccgaggccatcacgtctccatgtctgcgggtttctgtgagggcgtgtggttctccctgtgggtccctggcgctctgttccggtttctgtctgtccctgtgggtctctgcctcccccgccccctctccctttccgcggcactcgtccttcccccagcaccttccccccggcccgtgggtccgtatttctccattgacttccctttgtgagtttctgatcccctctttgctagtctctctcgttatgtgtttcgttgtgtctgtgtttctccaccagcctccctctatctgcatgcgggtctctgactccgctgacctctcaccatggatttgtgtttctcaatttgtctctgatccctgaggacgtgtattccgtttctctggtctctgccttcctcatcacatccatatagcctcagaccctacccttcctccttaacacttccccccatccttcgcaggccaccagcagaacccaccagacagaagctccgtgctctgcctggctggtcactgcctggcacgtactagacactccttatacacgcattagtccatttcctgtgcagctgtattggccctacgtgaaagatgcgagcttggcccacaccttagctaattttgtttctcactaaagcagaatggggaaagcgatttgactgcctccattcgtggggcacttgagatgtgtccctgtaagtcttctcacagaacacatgactggatctcctcctcgtgaatgacacctcatttccttcatgtt

SEQ ID NO: 45579 - DNA, 1873 bp, Homo sapiens
ccgtgttagccaggatggtctcgatctcctgacctcctgatccgcccgcctcggcctcccaaagtgctgggattacaggcgtgagccgccgcgcccggcctggagttttctttttttttttaagcatcacttcatatttcaagagctctcagttctcctgagatttctaggctctgtccaggatccctaagcctgttcacagtcctacttgaagtttctaatctttcttttctcattaaccaaaactggagagaggaaaaagcccatcattttccctggacagcagcgcctactgggagtttcacccgcattaacatgcaaacgacaggcaaactcctagtcatccttccaaagaccctgctccacagccctgccgaggccggtgcgcacctagcccagccactgcccctcacggcccccgcgccgccctcactgagcagggcgggcagcgctgtaagcgtaaccacttggggcttggggcttctgacccgggagtcgggtgctgggttgagtgcgaggccgacgcctctgccgggtggggaacccgcccgccggcgaggagcggtcgcggccaggggcttccgccgactgggaggcccggggccgggccggagggactcggaacctggaaacgaccaggcgcgacccccagaggactacaggcgcggcttttctggccgccgcccggttcccgcgggcgactccactcggcatgcgcggcggggagcctcggcggtgaggcgcaaagccgcgggctcgtgggacggccacccctccgcaaaaccgccaatgggcgggcccgggccgccgatcgcccgccgcggcttccggttccgatgacagtggcgccggaagccggggccggggctgcggggcgaggtgagagcgggcgggcttgggagccggcaggtgcgggccgagggcgggcacagcggccggcggagctgaggcgcgcggcggggaaagctcggccggcctcccgggccccagccttctccagaacccctgctacccacgactaagccccgaacaatctgcccttgggcttgttctcttcgcagttgtcggccctgggccgggagctggagtcccagactcataggtcccggcccagcccccgaagagccgcctcagccggggggagttgctcggactcaaacgtccagtcctcgtgcgaccgcgctgggtcggaagtgagcaggtgcgcaccgggctcggcagggctatggagcagggtctttggaaggatgactaggagtttgcctgtcgtttgcatgttaatgcgggtgaaactcccagtaggcgctgctgtccagggaaaatgatgggctttttcctccctccagttttggttaatgagaaaagaaagattagaaacttcaagtaggactgtatagtaaaaaaaaaaaaaaaatggaggagggcgatatgacacggtaactggtgtgagggtggggcggaggggtcagtattagatactgtggtctagcagagcatctctgaggacgggacatttgcgttgagacccaaattaggaggcaggcttaggaagatacgggaagagagtggtccaggcagcgggaacagccagtgtgaaggccctagggcagaaatcaactgagagtatagtcaaggaacagaaagcaagctagtgtggctaaagtatggtaagaaagggaaagagtggtaggagatgaggtcggataattggggtttggtcacatagagtctgtaggtcagagagaggaatgtggagttttttctaagtacagtggaaatcttttggttttaagcagaggagtgacatgtagggtagagagtggatggaggtcgcggctgcaaaagcataagaattggctgggcacggtggttc

SEQ ID NO: 45580 - DNA, 1456 bp, Homo sapiens
ttcaattgttaaggctgccaggcgcggtggctcatgcctgtaatcccaacgcttcgggaggctgaggcaggaggattccttgagcccaggagttcaagaccagcccgggcaacatggcgagactcctctgtctctgcaaaacaacaataacaacagccaggcgtggcgcaagccggtggtctcagctattcgggaggctgaggtgggaggatcgcttgagcccagggggacgaggctgcagcgagctgtgatcgcaccaccgcactccaacctgggtgagagctagacccatctcaaaaacaaacaaaaacgttaacgttcagttccttaaatacagagccggagaggggtcatccctaggactgagattcagggctgagaggattagggcgggggccggaggtaatctgaggcaaggagcggagcccggggaggagggtccctgaattaatgaaggtgggtttactctaagggactttgcttacacaattcgcttcactttggaattcactttgagctggtatacgtggtgtaccggtattgtcgtaccggtattgtaccaaagggactttaccgactgcttgattggcttctgtatatggggctaggtcagagttaacctttttactgcgcgcctactaagtagagatttctccgttaacgtttagaaatgcaaaatccagaggaaggaaggttcttaccctttttctcctttgttgacaaatttctgaacctctttcaccccgcgccgaatctgcttctgcttcaccgctgcaacgacagaagagtcggtcgggggcctcgctcagccacccgcgcacccatcccacccgcgcacccatcccggccacgccgccgtccgcctcacctttcttgatgcatttgtagagcttccgcgtgaggcggcgagaagccaggggctgcgcgatggggttctggttgaccagcagctcctggtaggtgcgctccccggaacacgcctccgcctgagcctcgggcccgtcgggatctgcctttattttggtcatcgcagcggccgctgaaacctagtcccagggaggcgagcccacgcggtccacagctttaggcatcacttccaggtcatcagctgcgcgagaagccgccgtacaacacggccaatcaggaaaggaagtctccgactcagcccaatcgttgacgcccagcttcgtaactacggagagcggagaggggcggagtcatggtccttaaggcggggccatccccggaccaagggactgggcggaaccgattagggcggagcggagggaatgtgaggcaaggggcggagccctgggaatcggggccggagagggcggggctctgggtgctggaaaggctgcctcgttttttttcttttttgaggcagagtttcgctcttattgcccaggctggggtacagtggcgcaatctcgactcactgcaacctccgcctccc

SEQ ID NO: 45581 - DNA, 3143 bp, Homo sapiens
atttaagtaaacaaaagtacaaatgcgatgtcaatcgttcaggtggtgccaggggacagagaaccggggaacaccaaggtctcatcgtccctgcagagcatctctgggggaggcgacggacagggcgcgagcgcggggcttggagggcaccaaggtccagggggatggcgggttcagtcccaatccctccgacccgtgctgagggccttggaggaccccactcgcccaacctcggaagcccgggttctgccacttccagccacgcgtccttgggctgcgaaactttctccagcccagtttcctcttttgggacatggggaggcggaggctgccaatgctgggatggagtcctcgagagcaagagaccagcggcctcgacgagcttacaatccgattaggccctcccaccgatgtgctgtagctgcccgccgccctggacccggcgccgtcccgcccggcttcgggagccctccgtagcggccggactcgcgcgcgttctaaaatgaggacaaagcccgcccaggtctagagcgcgcgcgccgtggcggccaatgggacgctgaagctaggttgagtgacggacttgagcagccaatgagtgtgcagtttgttgcgatgtggcacccggctccggcattataaagggcgccacgagtcggcattgtcaggcggcggcaccgcgcgggacggagcttggctgttggtcggtgggttcccgtgcggcggcggccaaggaggaggagacacagttggagcagctccgtgggctgactggggcgaggcctcagcagcgcgagcttgagtgcggccgagcctgcggcgccttcccctgcgggtggggacgagcgggccccgcggcgtcatcggcggcgaggtgagcggcggccggcgggcgggagctctggcgggagccgcgccggcctgacgcgctgtcgccgctggttgcaggagccgccgcgcctcggcctagcatgtcggaagcgggcgaggagcagcccatggagacgacgggcgccaccgagaacggacatgaggccgtccccgaaggcgagtcgccggccggggctggcacgggcgccgcggcgggggctggaggcgcgaccgcggcgcccccgagcgggaatcagaacggcgccgagggcgaccagatcaacgccagcaagaacgaggaggacgcggggtaggtgcggccgcgggcggacgggggcgccgcctttgttccggggccgccttttgttggcgccacgcggcggggggaggggcggcggcctggcccgggtcggggctggtgcggcccgcggactgtcgccgctgcgttcgcgggccgggcctggcgctgccactcgcgctggagtttgcgggagtttgttgggtcgactttggcgccgccccggggccgctcgcgcgctgccagggccagggccagggccggagccggcgcaggggcgggcggatggcccggaagagggaaagcgctcggacccggggcccggcggcgtcttgggccgcgccggcggctgcgtgggcggagttggcgcgagccggggcccggacctccctcctccgcctctcccgggggcggagtcacggtctgaaccctgggcgggcttggtccccggaaacatcgagttccttgaaacgagttctcaggagttggtggagacgctggccctttgctacatggttgtagaacacatgaatttccagttatgagtggttaggtcccatacccctggtgaggtggtcccttctttgcttctcacaggctggggctgcagagccttgttaagcctcgttagggtcctggttgagttcaatttggagggtagtggagatttaacatctttctaaggtgctccttgcagactctaagggtagctgtagacttcgtgagaactttgccagggccagtcctttccaaaatcacagcttgcttacaagacttgttgccgtgtgtctcaccctaccatttcagaaaaatgttcgttggtggcctgagctgggatactagcaaaaaagatttaaaagactattttactaaatttggagaggtcgttgactgtacaataaaaatggatcccaacactggacggtcaagagggtttgggtttatcctgttcaaagatgcagccagtgtggagaaggtaagctgggtactggatttcagcagtctcagtggaaacgatttgaattctaagaggacacctttcttaaagcatgactagtttgtgtggtctgcatgtgatttaagtgctttgggcaaaacccaaagccggaggttatgttccggtttttgaggggatgaaaatacagattaagctgggagtgagagaatgtgctggagtggttcgggaagatgacagttgacattcattaccttttatgtgcctattctgggtacggcgctaaacatctgggaggattacaagagagtccatgattggtatgataggcttttagccccattttacaggacaaaaaccaaaaccctaaggctcagaaatgtaagtagaagaggtcacagctagtagggagtggagggaggattccttcccctgtggcccatcttcagcctatgctccgagtccctgctgcttcgcttctggagatgggcctcacgctgggactgcttgggcaggaagagcatgatcaaaggcttaagtgtgaggactgttttctaggtgtcgaggtaaaccagctgtacttgaggtttgatgaaaattgggttgggaggttaagctggggtagaatttggagggggtgaaacacatgtttgtatctgtactggtgtctttatggcttagagagaagggccttgtctggctcgtgctgctgagtcagcctgacccctttctgttggaacaggtcctagaccagaaggagcacaggctggatggccgtgtcattgaccctaaaaaggccatggctatgaagaaggacccggtgaagaaaatcttcgttgggggtctgaatcctgaagccactgaggaaaagatcagggagtactttggcgagtttggggaggtgagtgtggctctgggaatagcccatcagctgcccctaaggctgccttctttctggtccttggtatccttggctggctagaccctcccaggcagggcttatttttcaccctctgtctt

SEQ ID NO: 45582 - DNA, 1358 bp, Homo sapiens
ggctgaagcacattgggggcttaaacttcaggatgttcctcccagggccatcagtgctcagcaaaacgtagttctccttcagcctgtgaggacaggacaccccttcacatggccttcaaggccttcctcagcctggccttggcctcatgtccagtgctccagccacactgtcctcagagccttccatgggccagttcctgccaggtcattttactggtcacctctcccagagtcctgtgcatctggcccacagcagcctgcttggagtgcactgcacctggccctgagcctgctgccccacagaacaggcaccttgcctcacctaaccctggagccacagtccaagccaagaatgaatggccacagggaaacgccagactgcaagagtcacctgcattctctggttttctgtgtggtttacgtgatgtatattgtttccttatatagagaatgtccaacattgcagttggtgtaatgagctccacgtgcccctcaccagcttcaggcatcttcctgccctgtcttccgggttatcttacaattccagtttaaaatgtccaattattcttaggaagatggctttatcttaacatcatttgtagctaataatcacttttagtccacagtctaacctcatctctgagatgaggggtctgcatgattgtgtttatattctttgatcattgttccccttcttttgtaaaccttgttatttttatttcttgggggtggggagtgtgccttctggtttcattttcctgtcccagtcttcctggcactgaccatggccacgccagaaagaacagggcttggactttggagttagacggccctggggccagatctagctcttgccacctagcagggtaactgcaggtgacttacccatttcctcactgaactggaaaagcacccccagggtattgtgagacacgggctgaacttgggatctgtttccttccatgccacctgaccattccgaatccctgaggctcctgggaggggggtaggagtaagctggggatgtgactgacagcagagagaaggcgggaccaggaaaggccaagttcaaatacagcacagagatttacatcaataccacgcgtgtctcacaatttgaataaggacacgtcaaataccagaagagctttccatggtgggcgtgggggaaggggtaggcctggggaatggagataaaagggaataacaattcaactagaaggagaagaagtcctgaggacttggggtccaagtgaaaggacaagcaaaccagggcattgggaccggtggagtctgagttctgagacacccccgacccagcttaggagcaggagtcttgtccatcccaaccacctgtc

SEQ ID NO: 45583 - DNA, 1350 bp, Homo sapiens
ttaatgagaaaagggacataagtcagctcctattttaggaggtggcctctggctgtgtctaatggagttgacaagaataaaagtagaaggagaagaccaaggaggaggacgccaggtgagagcaggtggtggccatggagatggagaggtggagggagttaagaggcatcatggagatggaggaggcaggattgatgcaggactggggagcgtgtggtttctgcctggagcagatataggtggtgatgccctttacaaggcaagatgagcgggggtgagtggggatagccttcttgggcaggtgagggagaacagtaccatggtccaatcaacccttgcccttttgaacacatgaagctggagatgtttgtcagatgtcacaggggcagttagaacctcgagttggaacacatgggacatgtctgggctcaaaaaaatttgtgagtcaccaacacatggatgctatgtaataccaagagaatggaagagatcacctgaggagagggctcagagagaaaagtggcccaggatcagccccaaggaacagaggaggaatcagcaaagaagacagggaaggagtggctagagaagctgatagaaaacaggagagcacagtgcccgggaagcaagatgacagaccacttccggagagtggtaactgtcaattactgctgggacagagtaagacaatgcagcaaagagattgctttggatttggcaacatggaagtccctggaatccacacagaataaagctggtggcataagaatgcccctcctccaccaccactgaggaagcaccagctcccttctctttccagaggctccagctcttgacatggcaaatgtctgggctcaagttcctttctttgaactgctgttaccccacctgtaaaatgaagatggtgaattccacttcctagaaattatctggggggcagatgtctgtactgtgtgagtggccacagtaatcatcactataattcaacgccaccacctacgatttgttggaatgttctctcccagatacactgtaatcgcctgcctgtttgtctccactgccgatcctagtgtgagctaccatgacctttcacctggccactgaactggcacctaacagtgtccactcttgcactccgttccctttaagacatcgtttcctgattaaagcctccgatagtttcccaatgctcttaggataaagacagcttccccacttggcggagaaggccctaggtgatgcgccctgcttgcctcccaacagctcacagcctctgctttcccttcgtggacttctttcggttcctcaagtgtgctgggtaccatatcctttcctgctacagggcctttc

SEQ ID NO: 45584 - DNA, 3121 bp, Homo sapiens
acagggccttactctgtcacccaggctggagtgtatggtgtgatcatggcattcactgcatcctcacactcctgggctcaagtggtcctcccacctcagcctcctgagcaggtggggctatagacaccagtcaccatgcctggctaatttttaagtttttttttggtagagacaaggtctcattatgttgcccaggctggaaggccttttgaggcttgtatgacaaaggtggggtggggggtgactgtcaactggtttcacttcaccagccaagggggctggtggtaatcttgattgtcaaaggccaaggataataacagtgaatatgtactgagagctcaccatgtgccaggcacattcagagcaagctacataaattaacacacttaattctccaaacaccttaaagtgggtacctagtatcattatgtctttcacagataagcaaactgaggcactgagaattaagtaacttgcccgagatcacaagttagtaagtaggggacagggatttgagcccaagcagtctaagactagagtctctgctttttttttttttttaacctcaactttattcatcttccatgtgcctgctgagtctcagactccctttctttccatcagctctggcagcctcatcaagatgactgaattcctacttcagctcccttgcctagcacctgagatggccaatggggctgaagcactgccatgaccccagcacttggccagcactgtgctacgttgctggtcacagctgggccatctgccactttgtgagctcatcatcagtcccaagtggaactagactcacagacctagattgctgacccctgcctggtttagcacagctccagattgcagaattccacagctatattgcgaaggctgagcctcctctgcatactgacagtgcctcaactccacccaggttctccacacctctcggcaatctcaggtcaccttgggaccaggttcacagcactgccttcctctcctgccctgccagcctgaggtgtgatactgaccgtgcgccacattgctgatgcaatcgatgtattctgccccctgttcatcgtacatgtactgcccttgggcccggacaatcttaacaggatcctcgggaaaaaagagtctgcaggaagagctgtggggacaggcaaggagtggacagccatgtctgaagaccgaaagggtgaagtctactcatcgcagacccccgcccaccccttcccagtttctggtggcgggggggaaatgagagctggaagggcaaggtgctgcttccctgccttgtctctccactccacaggtggttgcaaagcaggaagcagatggggtaacaagtcgctgaaacttcggattgtttctgaaagcattttcagcctctgtggcctccttgctcatttctgcatgtgtccgcgtcagtctcccggatcctgagaaaaggtggctgccccgtcccatggggactccataaggccgcgtgtcttcgatgggatgggccagggcaccaacattaggtgcctggctctcagccctaaacagctccttgccagccacgtggccctgctgcccctcgctgggtgccagccctaagctccagtgggaggcgacctcacccaccgtcccaccgagggccccctcacaggtcaagtgtgctgcctgtgaaccgactcccccgactctcccttgtctgccctttcagccccctcccaggtcactctcgagccaggcccaggtgctgctgacgggccaccctgggtgaggtcctctcaggcgccagggtgaaggtcttctccggagtaaaggctgccaagcgaggctgacacagccgaacagcggtgagggcggggccgtctcctgaactgggcggcctggagacggcgctgtcggggaggcggccccggagaccacccgccgggactgcccaacggcgccgcccgcctcgggccctagaagctccagcggggccggggcagcggccggacgggatgggtagcagcggcttcctagccggaggcgcgtgcgtagtgcgtgcgtgcgtgcgtcgtgcgtgcgcgtgcctctccgcgcagccccgcgccccccgccgcccgccccccgcccgggtacctgatgagccgttgcctcagggccagcgtgtcggccttcgggcgctggtctgcggccatggtgggtggccgtcagtcggtgccgtgacgccacgcggagacgtcgccgcgcgggctgggcctccaaggccccgctccgggccccgcccctgcctgggtcgggatttggggctcaggttcgcactcggccccgccccgaagcgcccgcgttgcggtggttcatttcttcgcttgcccactgggcctggcagccttccggcccgtggtcgtgccttggcagtcccgcgcaggaactcgagcgctgccccgtctctggttccgggacgcgccccgggcctcgccccgcaggccccgccccgcaggcccctgcggcctcccttccgggaaagggtcccggacgaccccgcccctgctcccggcgcccaggcggggctcggagctcctgcaggccttctctgggccagactcagtctttgagtcgccttgtgcataaaatgggatgaactgtgaggcctaagtgcgagtatgtgactggtaccttacccgggcctggtacacagtaggggcctcagggtgggagaagcaggtcctaggttttcccagccccatgaaggggcagcaggaagagcagaaggagagcccagggtcccttctggggctgaccaaggagatcaccatgggcttgaccttcagggcaccatagttcctgctagaatctaggcagggtgaaccggacgagctgtatcgtcgctgagagaatcatgcagcgtttgggcaagaagagaggttgggaatcctccttgtggtacatgtcggtgaccctgaagcccagaaagggaaagggttttgttgtcagacacgcagcaaggctgcagaggctggactcctactgaggtcttcttgactcccagcccagggagtgagaagaaaaagcctcccaaggggctgggatatgagagaaaagccccctcctggggtgaggcactggggctttctgccttgaagaa

SEQ ID NO: 45585 - DNA, 602 bp, Homo sapiens
aatctgagtggtaagtagtgccctctcgtttcacagctgaggtggcagtttgcattttttcagagggctgcaacaagatctacgattccgcattttctctttgaaatatgatgttgacactttcccgtggagaggtggggtctaactctcctccctccactctttcagaaagtgacaccacatgacttctgagacttggccctaaaaggtgacacagcttccaactggctgacctgggacagtcacttttggaatccagccaccatgtgggaggcagcctgggtcacgtggagaggccacaaataagtatttgccatctgaggtccctgctatagccataagcaaccatgtgagagtcggagtgagaagcacccacactgagcccattaaccacagactgcacaagagaaatcaaaatgattttctttctttttttttaaagagaggaatttctctatgttgctcaggctgatctttaacttctgggctcaggcagtcctcccgcttcagcctgcccagcagctaggaccacaggcacacatcaacccaccctactaatgttttttaattctttacttttggtagagatggagtttcaccat

SEQ ID NO: 45586 - DNA, 2993 bp, Homo sapiens
tgctctttcaccccagctgcacaatcctctttcagggcaggtgggctctgtgcctgggaagccctgcccactccccagcctggctacttcttgtcactcaggtctcagctcagtgtcacttcatcaaagaggcacccactggcagtcctactgaacaagctccgccttcactctgtcacatcctgtcctggctcattgcatgtttccattctgctagaatgcagacttctcagccggataaacctcgtctctcttatttcccagtgcctggcatacagtaggagcttcataagtattggctgaataagtgaaatgagaacacgaatgcccagtacaaaaggagtgactggccccaagttgcaagctggcagaggcactgcctccgctgtcatgctatgttcccttctggggtactggcttgggcggcttgtgggtggctctgtgtcaaaggaacctcctggaaggcagaaatgacccttctgggtatatctggcagaggcagttgcagcgcctacaaatcagaggaaagtgaggtcatggaaggtggaggctttgaggccaaacacacctgggtgggtcccagctctccagtcacctgctgcatggccctgggcaagccacctacactccctgaggctcagtttccccatctgtaaactgggcataacatggcacttgtcttctggattgttgtgaggctcatatgatgccctgcatagcaggcacccggccaggtgcctcagagccctgtaaatggtccccaaggaatccgcggccctcggggcagggtgcggagcagggagggcgaggctctgaggacagaggcagccaccgacaggagggtggggcaggagtaaacaccatagggcgcctgagtttagacacatgcgcctggcttctgggttacaggcagggctgggccatgtgcagagtttttcatcttttaatcccagctgttatcagctgctgggaaatagctgagcccagtctcctagctggcacaggcttcctctgaattccacaaagagaacaaagagttccgaaatagtgacacagctgtcctgaccggcagcccgggcagtcagccggcagggccaggccaggaggaaggcacgcaaaagccaagcaaagccacttggctagagggtgggcacagctgcgggaggctgctggaggcctggctgactagccagccagggaccatcccaggctctgaggctgctgggagactgggggtgaccttctctctgagctgggcctggcactgtgtgctcaggagccttctggcggtgtgaaggtcctgctccgggactaccccagggtgcaaagtgagtggcgtggctagatccctgctggtgacacccccagacaccaaagctacctccctttccagagcttggagtggtcgtctgcagcttttggtcaccctctccacacctggatgctttccacagcgcaagccccaccttccagcactcactgcacatttccctgctgccttggctgctaggatgcaggtgtgatttacggtccacccatcagaggtgtctcagtgagattcggactcggcagaattgggtggggacagagcatgatcctgagccagcagctgggaggcagcttccagatctggcaggagagcttgggaaccattcctggaggcactgttctttgaggtctctggacccctgaataacctcccactacccttttttcttttggcttaaactggctgcagtggattctgccgtctgcaactataaatcctgagaaactccttcatgactccctggcagggcttcaaactccgctgcctacagggatacacaggttacacagacacaagaaacagactcgttcagctaaaatcacaaggcagcccacttggtctatgtttgattttaacagagatgtggttccaagtcacctttattagaaaaaaagcatgcaagccccatggtaaatggtgatcgacgctcgacttccaggccagagggacaccaggagtaggggactgtgatgccctggagacgggatatcctatctagagggagtggctcctagatagttcacactgaccgtttccagatctttccatttttcaagagaagccagacatcgggattttgatgtgaaatatctcttatttttcatttttgactcatggtttgtttttttttgtttgtttgtttttgagacggagtctcactctgttgcccaggctggagtgcagtggcccgatcttggctcactgtaacctccaccctccgagttcaagcgattctcttgcctcagcctccagagtagctgggactacaggcgcctgccaccgtgcccagctaatttttgtatttttaatagagacggggtttcaccatcttggccaggctgggcttgaactcctgacctcgtgatccacccacctcggcctcccagagtgctggcattacaggcgtgagccaccgcgcccggccgactcatgttttaaaaaacaccatgcaggccaaaaaagccctggaaggtcagcaccttccaagtctgggtttggcctgtggctgcctttgtggccatggcctgcagggttaagttccagctcttgatgatggcacttagggcccctggcatgaatccagcgtcctccctcaccatccctgcatgcagggacccacagttcttatctctgtcccttatccaggctgcctccccacccagccacgccctttcatgtcctcactcctctgcctggcaacatgcctgtgcggcctggtcccagtgatcaagccctttgtgaaaggcatcccctgcctcctggacccgaggcttcagtcttgaggcgcccacagtcccctgcacacccttccatcctggcgctcctcatcctgggtggtgatcatcagggcctctgcccccaggccgggcctgggaggacgtccatctgcagaacaagcctggcctgtgactggccccctgaggaagtgggctgctcctggggt

SEQ ID NO: 45587 - DNA, 1010 bp, Homo sapiens
gaaatgatgtgttcataataattttggagtggataacataatttacaaatcacaagtgtgttctgtgatttaaagtgatggaagggctttctgttacctcatggtaaccaggaatttcaagaggcataattgaattttaatccagtcccataggaagagcggtccccctgcgccgggagaaggaataaggaagacaaaaagatgtcagctgcttagatcacatgacttcctgcttatttcatgagctgaatatgcagcgcctgggcatgtaccagatattccttcttgaaactgagccagggcaggtggcctggtccatgtgtatctggagacccttgtgctagaatatgccagtccttccagccatatagagactgcagtttcagtatctccctatgaagaggagagaccaaaaaggagtttctgccttgcctgctttcagcatagatggacaattcaaggaggaagatccgcagcaagctcccaggtctaggaactagacctaggacactgtgatcactggcaaagtgatcactgtggcgaacttcttgcacagttcttgcaaagttgcaaagttcactggcaaagttcttgcaaaatgccagtttgctcactatatttgagctacaattgatctaccatgtctttgccaagaattccaaaggatttgggataagcaaatagccttgctgtatcaccagcttttaggtggctatgtttggtgtctgtttctgaggttcgttttgccttatccaagtggcaggctaatggggacgaagaagccctctttagcatgagtggaataagccaggtgcccaagggaagcctagagttttggggctctgaggagggtgaggtgaagtaagaacccggcacaggctggcacacacattaggtgttcaataacatctaaaagcattcagatgtttctcaaaaagctaaacacagagttaccatatgacccagcaattccactgctaggtatatatcccaaataactgaaaacaagt

SEQ ID NO: 45588 - DNA, 1607 bp, Homo sapiens
ccttccagggccagactccctgctctgggggtaggtgggctctgccgggctgggggaggcgctgtagagggggcaggaggttggggacactcaggagccactgctctccccgccatccaggactgcaggcttcctctgtccccagagactgaggctgctccacagacaccccccatcttcctggcacgaaagcatcactcactgtccaccattagcgtctggtgatggaaacaaacaggctcatggggtcatggaggagtcaaaaaaatgataattttaatcattattatattttatgatattatacaatctatttgtttatatattttttcattattattgttaaaattataatccctgacatttatggagcagtgacctcatgccaggcactgtgttttgcgtgtatcatttcacccaggctcctgacaactccgtgaagtggcagccactgttatctccatgttagagcaagctgagaaacggaggggctgtacttggggccacacatcttgggagtcttgggagtatgggcaggggaactgacccatgcggtctgactccagggtccatgctgttagccatgactttttggtatcaggtgcttctgaaagtcccttgagccttgccagggacccaggcagacagcacagctggcacagtcagacagacccacctcagaaccaggctggccagagagggacggtgtcagtctcagggcctgatctccaggaagtccagagggcacagtccagagggcacagtgagatagcaaaggctggtcaagccctcagaatgaagccccagggacagcaggtgctaatcccacaacccacaggactctcagcaaggactgccttcccgcaaagagcatggtactgtggctcaggtgcaagctggggcgccgctgccgtcatcctggaagccctttaatgacagcagcgcagcaggttgctcccccaagaatgggggtagctcctgggtcacccagcaccgggtatggggtagctcctgggtcactggccagcaccgggaatggggtagctcctgggtcacccagcaccgggtaaggtgttgctcctgggtcactggccagcatcgggtagagaagtcggcttgtgtttggtgggaaccatgtacttaaactccagatgatttggttaatgggggggtcctggggaacagagaccagctgaggatatgcagatccagggcatcagaagagagggcgaccaagtgcccacacaagggggatcctctgcctctttttccttctggcttaacaggaatctgtctaaattacatgtaaacccgatgagactatcacagctgaatgaaggccagagacaggctgaggcttgtctctatcaacaacacatcttagggcttggaaacagaagctcagggctgcatgagcctgtgggtcatgaattcactgctcctgctttaggcaggaattcccttccagcctccagaggagtgctcatgtgtcctccccttgaacacttcccctgactgggagctcactacctcaaagagaggttcatgctgtctttggatagctctgcctattagagagctcttcctccactgaactaaaacccatt

SEQ ID NO: 45589 - DNA, 647 bp, Homo sapiens
aaaaacaagccccagaccatgctgccctgtggtcttcagtcagtgcgggagggaagagagacacccaagattgccccttcccctattctataacattcaagttgtgggggtctcagctcatgcccccattttttttaaacgtaaagaaataaatagcataaactcccatgggaaagtcggatggcagccctttaagagagctgccctctaaggcaggttggggaacagaaacaagccactttacatttttggcagcaggaccaggggacttccacgaaattgtgcagagatgggaactggctgcagcccaggagccgaattcctcgtgctgcttcgcccctcaagaacaagtcacttctcccaaccttgtggccacaaggactctccacaggagcatcagtgtgtgcccaggctggccaccgccacgagtccagcctggccatgtcctggtgacctctcctagctgtaatggctgtttccaccacaaggggcagccgcggcaaagacaggcccatcacccacaggcctggaagaggagctgagtagagtcaggccaagggacctgccatccccagtgcctctagctttctcaaactgggctctagcagtcgctgggcctggttagccacagggagagtccacccaag

SEQ ID NO: 45590 - DNA, 2418 bp, Homo sapiens
tcaggaactcagcttggttaagcatttttaaatcatagcaagcaaaatcacatctgatgaccgagcgttattattatgaccctccattactatgaagtttttttcaagacttatgtatcttcttcagttttgttttttcctcttctactgtaagtctgcttacaaccagctaacctccagcaaaacagaactctcaaattatcagttaatatgcaaacattaaaataagaacgagctccgttgtgagagtccaaaattcttctcaagttcactacttcaaatgtaattcagctgttagtcccagcctctgacctcccccactcaccctgcaatgttcaaaaatattttatctggaggcacaaagatcacccgacccacgttctacgtggtaaggttccttcgcatacataaaaaagaaaagctatctagaatcatgacactgcctctaataaagcatcccacatgctagagtaggtatctttcaaaaaataatgacacaatggatctcatatgtagatccatcgccactgcccttaagatcctgtagttcttgacaactttacgctacgtacatggcttaaaaacatcgaaacaggttataagtttaggattggatggctccaagaggactgcatttaatgggttacaagcctgtaggggtgtgtaaaaagcacaatcgcacaggacagctatgaggcaagacaaagtggctggcgagttcagtttgcggggcggtttcctaaggatcggataagcctatctggactatttaggcaaccagggataataagatgcaaaaccaccagaaacgcaggttcgctgcaacaatgttgtgttcagcatagcacagaggactagcctccgcaaatttccacctctcacaagcagctactgccctcaaccacctggatttgcacggacgcccggtccccacctcccggctcctgggcacccggccagtgcctttggcgcactcaagacaggggcaaatgcttgactctggaaaacccccgaaacgctacaaacggcccaggccaggaatccaggggaagacttgatctccgacaacacgaatgccagagacggctctcgaagggtctcccgacaggtcctagcgcccgccggctggaagaggtcccgacagggttaaccaacagccgcgctcgccaggcagcaggggaccgcgagcccacggcctccggagccgcgacgcgagcggccagggccctcagagaagggtcagcggcagaaccgcgacgcccgagcaactttcggtgctgccggcgtgcaccagccgagcagcgcctcgcagaactcccaactcagctccagaagcccaggcccctaacgcggtcgtttctccgacacctggctcggagacctaaagaccgacagccgcctgtcccagcacacaccatctgcaaccctacctccgcaaaagcaaatggcccttcggccgagaaatgtcgccaaactgccgtcttccctcctcggccgctgcgacaaacaccccacaaaatggcggcagcgccgtcgccctagaatcccccgagtcgcctctagcaccacctacgccgcgcgaacgcgcctgcgtgacagaaccttgcgcgctcccgccgctccacctaagggcggggctccacgtgacgtaagagcggggctcgagcctccacactgcggctgcgcggcccaagcatttccacccccccccccccgcccacccggtcccggggcctctaggccgggagggtgtttacgttctctacgggctcgggtggaaccgggaaggaacgcccgtgtcccgccctcagtgtgtaccgcgtgtctgccccctcccccgggacctcaactcccgcagccggcacccgacaacggccccaaaaccgcctagggcgggccttggctggtccctgggctgttccctggactgggtgcttgtcctgcccacttggcgcttccagtctaaggtggattcggacaaagaggctgtctcagaaaacaagctcaaggggtgctaatcttttcaaggcacgtgctcctattcagaacaaaacaaaaacccggaggtttcaatggagactcctgacaaggttttcctgttaggatccctacctcctgagcagttaaggtcgctggaagtttccctaacgaagttttccccatttttttttgtccctgcgggctgattttattcaaggctgaaaaatgtctctgagctagtgatagtccgttatggggcttgcttacctcaaataaggtattctgcagttctgaggaccctcaggcagttcccccgtgtaagtatgtaacatgagaaatattagggtcaaagtcggagccctgtggggaacactcaagggccagagggaaaggggcctgagaaggaatgatcagcagaggaggagaaccaagaatagg

SEQ ID NO: 45591 - DNA, 1257 bp, Homo sapiens
cctgggttcacgccattctcctgcctcggcctcacaagtagctgggactacaggcgcccgccactacgcccggctaattttttttgtatttttagtagagacggggtttcaccgtgttagtcaggatggtctcgatctcctgacctcgtgatccacccgcttcggcctcccaaagtgctgggattacaggcgtgagccaccgcgcccggccaaacaccagctctgaagaggaaagcgctgggtgtcccgaggcgggaggggtggccgtcctggggacggactcggaaaccggggcccggctgcgtccgccctgccctcggggtcccggtgccccgagtccgcgaggcccacatggagtgggcaggacgggcccgggaggaaacgccaggcccggcgtccacggcgagccggacgcgggtgcaccagcaacggcgagggagcgccccgcgggggggcgagagtccagatcccggcgcgggggccggtgacagacgcgggggtgcccgccagcgcccacaaaggctttcggagcctcggcagccgcaggcagtccccgtgccgggcgccgcctcctaccggcttggcctgccgccgacgctcacctccctaagctcgagcgtcccgggccgcgcctccccagccgcgaggctccggaaccgccggccgggatgcagcctcgcgacccggctccgccccgacggcgtctgggcgacctcaggcccggcgccgctcaccccgcggcgcgccggggaccaggaggggcggggcagccgctgaggccgctgggaaatggagtccacgagaggacacctgcattcggggaagtgtagttccatgcgtttgaggcggggtcccggctgagctgttacgcgcccacatgccacaagagggcccctgtgagctggagggccccaggttcctggttatagggaagataaggggaggttcgctgagggcagtaacttgcaactctgtgtctgtgggaatttcgggagggagggcgtgggcggcaggaaaacggcccagaacagacctagtgcccctcagttattcaccagaggggcactgagcacctgctgtgtgccaagcacggttgcaagtggtttcacatgtatcaatcaatgaaagaaacgtcactgccctggagaacatttttttggggggtagggagcagacaataagccatacacataattatataacattttcggggataaatgtgaggagaaacagggtatgtggaggggtttcgtcgct

SEQ ID NO: 45592 - DNA, 1299 bp, Homo sapiens
ttatctgtgcttctgatgtcatattcaagaaatcattgccatctccaacatcctgaagttttttccctttttactttagtaatttataaaataatttggtctcacatttaggtttttaatcaattttgagttaatttttatgtatggtgtacggtcagggtacaggctcatcttttgcacgtggaaatccagctttgtcaacatcttttgcaggggattttcctttcccaattgtgtagtagttgttttcgtgccgcccacgccatcctgaaattcacacacagagttgcaagttactgccctccgggaacctccccttctcttccgaagaaccaggaacccggggctctacagctcacccgggccctctcataggtctgggcgcctaacagctcagctgcgacctcgcctcaaacgcgtggaactacacttcccagaaagccagcgtcctcccgtggactccatttcctagaggccttagcggccgccttgctcctctaggtcccaggcgctctgcggagctttcgctgcccggtgagcggcgccgggcttgaggtcgcccagacgtcggaggagccgggtcacgaggctggagcttcctgcttgcagagtgcggcggggaggcgcggcccgggaacgcgggatcctggggaggtgagcggcatggctggctgtgccgggaggaggcggcgcctggcgccagggcgacctgaggccgcggggctccgagggcctctgtgggcgcgggggggcacccccgcgtctgtcaccggcccccgcgccaggacttggactctcgcccctcacgggccgctccggtgccgctgccgacgcccctgcctctggctcgcgccgcccgccgtgaacgcggggccaggcgtttcctcccgggcccaccctgcgcgcgccgtgtgggcctcgcggactcggggcgccgggaccccgagcgcagggcagaggcagccgggcccggtttctgagtcagtccccaggacggccactcctcctgcctcgggacacccagcgctttcctcttcaaagccgttttccgtggagtcgggagacgattcgttggcgggagagagaggaaccggctgggaaaggcttgaggcggagggaagtcgtcccggggccgtcgtggtgggagtcccggcccgcctcgcagcggcgtgaacggggcaggtgccccggcgctgcctcagtttcctgagcggtgcagtgggtgctggcagtgccagctggcgccgaggaactcagcggcgtggggcgagccctggccctggtgggctcagcgggtcg

SEQ ID NO: 45593 - DNA, 670 bp, Homo sapiens
caaagtgctgagattgcaggcctggccagagagacgactttagccggggtaaggggccgcctgggaaccccgcgtcccgcctggacacaccgatgacctgcagaggccacaccgtgggccacctcagctggccactggcacagccttgccctctggggccccgttctcgcacacgccgacggcctggccgcactgcagccccgcagccttgtgggaaatgtagtctggcgctccgggctgtaagcgccggtcgcggctgtgtcggtcgccgctgctcccgctcctgctgggagagggtgagtgcggggccggtggcgggggcgcgcgccatccgtgagtcttgtaggcccccgcaggaggagctccggattgcggggcgaggccccagcttcctgagggttgaggggcgggcccgcagcagatgggccgggggtgcggcctcactgcgcctgtggagcgccgggcctccggctccaggtgcgctccctcttccccaggagctggcggcgggagcacgctggcagctgagtgtccttcggcgctgtcctgggcaggcgccgaggtggaatcacagccccggagcagcggggatgggggctcgaacaagggccacgccggccaccacgggtcagggaggggcccaaggttccaagagtcgctcggacccggg

SEQ ID NO: 45594 - DNA, 483 bp, Homo sapiens
agttggagcccaagctgagggactcggcttcagccttctcgaactccacagcccgaccgcgttctccgctctcggcgctgtggttctctctcggacaccgtaagtggtggtgccgcagcgacgtctgggaaatgaagtccggagggacaaacgctgcggttcagccagggaaacccgtcggctctccggcgcgcaggcgcagttgcgcccggcagcgacgggaaacgtctctgaattaggtgttccgctcgcctcttgtgcggtgtggagctgcgcgccccccgccgaggcgggcccaggtacaggctgccggtgagggcgggcccggggcgtgcggctgccgcggcgggaccaggacgagggctggcctctgcgcgtgtctgccgagtccccggctccgggcgtccgagccggggcggcctcggcaggtgaacccggccccggagggggcgtggcctgggaagggcctggcggaggccggga

SEQ ID NO: 45595 - DNA, 1068 bp, Homo sapiens
cctatacattatgtaaattattttgtatcaacagaaaagtaatcacaaccagcggtgggagctacagcacactgatcctcctaaatgaatctaatttccggttttgttttttcaaactactccgcttgcttaacaagtgcgcgggctgtaggcagcacggccagcagctggagacctcctgcctcgtgtgcggcgtgcgtactccctcgcactgcagcccctccgcgcactgtcgcctttgagagctctcgttggcggaggcggttcctctcccggagttcgcagcgcgcaccgcggcgtcccctgggaagtgtagtcggcgtggggccggaggcatgccgggagtggtagttctcccgcggttggcggggtttcggggacagctcgcggcctttcgggggttctcctggcttgggccatccaggcttggctaggattgccggcctggggttgaggcgctcgcagtggtctcttccgggccggggtggatccgggcctctccagcgagtgggcggcgtgcagcctcgtctgggcttctgggaccagccctacgcggctcgggccccttggccactgggtcccggggcgccgtccgcgagcggcctggactgccggagacccgcgggagggagcgcctcgccaggtgagctgggtgcgccgggccgctggggtggggatgccagccttttgtcgttgttcattctgcgattttcttctgtgcattttcttctgagtaacggaaataataaaagcaatagctgatgcccgccgagagcgctcgggtgccaggcaccagactagcgcatcgcccgaacgaactccgcgcatccctgctaacagatagggtggcggtacgctgttcccgctctgtcaggaggagaccgaggcagagtggcgaggtcattgccccagatgtaactggggcctggggctaggatcaggattgccttcccggcccttatgactttgggcaggtcacgacctcctggttttcagtctccgtaacatctgtaaatgtgaagattgaaaatactgcgtggaaaacactcaccgcttcctgggaggagg

SEQ ID NO: 45596 - DNA, 2467 bp, Homo sapiens
aatccagattcttatgtgaaatcttttgatttctaaatattggcaacaagttttaagatttgtaaacattctgggaatcaaaacagctctgctggtttggtgtggctcatgttgcctcactttgcaaagtgttaagtgctagtaaattttagtgttttttctgagacagggtctcactttgtcgcccagcctggagtgcagtggccatgatctccgctcactgtgggatcgacctcccgggctcaagcgatcctcccactctcagccccccaaggagctaggagtagagctgtcccgccacgacatctggctggttttttgttgttgttgttgttgttgttttggtattttagtagagacggggtttcgtcctactaaaggcccgcctgggccttccgaagtgctgggattacaggcgtgagccaccgcgcccggccaaaattttcctttgtacttactcaaattcctttcttttccaagtgaagaaacagactgagtgtatagtgacttacccaggccacacagttggataccagagatagtagtcacaatcgctaacatctgccatgtggtccttactgcaaatcttatttaataatgaggtcggtttttgttatcccacttaactaatcaataggagaagccacctctgatttccagtccactatcgtgcactctttcttgccaagccgtcatagtcattagattaaaaaaaaaaaaaaattcctgctttcctgcctcgcctgtgcgtttccttagtcgccctttcggggcttgttctaatgagtgctacagaaaaatgacgaagtggaaaatatagaccatgaaatgaaaatttaaaagaggaaatggtgtcacaaagacaacgacggccagggaaccccgtgaagcgccgggcagggtgcacaactgtcctcggagaaagttcaagaggaacttccccgcgaacaggtcctgccggcggccgggaatacgcacactttttatgttatgacttggactttcccgaacctttcgaaacagagggaaggcgaggcggtgaagagggagaaaaatctcccccacctaaggcaaaggcgatgcccgcccgcccccaccccgcgcccgcccgcccgctgggtcacatgacacggccaagatggccgaccgggaaggcggctgcgctgctgggcgggggcgggagctggagccggagctggagccggggccggggcccgggtcagcgcttgagccgggagaagagtttgagatcgtggaccgaagccagctgcccggcccaggcgacctgcggagcgcaacgaggccgcgggcggccgagggctggtcggcgcccatcctgaccctggcacgcagggccaccgggaacctgtcggcgagctgcgggagcgcgctgcgcgcggccgcggggctgggcggcggggacagcggggacggcacggcgcgcgcaggtaggctcgggccgggtctgtcccgcggcggactcgcgtgtccccgctggccgccggcgcgggcgcggtgggggccgggctgggagggcactggccgttccgggaggttacgcgagctgttggcgggcgggcggcgcctggctgcgcctgggtctttactccggcggcccagccgagaccgccccccgcagccccgcgtgcctgagcgcgctcccgcacccgcgcctctatgctctcccactaactaggtgaaggacgtgtgcgcgtccgggcttcggaactctgtagtaactccacacacgaaacggagccagcactgttctgcttttcagccgttcagtgcgggagtggagcgccggcgggtgttgggagggcgtgggccctgcgcgcagcggaccagcggcgcctccgctcacctctgcctgtgagatggggattttaaagtcacccgatgatctcttaaagaccttttcagcccttgtaatgaacagagtgccagcatatcagtgatagtaagagttaagtaacttagccctctaacgccagacatccagagctgtgctatccaatacaacagcacgcatatgtttttgtgtgtgtgtttttgtttttatttatttttatttttttgagaccgggtcttgctctgtcgcccaggctggagtgcagtggtgcgatctcggctcactgcaccctctgcctcccgggttcaagcgatcctccctcccgcctcagcctcccgagtagctgggattacaggtgcccaccaccacgctcggctaagttccccgcccccacccccctcccatatttttagtagaaacggggtttcaccatcttggccaggctggtcttgaactcctgaccttgtgatacacctgcctcggcctcgtaaagtactgggactacaggcttgagccaccgcgcccggccggattcctcaatttctaactgaatcaattgaaattcagtacttttaaattgaattaaaaattgagttcctcggccgggagcggtgg

SEQ ID NO: 45597 - DNA, 2853 bp, Homo sapiens
gaggaggaaatcccacctatgccaatttatcctttcgaaaaaagacacccgggccaggcgcggtggctcacgcctgtaatcccagcattttgggaaaccgaggtgggcggatcacttgaggtcagatgttcgagaccagcctggccaaaatagtgaaaccccgtctctactaaaaatacaaaaattagccgggcgtggcggtgcgcgcctctagtcccagacactcgggagactgaggcaggagaatcgcttgaacccaggaggcggaggttgcagtgagccgagaacgcgccactgcactccagcttgggtgacagagactccaactcaaaagaaaaagaaaaaaagacacccataaaagaaaagctggtgttcaaagataggtaaagaaaacaaagtctgccaaacctgccgcactcccccaagggccaggaggacgggcggggctttcgaaatttccattgcgtaacagcgggccgccgggcgcgagcagcacagcggtgagtgtagtcgcccgcgcctcgccagggggcgccccgggtcccacccggcccggcccggcccggcccgccccgccccgccccgccccagcccggccgcccgccagcccgcccgccccggcctcgaactcgaactcccgcgtcctagttctaactcaccagaaaaaaacctctgcacttcatcggccgagcaagaccagggcaagccccggaccttcaccacgaatccctctccaccttccgtgcccaacatcatcgtctcttacgcggtccggcgtcgaaacaaactgcaaagcggggaggaccagaactgagagcgccaattaagctgtccttcgcctccgaggcgcgcccgggcccgcaccgcccccccacggagcaaaaaccgggcggatgcacccaccccggcgactccaacacctcctcgtccggcgaccggacccccaaagctgtcctgagcaacagctgtcggcgccccgaaccgtgggggcccgggccgagagccagcgtagaggaaaggaaatggcggcggccgcttccgctccgcctcctccgacttctcacacaatagagtcggcgcggcctgcaggcctcagcggcggtgccgagattcagcgaaccactcgcggctctcgacggcagcctgcagctcgccaaggtccccgtggccctcccagagatatggggacaaacaatcctcgcaaaaacggtacccaccgtggtcgctgaactgcaagcgaggacccaccgcgactcacctagacacgcgacttctgcgtggctaagacgaaatggccagcgggcgcctgcgcaacctaaataaggtcccttgtgcgagttctgcgcacgcgcagccagctgcccgcaccgccccgttgcgtcacaaagagctctggcgcatgcgtaatttcaagagccagcccacctcccgccggcggattattacacgcttgggttttgggctcagcacccccacccataaacccgccgggctttttgttgcgcctgcgccttcccgcgaatattgaacttcggagtcctagcggtttataattatttcatgcgcatgcgtcttccttgaaaccgttctctagccttacccgccagcgtgggggaggggaatggcggccgcctgttccctatgggactgtataggagtcccgagctctgggttgtgatgaggtgggcgtctttctaccccttgcccccaggctcttaccggcgcgctcctggccgacctgaaaggaggggcgcggccttcaggcgttcccactccccgcgccgcctgtcttccctttatccccaaaccggccgaagctggtcagctgcagattgtcgaacgtcctgggagctgcggggctgcggacgtcccgcgcccgaagccacccgtatggtgcctggggcacgtcccagccctgtgtgcctccacttccccttacctgccgtcgtcgggcctagggccccggtcggcgcgaggtttccgtgcctgtggctcgcgcctgtacccagcttttgcctaacgaattcgcaccctgtgtaccccttgacccgcctaacggtcggcaggccttgactgccctggggccctggcacgaggagggatcgcgagcgcgggctccacgggtgcgcgccggcctctgcgctcggtaggttaccgctgcatctcccagagcagaattggtaagagtgcgtccattcaccaggcgtagacgctgcattcgaggaggcccccgggtcaccccatgtgcacacatgctgcgagatgactaatgttcgtggtttctagcagcactgcccaaaacctaagatgccgtagcctcccaggcctccccatgtctgatttggctgccttcctcaccccagctttagtggacacagacaatacacaaattaacaataaggtagtgctggaccctgccgcagagctaccttagctagtgcaagcctgagtgccaccctgggaagatgcggacaaagcatgtttccaaccccagtgccacagagtccgaatccagttttgacaggtttgagaaaaagtagagaggacatcaaaagaaagacaggagcccagagctaagcagggcctgatcttcaaaggccacttaggccttggcaagggtgttatctccgagagaaggctttggcaggtgatcagcaggggagccgtaaaccctgtgtaaaggaaaactcttgctggatgtgagggggatgcagatggagcaggcagggtgaatgacggtacataccaggccctctactacaaactgaactagaagcacacacctgtggtaccatttcagaaggcactttggctgaggtaatcaagaagagagtccggccaggtgcggtggct

SEQ ID NO: 45598 - DNA, 1698 bp, Homo sapiens
cactccagcctgggcaacaagagctaaactccgtctcaaaaagaaaagaaaagaaaagaaaaggaggcctgagcccggcgcggtggctcacgcctgtaatcccacgtttgggaggctgaggtgggaggactgcttgagcccggaagctcgaggttgcagtgagccatcatcgcgccactgcactccagcctgggtgacaagagcgagaccccgtgtttaaaaataagtttaaaaaaaaaaaaaaaaaaaaaaaaaggcctgtaacagagacgcgactctccaaaatgccacacaggcaagtgggggccgcacagcccatggtttccagaaagcttctcttgggaatgtaaaataacacttaccctgggacttctagtttctaaacctcctgagcctagaggccctgaagacggaccaagtgcaaagtccccgaccccatacaccgtcctccgctccctccgcaccacacccttcattccctgagcaccgcggttcctccgtctccgggacttcgccctccgttacctggatggcctgcaaggccattacccgccactccaccctatctgggccatgtcggctgcaagcttggcttccactccgcactcccggagagccacgcgcagaccctcctccacggccccatcacaccctcccaagacaggcagcttaggcttgcgtcccctgccgacacccagcaccgaggggcagtccccgaggccacgcagacctccccaacccacacgcacagaccgacccggggaaccgcgggagccagtcccgcgctggggcagtggcagacccgaggcgtgaggcgcgcatgcgtagcgcggcctttattgcgtcactgcgagtccagagcgcacggctggatcatgagcacgcccgcgctggcgcctgcgcgcttgcgcatcttcctctgcccggcgcgcgccgcagccgtcgggatcacctcggggttgcgctgcttctccagcaagtgcatgcgcgccatggtctcagtcagcatgtctatgagcagttcctgctgcagcttcaggtagttgttctcctccagcaacacttggcttttggaccgctgcacctgcgccttccagccccaggcggtccgcgagagcagcggcgaccgcgtcctcgccagctggctctcagtggtccaccgcccgccgcggaacacgaaggcctggttgctgaggcgcatgcacggcgcgccgtaggcgaggcccagctcggcctggcgcgtgttgtggtccagcaggtagaaggtggacagggagggcatgcggcgcagtggcggccgccgtggcgagaagggccgcgagatgtgatcggcccaaaactgctgcagcgtctgccacaggcggctggcatggctcgtagccgagcactcgaaggttgccagggcgtggaccttgtagggcacgcaggtgctcgaaggggagcctcgggagcgctggcgactcgtgctgcgctcttgtctcgggagcccggatgtccagaatgatgaaggcgagccagggggcgctgctgggagacaagagtccgggtgagcagcgtgcttggtacaggccgcctctcaaaccgcgaggccggcggacatgtcttagccctgcagctacggctgcggctgtgtctcaccagctgctggccaccgaggagcccgtcgttccacgctgcacaggcagcagtctcacctaa

SEQ ID NO: 45599 - DNA, 1887 bp, Homo sapiens
attacaggtgtgagccactgtacccggcagggcaggactttcatatttcagatgtgaacacgagcttggataggattggtgctgggaagagcagaagaggaagctgggaaggtggaccagtgcactatgtgaaggtgccctacaggcaggctcggaagcttagacttccttttgtgggtaagagggaactgctgaaggattagaaagccggggttagatctggattctgaaagcaatctgggaggatatctagcatagccaacagcattattgccctcatcattcagtcatttgatagacttgaactagcatctgctctgtgccagactctggtcttgggaaggggacctgaaacagcctctgcctgccctcaaggtgctcctaatccagcttggaagacagatgcgtgtatagaccacagtccagtgtgttcactgacatcctggggtgtgtgccatgggctagacctatgcatagggctcaaagtatcagggattgtgcacactaaacatgacttttattccaaacaaactgtgccctcaggaagtccaaagtccagataacagacaagtcccattttgctcacttctctctgcaccccccacccctgcccagtaagtgctgattctattatgtgaaaaagggagctatgtgttgtttctaattcctcttctgcccatgggcagtgagaagagaaagaactagagcagggttccctctgttatgccttcgttaattcataatacacttatccctcacatataggtggacagaggctggatggtacataccatccccaagatctggttcagggagatggtctctggaagcccacatccaggcccacccttgagattgtatcttctcggaggatgtttccccgttagtcctcactgtatgttgtgcctcacctggaagatggggtggagttgctgagctgctgtcccagggctagtcccatctctgacccactcagctcttgtccacctgctatgactcacaatgcctccaggccaggccaccccaggacaagaaggggtgctgaccgctgagctgtcagatagactctgggctctcccctgcatgcattcagtgcatcattgagcacctactgtgttctaggaacagttctagggaagtgaagaacatattccctcactgagctgtcattcttggcaggggaatgaagggagtgatcataagcagagtccaagacaggaatttgttctaggggaactaacaagatagtctctcaggaagctaacagagcgtgtcatgggtcaggttccctagaagcagagcctaagctgagcattcttgttcaagtgaattattggggaaatgctctcaggagaagggggtgagggaagcaagacagggcgagaaaaaggctaaggctgagccagagtgtggtctcacgtggagactagcttccgcttgctctcatggggaactctgagcacaaatggcaccacagttaggcctccttaaagcaagggagcccgtcttttgtaccctccttctacatgtcagttattggccagggcagctgagagttaccagccagctcctacagcacctatgggatgggtgcaccaccagtgatagggatctcagtagggcgccagctgaggagggaggaagataataggatagatgatgaaaatgaaagggcagactagccaacatggcaagaccccatctctacaaaaacaaattagctgggcgtggtggcatgcgactgtagtcccagctactcaagaggctgaggtgggaggatcacctgagcccaagaggtgaaagctgcagtgagcagtgattgtgccactgcactccagcatgggcgatagagaccctgtgtttaaaaaaaaaaaaaaaaaaaagagg

SEQ ID NO: 45600 - DNA, 3198 bp, Homo sapiens
tcacgcctgtaatcccagcactgtgggaggcagaggcaggtcgatcacctgaggtcagcctggccaacatggtgaaacctgtctctactaaaatacaaaaattagccgggcgtggtggcgggcgcctgtaatcccagctactcgggaggctgagggagaatcgcttgaacccgggaggcggaggttgtagtgagctaagatcgcaccactagactccagcctgagcgacagagcaagacttcgtctcaaaaaaataaaaataaaaaaaatttgggggttgagggttggatgatactaactcatgcaaacaccaaaccctgcctttcttccccttcccggtggcaagagggcttttcagatcagtgatacattcgctgattctagtgttttccaccctagtagtcaagcctttgggtgtccaaacaaatagagaacaagagatcaggatctctaaaggtctagaaaaaccctgggccacttccattttgtgaggttctcagcatactgaaaactgaagatgtactaagagtgggttactaaaatggtggcgtatcttaaatctttccatggcaccatcctttctctcgtcctgtcatccctgtatctctctgccctgacacctaatctcacttcaggaaacataaattgaaagttcaaataacctcggattatattattctggactgtgtgttatgctgggcgacgaggctgcgcaggctcctgggccgagccatgactctgcaggaactgcggcgccggctcacacagcgcggagcagtgcacgccaatccggccaggcgctcgcgctgggttctgctcacgcccgtaggggcccgcgttcgctgcaacgggcccttcctgatggccgatcgtcggactcctaccccttttgccggctgccgtttgccccgtcagcgaagggcgcgcgatgcgtcccaagtctcggctccaggaaccagacgggtgagggctactgggggttgggttggaacgccccgaaggcaccacagcaaccgacgcgggaacgcctgttaaaccagccccgccccgagacgcgcgcgcccggcggtctcgatccagcgtggcccgcccctcacctcccgcccaaccaacagccacttcctgcctcactcccggccaatcttcacactccacgaagaatagccgtagggggcgtatgggacggtgcgtagagcgatgcccacgccggccaaccggatgtcggggcttgcgcgggagggcgggacttggcgccggctgtggctactcaggggccaggggcgggcacagggccgggcttcgtgcggtggggctcgctcgcgcggcagcggtggccgaggcctcttggttctgcggcacgtgacggtcgggccgcctccgcctctctctttactgcggcgcggggcaaggtgtgcgggcgggaaggggcacgggcacccccgcggtccccgggaggctagaggtgagaggggagacctgagcgcgtcctcgggcctgtgaggacctcggggggctgggagcgcctctgcggctgaggggtcgggcgtggccggcgactgaggggtcgggctggctcttgagggcccaggccctggccgacgcgcccgccgtgagcgaggaggcccgaatccgggcgtctttggttgggttgcgggcccaggccgcgccgccggggtcgggaggcgtggcaggtggcccgacagccttctttgacctctgggaaagctgacttattcctatggctttgcttctagggctttcttaggcctctttgccggctgcctgggcagccgcgaggtgggctggagtaactgggtaaaagtatagggtggaatcgggcctactaggtacccctagtagtagggaagggtggtattagaccgagagggaatgtttacaactagcgttacagtttaatatttgaaaatccaaagcggagactggaccctagttccctgaagagaaaggggaatgtaccagaaggagaacacgcagtggttgagaaacttagcagttacagcacctattctggaggcgagtaatccagttggagagggacagggcgttaaaagcaggaaagcccccgaaagctcatctaagtgcatctctttccacaccggaggcctggaggtatgaaatgactggcccaaggtcatgcgattagtgtactgatggtgctgggattatagttcagggatagaccgtgcagtggttaacgctaaggccctggctcgagtctttgattggtcattggttgctctgtgaacttcggcagttttcttaccctttgtgcccccgttcttgtcaagtaatggatataataatacccgatggatttgtgaggattaaattaagatatgtatacaataagacagggaagtccgacatttagtaactgctcgatgatcattgcggtacgttattataatctgaatgcctttggaccaatacactgccatcctagtgaactggttcagtcctgtttcgcaggacctgaggtcacagttatggtgatagaagaaaccgggcattgtgtattaccgctgggcatgacacaagtgattgctggttgagggaagttaaactgagcttaatattaaaagattgagaggacaagattaaccatagttaagtctttttacctctgatttaggaaatggaagattttgcttaattttttaataagtagatttttttaagggggaagaattttattgatctttaaaatcattctgtatctcagtcttttcccaacattgtttgagggtcatgaatagaagcaactgccatatggatcaactgttgtacatttggtataattatacttagagcagaggtaaaggactatgtgggagttctcctgtgcatcagccagggtgcacacacaagccaggtaactggatcatgagaatgctcgagtgaactgtgtgtgggggtcagtgttgcacaacagaaattttctgacttatctgcaaatggctgtcagcattccccgacaccttactatccttactccccagttcatttagcgcattatcttctcagggccacaagggataagtgttttgacagaagtcgttgctgccgttttggcaatcacactattgcatccttttagttagagttctctttgccctggaagacagcttaaggggatgaagtggcagttggtgagcatgaattgcaggctcatgaaac

SEQ ID NO: 45601 - DNA, 1962 bp, Homo sapiens
gtgggagaccagcctgaccgacatggagacaccccgtctctactaaaaatacaaaattagccgcgcgtggtggcgcatgcctgtaatcccagctactggagaggctgaggcaggagaatcgcttgagcctggaaggcggtggttgtggtgaaacgtcgtcctttgcatttccagttccctctaatggagctgcactcttgcatgcttttgctcacatcttctggactttttttttaagtagtgagtaatactgcacttttgaaacttgctcgggcttttacaaataggtggaaactaccagtgattcggaatgttgcaagaggaaactaccagctcactagacgattctgaccaattatggggctggatacaaggaataaggtcaaagtaaaacggctgacattaaaatagcgtggctacttagagtttatcaaagtcgaaatttaaaaaataatttaaaaaaaaggtctctgtactgccaggcgggcgacagggactggccagctgcgccgcactcgcctgccagattccccttttctcggggtagccggaagggcctgccttcagcgggtgctgtgcaggaaaccaatagccgcctcttggacgggctcctgtcagtcacgcttagctccgcccccaggattaaggcccgcccaggggcttccctccgcccttcgcttgagaattccttttaaataccgctctggcgcccgagcgcgcctcttgcgtgctcgtccccacgccctcgggcggccggttcttccttctctgattggccagggcccctgctcatcagtcgtgatgcacaaggtctcttaccgaggccccgccttcttccgagaggcccgaaaacaattttaagatggcggccgcggcggtagcgcggaaaacaatggggccggggcggtggggagaggccgaggcttgaggtaggcagcaagcgccggctgggggtcgggccgagcggggcaggaggaaaacccgccgccgcgcgcgagcccgctccgctgccctcgggggcatggcgcggccgtgaggcggagaggggtagccgcggggagcgaagcccgcagtgccagccggccccgagaggcccggccccgggcccggcccgtgcagcccgcggcccatggtgctgcccacctgccccatggcggagttcgcgctgccgcggcacagcgcggtcatggagcgccttcgccggcgcatcgagctgtgccggcgccaccacagcacctgcgaggcccgctacgaggccgtgtcgcccgagcgcctggagctggagcgccaacacaccttcgccctgcaccagcgctgcatccaggccaaggccaagcgcgccgggaagcacaggcagccgcccgccgccacggccccggcgcccgccgccccggccccgcgcctggacgccgctgacggccccgagcacggccgcccggccacggtgagtagggcgcgggaaggcgcttgtcgtggcggcagccccctctcccgaaaacgcttcctctgacgcggatcgggccgctgggagacttccccaggcgtccgcgactcctggatctggctggagagagggtaacatggcagggagctgagaggttgtcatctttgggaagtggcacggtggcgttactttgggaaaacagcgccttgagggccttgcaggaggcccgacctgggaaggctggcgaacgctaaccggagggtttttcttccagacttgattccgggatgttgagatctttattcgaaatagactagcattcgagtcgcctgtgatggagggagttcctgcaccgtaggcctggcctcatttattctgcaaatgtttattgggtccttgccctttacaagatcctgtgctgtgagcaggatcagggctttcatgtggaaataagtcggcctttggttgaccaactgaaactcctctgaatggaaaatcaagaaatttttggaaaactt

SEQ ID NO: 45602 - DNA, 935 bp, Homo sapiens
aagccactaccacagtggttctcaaacttggcctttgtcaaaatcacctgaagggctgactaaaaccactttctgtgccccacgcttagagtttctgactcagtgagtatggggtagtgcctgggaatttgcatttccaatagattcccaggtgatgctgatgctactggcctgggatcacacttagagaaccactgctctagaacaaaacaaattcaagttatttttgagatgaagaggggacgaatttgaaggacagaaagtctcagatgaggcaggtccagagggaataagaaggtgcagctgaagggagttaatctttgcaaggagaagtgcttccctcttacagaagagagaaagaaaagagttgataagacgctaaaaggttttgaggtgaaagagaggcatatttaagggagtcacctaagttggactttgagacacagctttaaatcaaatagatctgtgtccaaatcctggttcagcagtcacactcacattccaagttgtataacttctccaagccttagtgcctttatcttgaaattcaggataaccgaacagcacttagcctgtaggttgttgtgaagattgagtgatgagctagtactgcttcctgttagtgagcagagagagcgagcctgggaaacaaaaagacaaagaacagagtgaccttgactgtagcagtgggggaggtgggaaagttaactgtgaactttcactggatacctgtaatttgctgagcattagacttggccctggggatgaaaagggcaaggctttggtcttcagggatggaaggagatgcagagaaagtgaacatgtacagtacgacacaaatgctttaccacaaacatgaaacgtagtattgtatacaaagtactgttagagcattagggatagaataaggaatttgaccagcagtaggataagtg

SEQ ID NO: 45603 - DNA, 1439 bp, Homo sapiens
tgaagggccagattgcaggatccctcccactcccatctctggggcttcgggtgtccagacctgactcccgctccccctcctcccccagcctacttctccctgcaggtgatctcggcgcgcagggccttccgcgtgtcgccgccgctcaccaccggcccacccgagttcgagcgcgtctaccgagcccagtgaggcgcggcgggagggcgcggggcggggagcgagccccaggcgggtccgggtcgcaggaccatcccggccggcgcgctcatcccacccgcccaccgcagggtgaactgcagcgagtacttcccgctgttcctcgccacgctctgggtcgccggcatcttctttcatgaaggtcggggtgtggggcaggggcgcacgcgctggacccccgggacccgcgcagggcgctcaccaggcccgtgcgtacctctcgcaggggcggcggccctgtgcggcctggtctacctgttcgcgcgcctccgctacttccagggctacgcgcgctccgcgcagctcaggtgagggccgggcggggagcggggcggggccggggaaagatcgcgggcgggcggggctcctggggagcgggaccgaagctgggggcgggcgacgggccggagcccagcgcctttggggattcggtgggcgagccctggcggcggccagaggaagtccccgtggggccagggttgcggcggggaagaagcgggcctcctcgcgccacctccccgctgaccgccgcccgcaggctggcaccgctgtacgcgagcgcgcgcgccctctggctgctggtggcgctggctgcgctcggcctgctcgcccacttcctcccggccgcgctgcgcgccgcgctcctcggacggctccggacgctgctgccgtgggcctgagaccaaggcccccgggccgacggagccgggaaagaagagccggagcctccagctgccccggggaggggcgctcgcttccgcatcctagtctctatcattaaagttctagtgaccgagacccgggctgcgttctctgggtccgcgggggtggcgcaccgcgggctacggagcctggaggggcccagcccgagtccgggcagcccggggcgggcttcctagtggcggcgtgagagtggctgcgaaggaacgagccctccccctggggcgggactggatccggtcttcacctcctaccccactccctactcagcctcggggtcacaaggccgcccagtcctgccggggttcaccctcctagcgctcagcggtctcctcaccggtccccctcctcaggggccttccctcgactctcagccgccgcagtccctcgtcccctggccttcacagctgacactagatagagcctgtggctctctccccaggtgagggcaggggtttttcttttggtcagcactggatccccctcgttaactgtaggtg

SEQ ID NO: 45604 - DNA, 6059 bp, Homo sapiens
cctgttaggcggccccaggtgcgattgccgtctccgtctcgcagcgcctgcctttctgacacggccctcttgatctcgtccagcaccaggttgagctccttggagcgcttgaggctctcctgctcagctgcgtgcaaccgatcgcgcagcgccaggaactcccgctggtaaacgtccacaacgtcgcctgcaggtggtaggcaagccgtcacgagggggcggtctagagccaccctacgggcccctccagtgtgccagcgcacacatctgggtgtccacctctgcaatagctcattgacatctgttcttgtgcctgccacacgtgacatagctggggtcactctaaaattacactgacactaatgctcatggggagaaaaccaggggaattagccctcttccagtactctcccccaccgggggttattttatcctctgagaaggcatctgaagtggaaatacgatttccagacctaggtaggtggatcctaagcaagggctggaacagcctcagactgaatccgctccatccgttggcctccaaagcccactcttgctttttgcagcacacgctccctccagcgggtgggctacccaaggtcctggtgctagctcttcactgtccttgtagcggtcgctggttgctcaccctgcactggattcttagcctcacgatggccccggggggtggctgctgcagttccaggagcccacctcacttcattgctcaggtgagcaaatgaggttgagaaaccggccctggggctgctcaaggacagtcaacagcagcgaggggactagctctgaacgccctggtgcctgtgtctctggagacctgtgctgcgcctggggcaccctgaagggtccgcatgccaccccagggggcccctgtcagaacctccagctgggcccaggcatgagggctgtaggtggatggggcagcacagaggtggggctgcccgacagtagagaggcaccaccagtctggcagggaccagtgagcaagaatgagatcaacaacctcctggtggctcggtgcccacagtccacgcagcaggacgctccaggcctctgccaggcgagtctctgaaaacctatgtggcctacaaggccttctgtttccaagtctccaagtttaagaagcctgaccgaactccctctacactcaggcagctcttccattccttgatccttggtggcttcacagaccccagagttgcgtgggatggcctcaccccaccagcagccctgtgcatgatcaaggtcatgatcaggcaaagttcagtcacctcagggcacacccctttccgaaacgggcaggaggtcgaagtgccaagtgaccagggaagaggaaggggtggacctgggcaggagggaaaggtttaaggagcagggagccaggtagatcttccctgaggcatctcttacccaagaagccagcccccaccctccacaccctgcctctctggggctaaaggctgaggcaaagcggagcctctggacagcccctggcgggagggaaaggggagtcagattactggctctgccaggctccacgctgggctcaggggctcggttaccctggaaacctaaccccttgaatgcagagctggctatccccagggctcacccattgctgggtgacaccaggtgtaggcagcactcgcccacagggatgggactggaggtgcagaggcctagagagccatcaggaatgggttcagagccacctgcacctgcaggtgcgcctccctcctgcctagatgccagtccccgcttgcctacttacagccactgcccacccccacccccgagccccaccctggctttctctgtcccacacgactgcctcagatggacaggctgggtgggcagtggtgggtgatgctgcctgaatcaccctggcaacagcctgcgccttaccctcgcttccttcctaggggcctcccctctcccccgggtcctgtttaccaggagataaagggccccacgggctcccgcccacaccaacccttctgtcatttccctacacactgcaggccctggccctgggcagcctcccccgcctgccagctcctccacccgccttgccctcagcttctctgactgtgggtccaactctgtgactgcctccccatgggccaggccctatgccagggctctgccaagccatgctggcaccctataaccctcgggagctggggaggcagctcaggtgaggagagggaccagcctgggagcccctgccacactttcttgcctcaggaccacgttgttaagagcagcagcaatgaggcctggaggctgtgtcaccctcccctggaggcgagtcattaggacatcctggggcccacaaaccacagttccccctgcttccctcttggttggggaaagattaaagagccaagctggggcacaacctttgtgccttgtactcagggaaaagggacaggctcagaggggcataggcagatatcaggcccgttaacggtctgctgtcaccatgcatgtgtgtggcaggtgtctgcctcctctccagaccctgcaacctcctaggagtaagggtgtccatcattgctgaagtccaggcctggggaggcggacagcctgaaggctgggagcgctgcatggctgagaccccgggctgcccccaagggtctgcctccctgggcagatcctcagcaggtgcttgaccgagggccacagtttgagcgctggcagagctgctgcacgggctagataggaaattgggccccaaacccttctccagggtccattttgcgttggtctaagaggccgtcctgggcttgaccttgcgtttccaggatgatgcccacacctgctgcccttcctctctggttccctgcccacctccttccttccctgcagattccacttcctgggtccttccctcaagttcctggacccccgctggctgcaaagtggaggccaggttccaatctggcctccgactggctacgtctggtttcaccaggggtttaagacagattttctacatgtgacaacgagatgggttcacataagagcccagattcccagcttctcttgaggcctccaaagacctggtactactgggtcaccacagaaacagtgacagcccctcgacaagggaggcctatgtcaccccatactcatacctcacaggatccttaggcttctatcccctaggggctgggctcgtgaatctaagtgctccccttctttgctctcctgttccccaggccctcagagagccagcctcctggatgccccccagacacagtgggtgccatggagccagtgcctctccctcactctgctgtcctggagcctggctccctgtggtaagccaggcttgcagaggtggctcctgacatcaatccgcgggcatgtggctgctgcgggaggcacacactggctcaggacaaagggcaagggctcacggctctacccacgactcaaagagcatgccccagcccttcagatatggccccacctaggccttcatgccagtgtgcttttatagtcaccctgccaaggacccagaatgtccttccccaggtgacacaccctacctacagagaattctgccccagccatgcctgcccttgataatataccccgccagcacggcctctgcccagccatccctcccgtgtcaggcaggctccccgcagagtccctgggtgatgcctctctggccctggagccccaaggccagcccaggcctctgctctggcagaacaagtgcggcaggcgggcgtgctggcagagctcggcgtgggtagatggagctcggagggtccggaagggtccaggttccctcgccctcctccgcagcctctctgggatggcgctccgggacagggaaacagggaagcaggtggcggggaggccgaggggcagctggactcagcccgcttaggcctccagcaggcaggcaggcaggaggccactctcccggaacctccaggccgggggaagagcgcctccgagggctcaggccctactcggccccaccatcgccaagaccggccagcggggcggcgcggggggatcggcccgcaccctccgcctgcaagagcgctgggcgcacgcggagggcgggggccagcccgggaagctcggggtgcggaggacgggctggggccgcacgggagcgcagggcagcaggggccgggctgcctcaggacgcctccctccctccctccctccctcccacaggccggatgctgccgacgcgttctgggcgccgaagggagtcccaggaccgggtgtcacgccggggtcgcccaggccggcgcggggcagcaggcagcagggtgggggggtgccctcgcgcctgtgtccctcacgccgccccagctcctgcccaggtggctgtggctggcgttccgggacctctgtgaccttgggtctctgcccctctccgagaaccccacgggtccccagctcagcgtcgggacagctgcgcccgcggagtccggtccggagcacccacgggcgcggcccgggcccgaggagaacgccgcggctccagcagcaaacaagtgggggagggtgggaggggcgtcctcgcgccgcccgggcggggaaggggcgcctgcgtcggcttccggccgccttccgcggccaccgccgggcccgctcccgccgccgacgcccaggtgcgccaggtgcgggccgggcgggggtcgcgctcacctttctggccgctgagtgccgcgtaccaggacagcgagaggaaggcgcacaggcagaagagcagcagcgtcaggaaggtgccattgcggagcctcatctcctcgggtgcgcggcgggcgcccgcggggccgaggctgcatggcccgggggaccggggccggggcgcaggggtcggaaggcggcggcggcggcggcaggggccccggccccgggtcggggaggggcggggggcccggggccgggcggggaccgggccagggagcgcgccggccgcccctcagggcgcaagctttgtgccctgtactcagggaagaggaacaggctcagaagggcagaggcaggtatcaggctcactgcagatatcaggggcgcgggacactggcggcctcgcctccgcggcagggccgggccgggccgggctgggctgggctgggcggcgagagccgcggcccggcctggatctggggcctggatctggggccgccgcggagtcgacggcgcagggcggggcggcccggatttaaaggggccgcagcaccgccgtcgccggcgccgcgagggggtggggtgggggccggcggccgggatcccgatcggctcccgcagccccgcgtgggctcgtgcgagtcggcctcaggtaaggctggagtgggagtgcaggtcgaccgcagccggggcggggggcgggcggcgggggcggcgctccgggaccccggtacccttctcagcaacatctcctccgcgcgcggaccccgaccccattcgcacgttctcggggctctttcccgggcgtgaggggctctgggtggcgcgggggactgggcggttgaagccgggagcgaccgctgccttcgctgccgcccagggcgcttccccgctcaggagcttcctctgggcctctggacggaggcgcgcaggggcccgggaggcgggaacgatgggcctttctaggcggtatcagggccgatgctcgtggatgcagagcagtgaccagcccagaaccgtaccggcttcccggggcaggggcggcccgagagcgccgctaacgggagcaacgggccctgcccccggtggtgtaggggccacctcgccccgcccagcccagcccgatattgatgggggcccacgccttcattgtttttttgttgttgttgttttttgttgttttttgtttgtttgtttttgagacggagtctcgctctgttgcccaggctgcagtgcagtggcgcaatctcggctcactgcaccctccgcctcccgggttcaagcgattcccctgccccagcctcccgagtagctgggactacaggcggccgccaccacacctggctaatttttgtatttttagtagacac

SEQ ID NO: 45605 - DNA, 560 bp, Homo sapiens
ggcagctgggtgtttcattcatagcaaatgttctgtatattcaccatgtaccaaacacacatgtcactaatgatacaaacacatgtgcactgacattgacctcctcactgtcttactatagtcccatccacagccaccttatcagagtccatgggactctgacaacttgtaatgggaaaattaaccgtgcctgtaggggccgcctgggtagcgggaggtggttcatgagtaccaggaaagctggccctggggcagacctgggcagggcagagcacagcttgcaggacctagtacacagtgttgggaattgaatttgggttttgacctttgaagctgtgcataaagtctaaaacaagaagaggagtggaggctgaggttgtatttgtattttaaaatgagcatttgccacacaaagccaggagcttcagaccagcgtggttaacacagcgagaccctcctctctgtgagaaattaaaaaaaaaacaataataaaagccaggcatgttggcatgtacctgtagtcctagctgctcagggggtgaggcgggaggatcacttga

SEQ ID NO: 45606 - DNA, 9880 bp, Homo sapiens
actacaggtgtgagccaccgcgcctggcctcttccagaaggttttcgatggcagcaggtggaggggagcgagagggccatcgctcctgctgcaagggcagcccctccacgggatcccacactcctgacccgttcagtatagacggggtactcccggtgcggcctgtcaccgctctgtctggcgctggcgctcctagagaaggccatgccgacctctcccccacctcgctccagattccccttcttgagctgcttttcccacagtccccccaggcgccactgagagcctcccgtcttcgatgggcttggggcgcctggacccttccggggtcactttgccgtcttcctccagcccccctccctactccttgtcgccgcccccccgtcttttcaggaccttgcgcactcaggctggccctatgctttggggtaccccagcagtgcccccgggtctccggccacccggtgacggagggagggagaggctggcgagggggcggcgccttaggtcccagcgcgacccgcctctcagcccctcccgccggctacagccgcgcgggacggggcagggacctcgagaacaccggggacttgcgggccggtggccccgggcaggccacttctgacgcgggtgcgaggccttccgcgggcgtgcacggttgggccggagccgcgccgggggccgggacacgcctggggtcagcgctggcgtcgccgctcgggtggggtgggccgggttcgggtccagtctcctccccacgggcggcccgcgccccgtcttccagtgacccccacatcccttgcgccccgagctggaacttcggcaggttctgccccgggccgcgcgcgctttctggggaccagggctgtggttcctgctccgcgtcgtgcctttagacaccgccgggcgttcgtcctccatccctccccccttttccccactccgcggttgacgagggccgcccccaagtggccatgtcccccggcatggacgacccctcagtgcccctgagggcccagggtctcgcccccgtcccgaggcaggccatgtttgaatttatttggagaaattcgcccagcccaggggacctctttctgcagctctggccttccagtaggagagggtccctggggctctcaggcctgacaacttggcatcactgaattctctaaccatgtctgtccatgacttgaactccttttcttttagaaagatctttgcaaaccccttgtgggcgtgcccctcccatggcccccgtgcctcttgcctgggctttgggcttgtctgaaagggctaaaagggggtgatgcctggccgggcgggtggctcacgcctgcagtcccagcactttgggaggccgaggtgggcggatcacctgaagtcaggagttcaagaccatcctggccaacatagtgaaacccatctctactaaaaatacaaaaattagcaaggcttggtggcaggcacctgtagtcccagctacttgggaggctgaggcaggagcaggagaattgcttgaacctgggaggcagaggttgcagtgagctgagatcgtgccactgcacttcagcctgggtgacagagagagactgtctcaaaaaaaaaaaaaaaaaaaaaaaaaaaagtgatgtccagtgcctggggatttttcctagggagtggtcaaggaaggccccgctgaggaggagacatttagggtgggaagttgccatgtagggcaggagtggaaagggttttggaccagagggagagccagggaaaagtcaccaggtagaatgagctggcatgattaggaagatggcaagggagggctgtggccctcccatgtgagtggaagggagtggctgcagcgcagaaggcctggaggcccccgcacagaccaggacctctgtagaggaactcatcccctgtgtcccctgtgattgtcaatctccctaaagatggcccagagcagtgcggcctgaatccctcagtggccttgtctctggctgccccagcacccacgcggacacttgactccacgccccaaagaaaagaagcgaacctgggaacaccactgccaaggcataggattatttgggaggggggaagggggaactgaggaggtggttacaacatgctgggcagcaacagacagaaccagaccacccctgtggctgccccggctggtctcctgggaccactgggcgcttggctcaggcctctcctgccctccccactcttccacctcagcccccctgcagtctctgtcctgccctgaccccccagcttacagccccaaaagcagctaaacaactcgcacacccacggggcatcgcctgggagggcagcccaaatccttccacttcagccccatttgaaagatgaggaaatgagaggctggtccatagtgggtctcgcggctcaggtgccgagccttccctgggcatgcacgccgggccctggagggtgggaaggggccagtggacgcggggagcctgcggggtgggactgcatcgggaaaggggaaggagtcagaggcgagaagggggagagtgtctgtctggctccagccgctgcacgctcttcctgctcaggggactcacggtgaccccggagccactccccagcccagcctccaggtaagaggtcactgagatgggtggcagcaggggccggggatccccctattacgacagcggtcatgggacgctgactcactgccggccagaccacctgacctccgcggcgggaggagagggccctgccagggggttcccgccgcgccttgtttacctccgggaggcctcggcctcgcgtgggggcagggcggccgctggggccgcaaggcgtgcggggaagggccagagccgggtgtccaccccagcttcccaaagactccctcttctgtgcttccttctcccctccccgccccccccccagtctcttcacatgcccctagcccccgcggaaacttcccgcgatcccaaacgggccaaatggcgagaaagcaaaggagctccttcttgggggtgagtggggcgccttgagcgcttcctcaaagctatgttcccagagccacaggccttccttgtgtccctcaccctgctcagaccgggccatagccgggggctggggcaggaaagccggccctcggcgggggccacgtggctctcaggcgcctgggctgctgagtcacgcttggccagcacctgtctgtaggccacagcctctgccagcacgcccctctgtgtcccctgcccctgtctgcaaggcagtggctccagcaggccctggggcattttccactctccaccgccggatgcagggagaggcctgaaccctctccacagggctgctctgggcagggtggaagccttgcccacttcggagccctccgggaaggatcattcacacctgtggaccagcccctgctgtgcgcacacccacacatcaccttcgcacctgactggccccatccagccactcttgcctccctctgggtttcctcccctgggaggtttctccagctcctgcaagccctgggctgaaatggcatgagttggacccagcaggttctgacctcctactcacaggaccttgcctgggaggctccagagggtgaccactcgtcctgcccctctccttgccccagttctggcggacaggttactctggtggcataaagcagtgtttcttccttcctagctgaggaggctgttggctgacccccttggctgcccacaaggccaacgggcctgagcccccacagggccatgggcattacctgctgaattgaggagcccataaggagtcacttggaccacagtgaacacttggcgaccactgacactcaggagaccttagctggtcctccagcacctctcaactccactcctactaaactgggaacttctctggtgctcaggccagagtcggggtccgtcaccgagtatgctatgcgctgcccatcaccgaggatgccatgcgctgtaagagggctgccaccgcggcaggctgaccatggcagggtcggaacagcaacctgagagccagcttgttctggccagcagtgcccactgggcgacctagcagcctcctgatatgggggctgtgtccccctctccctgcactgggtacccccaactgaggatattgctgagtcatggccaggcccaagcctgggaggggcgaggggctggacccccgccagtaccctgatcccaggtgcagaggctggagcccaggcctgtatgagtgccagggccggtttcctggggtccttggtgcaccggggcaatgaagagaggggtcagcaatgagggggccgggagacctggagcgaggggtagcggggaaggggagagtagtgaaggggcctctgcagggcggctctcgcgccgcgacgacggtggcgggggcggggagggcgcgagagactccgcccctctcgaggcggggcggggcctccgcgttcgctacaaaagccgcgcggcggctgcgaccgggacggcccgttttccgccagctcgccgctcgctatggcgtcgctcaccgtgaaggcctaccttctgggcaaggaggacgcggcgcgcgagattcgccgcttcagcttctgctgcagccccgagcctgaggcggaagccgaggctgcggcgggtccgggaccctgcgagcggctgctgagccgggtggccgccctgttccccgcgctgcggcctggcggcttccaggcgcactaccgcggtgagcgggccggggagcggcgggggcggtgacgcaggccggacacggcctcctgccgcggggtggctgccccctcccttctcggcgacgcctggcgggccgtgagggggtctgcgctggctgctccctggatggcggtggcctgcatgggtccccagttcggccatgggagccggcctggtgactggagtggtgaccaaggccgggacccgctgctcagcgtcggccccctggggcggtggagccctgccggccgggggctcgagcctgggggcgtcagacgccccgctccaccccccgcgctgttggggattttggcaaggacgcgccggggcgaacgctctggctctccgcgggcactgggtggtcaggcgggcactcgggttacactgacaccttgctgcgccaggtggtgggttcagataatgccctggaggagccgggcgagcgccggcgaggggagggagtgacgcgggtaaacaagcgcgggggtgcgggggactcgcgagcgccgcgacagcgcctgggagaagggcacggatcgccggcggaacgctccgagccaggtcgagtacagatgttttcccattggcaagtggacgagaacgttcttcagaagtgttggtgttggcacagaagccctgtttcctgctgcgctggtgtgaccagtggctgctgggggtggggttagggaggtggttgtggccaggagggcgggaggtggccaaggccggcccctgggagggtgcagtgctaggacctccctctggagcgctgccagcataccaggccctctcctattcttaaaaaaaaaaaaattgtgatgttattgagctgtaactgaaataagggttcacccatttagtgtacaagtcagtggttttcactattttcataggtttgtggaccatattcagtgtgagagcttttcatcaccttataaacgccatacataccttttatcaccctcttatccacatgcccccagcaacctcctttctgtatctattcatcttgcaatcctggacatttcatgtaaatagaatcagacaatgtagtcttgcaagtggtttctttcacttagtgtaatgtgttcagtgttgtggcacatatcagaactagttttttttggaggaataatattctgttgtgtggacaggccatgttttgtttacctgttcattagttgacagacatttgggttgtttgcatctttgggtgcctcacctgtgccctcggtggatggcgtggtttggtctgcacagctgtgctttaaagccatttcagctcatatgtatctgtcacaaatggagactacatacaaatacgtgtctttcagctttgttagggaaggaagcaggcagatgcccttgtcttctcctttactcccaagccactagaagtctaaggcctttgtggggctgggcccctcaggagcaggtcacaggcagggatctcccacagttgaagacggacatgggcctggtcggatggggaatgaggtggcacgtttctgaaaaggcagctggcccaaggctaaataagtgcagcagccaaagctgctgcccctgtgcacaggccctccgccccctgcatgtggctgtggtccagggcccaggtcggagcactcaccttccaggaggtgccagagcaagggggtagtcttgcctctcactcctgccctctgtggctcaagtaggtgtgtttgtttatagccctgtgagtgtccctttcatacttgcctcagcccattccagcagcttatgtccagctgagaacccctgggtgctcacgtgctgtcttttaaacaatctagatgaggacggggacttggttgccttttccagtgacgaggaattgacaatggccatgtcctacgtgaaggatgacatcttccgaatctacattaaaggtaaggggctgctctgggggctgcctgaagccagctcagcttgtactcagttccctgctgagtaaaaaacagggctcgatgttccaccaatgaaggggtcagcaatttgagggctgtttaagacagagacataggccaggtgtggctcacgcctgtaattccagcactttgggaggccgaggcgggcaggtcacctgaggtcaggagtttaagaacagcctggccaacatggtgaaaccttgtcgctactaaaaatacaaaaattagccgggtgtggtggtacatgcttctagtcccagctactcaggaggctgagacgagaatcacttaaacctggagagcggaggttgccatgagccgaaatcacatgactgtactccagcctaggcgacaaaaaaaaaaaaaaaaaaaaaaaaaaaaaaaaaaagacattttaagtgctgtgcctgacctgagaaagaggagtccatgttcactctagggatggggtctggtgccgtggtgcttgggttagggatggggtctggtgccgtggcgcttgggtgaagggcaaggccaaagctgtgcagacagggctccttgctgctgctctgctgcctgggccaaacagacacagggactgggaacctcctagcaggttcttggtggctctgctgccctcacctaagtggctgaattttgtgtggattccatgctggagagcagggccgggggccttgctggcagtgacagccccacagtgacgacagagggggaggactttagggggtcccaccctagcggctctctttacccttcctgtagagaaaaaagagtgccggcgggaccaccgcccaccgtgtgctcaggaggcgccccgcaacatggtgcaccccaatgtgatctgcgatggctgcaatgggcctgtggtaggaacccgctacaagtgcagcgtctgcccagactacgacttgtgtagcgtctgcgagggaaagggcttgcaccgggggcacaccaagctcgcattccccagccccttcgggcacctgtctgaggtgagcaggccctctgtgcaggcctggggtgggctcagggtggcaggaaccttgacccgctcactgcctgccgctctgctaattcctcccccagggcttctcgcacagccgctggctccggaaggtgaaacacggacacttcgggtggccaggatgggaaatgggtccaccaggaaactggagcccacgtcctcctcgtgcaggggaggcccgccctggccccacggcagaatcaggtgaggcttgtgttggaacctgcttctgattggtgacagtagtcaggcagcctgtgtgcagggcccttgtgcaaagcgtgtgtgcaaggcaagaattcaggataccccccaccttcctggtgccctacaatcacacaagaaccctgcaaagtggggtgtattctctccatttcccaaatggggaaactgaggtgcctaagtgcctgaggccacaaatttacctgcacagcccttcctacctcaggaggctgccctctcaaggtaccctgaggtgcaggcagggaggcccttccagcccaggggtctttgatgcactttgttctcttttgtgatggttgtcaggaagatcagagccaaagttgctgaagtcctttgaaacatagttataagtgaaagacttaccgttagctttgtagtctagatttttggattctgattttattaatgttactgtgtcctgtgaatcacctcaccctttgggacaaagatggggatgtttgcttgactttgagtaaataacatatttactcaaggaggtgatcaatattcacagtgtactgagcctgagcctctgtggggttgctgagcaccagggtcacagatgagggggagatggcacgggagagtggagatgctctctgtgcagggccagggggtgcagagtgggaggaaggagagggggatgctgagtgggtcactggacaagatgtccgggttaaaggtcacccgggaacacagggaccttggcaagaaggtgacaggactgtgacaggtatccaaggcattaaagatatctttatcttatctttgtaaaaatcaaagcttctggtccatcggaggatccgagtgtgaatttcctgaagaacgttggggagagtgtggcagctgcccttagccctctgggtgagtgcacctccttgcccagtgcttccctaactcagcctgcactttatgtaactttcacctggaatactgcaaaggaatgggtaattgacatgcccttgacactggtgaggatttgttgcctcaaatcaacctttagtagtgctggaccacgggcaactcaaggttgaattccctgacaaaattctcgagctttctacatggagtgaagtcgaatcagctggcatttggttgggataatcccagtgagggagggtgaccagactgtggttgcaggtcttgcctgtcacctctgactgccctcctttggatgaacaatagtctgcaatttcccctaagccaggccttgggatttggacttttgaggacctgggtagtagttagttgacatgctatttatcttttccttcttttagtttacaacccccaaacctttctggtgcttctgagtgctgggcctgcctcagagcggggagaaggtggaggcaggtgctctgggtgacacccggttctggtgcctcaggttgcacagtgggtctgtggggtgggtgaaggtgccacctgaccccaggcatgagctcaggctctgagacccctccctgctgggctttagaaagtgcctgttgcgtctggctaagggtctcgggtgggtgctgcagggttaggcatgcggcagtgagaatcagtgaatgaagccaacttctagttcaagatgacggtggatctgtgatggcagatggatcgctgggacacctgcatctctcgctagacgagtgagcttgtttttgtgactgcagtggcaggctgtgtccacccagcctgtccaaaggttgtgttcagtgtctgaaagaatgctgctaggaggggcgtccgaaccatgcctgctgcctcctgtggctacagggcgtgactgccatctgctccaactttgctcattccgatttttttttttttttgagatggagtcttgctctgtcacggaggctggagtgcagtggtgccatctctgctcactgcaacctccccctcctgggttcaagtgattctcctgcttcagcctcctgggtaag

SEQ ID NO: 45607 - DNA, 980 bp, Homo sapiens
ctctgctccccccttaaactctattgaaataacaggaaagggcttacacaaaaaagaaaacaccatagacaaagaaagtaatagaggaaaagacaaagatgtgatcagattttggaagatggacatggagggagggtggcaacctgctgagggaagcttcagaaatctctgtgccagaacagggcatcctggtgagaaggaagaccatctgttcaggtaccaggaaaggcaagaggtgggagtgatcgggggacaggaacaaggggggagggttgaaaacctctagggagtgtcagctagagacttcagggcccacttggccagatgatggctcttgccaacaattgaaggagacctcatgtttaattccaggagcacctgacccagggaagcttcagcatgggatactagagacaggccagggtgaggcaccagcctgaaactgggcatcccgaatgagcaatgggcccagcagtcagttccctggccaggcaggaggtggggagtccctgctgagggaggttgaatgcccccagagaagtgtcctacagctcctgcctgccagacccccaggcaccctgcagagggaaagttagtgatggcgctggccccacagaaggcttcctgtcaaccttagtgcttcagtgggatcagacccctgggtcaccagccatctgaggaaagcccccacacatgggagaaaaggtcttaaagggaagagaatgttaatgtcctcagtgagatacaaaagagcattgtctgcatgaaaaaggaacaggatactagaaaaaggataacaaagggaacagaataagaaagttcttaaaattaaaaaatagaaaaaaaacttcaaaagaaggcttagattctactattgtctcaaggagatattccaaaagcaaaatagagatagtttttttatctttcctctcctcctaatgtaggaacaagtctagaagcccaatataggatgagtagga

SEQ ID NO: 45608 - DNA, 2340 bp, Homo sapiens
ggcaggtactggtccagagtaggaagtgcgcagatgtgaactccagcagcaggcaagagcagcgtgagctgaaagggcacagggagagtttggggagtgggatgggggcagggagtgtgcaccacagcctttggcaactggtgactctaagctgtgggtgtggagacttttgacacatttaatttcaaaaatagtgcaggtgattctcccctctgtccctggtgagtcacgtgagcctggaggtgtgcaggttccctgtggggccagcgttgggccctacgcagcgcctgcacggcccatccacctcccagagcagagctccggcgttgaggtgtgcgtgtgtgtcgtcgcacaaagcctctgtgtgcaggtgtcaggaggcacatggccttccatcactgtggctggaagcgcctgccacatgtggtattggctctccctgtacttagggcctggccccacctgccgtgtggcccgtgtcctgcatggttaggaaaaaggtctctttcgactttctggctcagaagctgactttagatgctagctgaggttaatgttttactgaattggagaaagagaaaggtccagtatcatgggcccaccaagaatgtttccagaagccacagagatttgtagctgggatatggggagaagcctctgactcatgggtttgtatcgtctggtcccatactggctgtgtgattgcggggtcgagctgggtagaacctagcacctgcatccacacgctgagtgccaccatccagacacttagctgcttgtggggactgaacgttgagatcttcgtgagtctgtagtctccacaggccaagctcctgcttgcaggtgcatccttgggggaacttcacggcttgctctttcctcctccgcctctaggcattgaagttgatatcgatgtggagcacggagggaaaagaagccgcctgacccccgtctctccagagagttccagcacagaggagaagagcagctcacagccaagcagctgctgctctgaccccagcaagccgggtgggaatgttgagggcgccacgcagtctctggcggagcagatgaggaagatcgccttggagtccgaggggcgccctgaggcaagcctgtgcccctcccgccacctgggaccacggccagcctagtgatctgtggcctgcacctccgcctcatcctcagcacctctgcagccccacttacaaacccgagggagctgctgctgctgcagtgatgtctgtgccattaaagtcacgctgggaacctgctagaactttgtagttacttggtctttgtgagtggccactgttccccctagacccctgcagccttaactgcacgtgtgcatgcgtgctccccgactgtctgccaggagccagggccatggtcaggcttggcctgttgcgcgtgtctcctgtgtgctcatggtgagttttgttccaggaacagatggagtcggataactgttcaggaggagatgatgactggacccatctgtcttcaaaagaagtggacccgtctacaggtgaactccagtccctacagatgccagaatccgaagggccaagctctctggacccctcccaggagggacccacagggctgaaggaagctgccttgtacccacatctcccgccaggcaagtgaaccaagaggttttgtacatattcctacctttccctttagagcatcctgccctcctctgatttcagcgacacaaacagaaggatgagatgttctccactgcagggctgtctgtaggtgtgggaggttaggagttggttttgtcctattatgtgtaccctgagcaatagcgagtaagctctgctaatgcagttctgaaaatgtttttctttaggcaaactccagagccaggaatattaattgtaggagtttctaaaacttaacatgcagaccaggaattaaggcaggtgtgacacagagagggggcagcactgggtgtgtccctactactcacactcaagtgccgcctcagggagtgctggtctgagaggggggggggtcatagccaagatccctgtaggagccaggcagaagccaccgttgaagtggatggtgtggcaggcagcagtgggggggtggggggtggggacagctgacagaaactcctcattgtcacatggcagccgtgtgtaaaccaaggtccgtgtgcacaacctgctgtgggccgccgctgtgtgtcttctctgccttagggcaggggatggcgagctatggcctatgggccaagagtagttcttatttttgtttatttatttatttatttttattgatcattcttgggtgtttctcgcagagggggatttggcaggg

SEQ ID NO: 45609 - DNA, 1976 bp, Homo sapiens
ctgggcaggctcggacactggcagaccctggtcctggctggccaaggcagcagggtatgtgtttcgggtcactcacagggctcagcaccactcctcatggcttccttactgtttcggcagaggctgacccgcggctgattgagtccctctcccagatgctgtccatgggcttctctgatgaaggcggctggctcaccaggctcctgcagaccaagaactatgacatcggagcggctctggacaccatccagtattcaaagcatcccccgccgttgtgaccacttttgcccacctcttctgcgtgcccctcttctgtctcatagttgtgttaagcttgcgtagaattgcaggtctctgtacgggccagtttctctgccttcttccaggatcaggggttagggtgcaagaagccatttagggcagcaaaacaagtgacatgaagggagggtccctgtgtgtgtgtgtgctgatgtttcctgggtgccctggctccttgcagcagggctgggcctgcgagacccaaggctcactgcagcgcgctcctgacccctccctgcaggggctacgttagcagcccagcacatagcttgcctaatggctttcactttctcttttgttttaaatgactcataggtccctgacatttagttgattattttctgctacagacctggtacactctgattttagataaagtaagcctaggtgttgtcagcaggcaggctggggaggccagtgttgtgggcttcctgctgggactgagaaggctcacgaagggcatccgcaatgttggtttcactgagagctgcctcctggtctcttcaccactgtagttctctcatttccaaaccatcagctgcttttaaaataagatctctttgtagccatcctgttaaatttgtaaacaatctaattaaatggcatcagcactttaaccaatgacgtttgcatagagagaaatgattgacagtaagtttattgttaatggttcttacagagtatctttaaaagtgccttaggggaaccctgtccctcctaacaagtgtatctcgattaataacctgccagtcccagatcacacatcatcatcgaagtcttccccagttataaagaggtcacatagtcgtgtgggtcgaggattctgtgcctccaggaccaggggcccaccctctgcccagggagtccttgcgtcccatgaggtcttcccgcaaggcctctcagacccagatgtgacggggtgtgtggcccgaggaagctggacagcggcagtgggcctgctgaggccttctcttgaggcctgtgctctgggggtcccttgcttagcctgtgctggaccagctggcctggggtccctctgaagagaccttggctgctcactgtccacatgtgaactttttctaggtggcaggacaaattgcgcccatttagaggatgtggctgtaacctgctggatgggactccatagctccttcccaggacccctcagctccccggcactgcagtctgcagagttctcctggaggcaggggctgctgccttgtttcaccttccatgtcaggccagcctgtccctgaaagagaagatggccatgccctccatgtgtaagaacaatgccagggcccaggaggaccgcctgccctgcctgggccttggctgggcctctggttctgacactttctgctggaagctgtcaggctgggacaggctttgattttgagggttagcaagacaaagcaaataaatgccttccacctcaccgcaaaccttctgctaaattgcatgaccaggctttccaaaaacaagacattctcatgtcatcaggtgatccatctcctggggaccttagaatcaggttaccggtgcctacaaaagaattttgagcagaagggcctcgagacatcgggaaaggggtgcgctggctccattctgctacctcccaccggggggcagctctccagagcctgccgggttctgca

SEQ ID NO: 45610 - DNA, 1449 bp, Homo sapiens
caaaaaaaagaaagttgggttgtaggctgggagcagtggctcatgcctgaatcccagcactttgggaggctgaggcaggcagattgcttgagcccaggagtttgacaccagtttgggcaacatggtgaaaccccctcttctacaaaaaattagccaactgtggtggtgagtgcctgtgatcccagctgctcgggaggatcacttaagcccgggagatggaggctgctatgaggtgtgattgtaccattgcactccagcctaggtgacagagtgacaccccatctcaaaaacaaaaggctgggtgcagtggctcatgcctgtaatcccagtactttgggaggccgaggcgggtggatcacttgaggtcaggagttcaagaccagcctggccaacatggggaagccctgtctctactaaaaatacaaaaattagccaggcgtggtggcgggtgcctgtaatcccagctactcaggaggctgaggcaggagaatcgcttgaacctgggaggcggaggttgcagtgagccaagatcgtgccattacactccagccaggggaacaagagtgaaactcctactcaaaaaaaaaaaaaaaacaacagttgggttgtgctgcttacaaagggaaaagcaatgtgaaagcagcgatagagtgggtccctgcagcactgccacccaggcagtacagaagaggctctgcggccctgaaacttgacgttggctttgccactgaacttgccatgactgcacaaaaactgcaagcctcagttcctcacctttaaaacaaagcaacaggcttgagggagcatgaaacacaatgataccattacaacatgcagcccagggactggcccgtggcagactctctggtcattcttctaggatttggagattcaaagccacttacttacccaggatcacaaaactagttggcggcaacatcaaagtttgaattctgcttcttggcatgagccagtgctctgtgcgtggtgcaaggccagcggagaccgaccttggctgatgtgggggtgggggcagtgactgacgcccagtggactcccaactgcagtgcccttgctgtgccctggctcctctgacaggcagagcaaaccctgcactctgcagcactggatatgcggtggggcctgctggactggaagcttcaagaacaagacaaatgggccaggcgcagtggcccacacctatagtcccagcactttgggaagtgggaagattgcttgagctcaggagtttgagacaagcctgggcaacatagtgagaccatgtctctaaaaaattttttttttctgttgcccaggctggagcgcagtgatgcaatctcagctcactgcaacctatgcctctcaggttcaagcaattctcctgcctcagcctctcgagtggctgggattataggcgtgcacaaccacgcccagctaattatttttagt

SEQ ID NO: 45611 - DNA, 2271 bp, Homo sapiens
aagtgctgagattacaggtgtgagccactgcgcctggcctctacaaaatattttttaaagattagccagtgtggtggtgtgcatctgtggtcccagctacttggcggctgaggcaggaggatcacttgagcctgggaggttgaggcttcagtaggctatgactgtgccactgcactccagcctgggtagacagagtgagaccctgtctcagaaaacaaaaaagaacaagacaacaccctaagtgaagagtgcctcacatacaagagtccacagcagggcaaatgcgagtgtggagggaagcatctcccaggattcagggcggcccgctgacgactcctgcccggacaaaggtccccgtgctccacgcagaatgagacgatggccctgacccatcgtcaggttgacctgctggccaacctcagtttctccaagggtcacaatgctctttggtcctgagttaccctcatgggagacgagaggcatgggagggaaaagggggtacagacccgaggaaggagttggcttcagacagaaaagacaagaaacccgggtgggaagatgggctttctgcgggtaggaatcgcacacttcgtcaactgtgacaaaagacagaattatcacacacacgctcagtggtcactgggaccagagagaaactgtttgtcactgaccttctggggtccccaggcgacctcagagccacccgagtcctgcacgccacggctgcacggaggctggacggtgctcctgctccacttcctgtcaggacaggaccgtcagtagtcccgtgctactctccagtggcaccccgagcctgactccacgatcacatggcccacaggctcgggtggccacctgcttgttcctacggcttcccaggcagctgctcagggtgtccagccaccgcccaggccccactcccctgcttcacagcttctaggtgctagaaagttttgtttttatttcagtcagggtctcaccggcacccaggctggagtgcaatggctcactgccgccttgacctcctgggctcaggtgatcctcctgcctcagcctcccaagtagctgggaccacaggcatgcaccaccatgccccatgaatttgttttaaaaaatctgttgtacagatagggtctccctatgttgcccggactggaggatcaaatgatcctcctgcctcagcctcccaaagtgctgggattacaggtgtgagccactgtacccggatgaaggttctggtttgaaagcagaatctacctcctgaaagcacctgccctctaagagcctccctagatccttaacctaaagcagtctctccaaaaatctcactgaaatgcctgaagcagaagaaaacttccttcaagtctgaggcctctgcttctctgagctaaaagctcttaggcctgccagctactccgacctctcccctggggtcagtacagtctgagatgttcagaattaagtgggcatcataaagggtgtgcacacgggtgtcctgcccagccttcgcctctgcaccagcagtgcccaatgcccaggtgggctgtggggccagcagtggcagcagctgcccgatttcccacctgctggcacttgccacctaggcttcccgcgcttggctgacgctcacagtggctcactggtgccccactgctggaggcagcagaggccctgggccagggctggaacggagacgcacttggtacctttttctaggcaggtcttgactgaagcgggggcctggctcctccattttggatgaaggctgtttgctgaaacacactcctgttccttccagctccagttcttgggagtccttttctagatacttcagccagcgactctctgagggctgcgatttttcctgccagattgagaaaaaagttgattctcagtactggaaaccaggcagttttatcgaaaacccctagcccaactcttgggcctgaggatctcaggagtcatgtccagctccactctaggaaaggcaccggctggaaggtgatggacgccaatactatgcaatgctggcaggacagtgctcactggcacaggcctcgggaaggcggcagggcacggcccaccaagagactcatgaaagtctatgctccctggcccagtgattccacacagagaaggcagaggtgccagtcccagtcttataaaaaatagcaaatttcatttataagaacagaagtagccgggcgcggtggctcacacctgtaatcccagcaccttgggaggccgaggctggcggatcacaaggtcagg

SEQ ID NO: 45612 - DNA, 1672 bp, Homo sapiens
cagtgttaagtgatatcaagcagggagacaggtgcgatccggaaaaggttaagtggcattctctatctggcacgctgaaagttagggaggcaaatatgtcctagaaacacagattatctgtctttaagactccggggcccgtggtttatgcgtcggcgaacagccatatcaagtccctggccccgcggaaacggacggcggcagaggcgcggggcgacggagagggcgcccaggtgtggagcagggacgccgccgcggcgcgctcggtctctaagaaccgtcctccccctctcactgaaactgcgacagcgctacttcgtggggtaggctctgcgtaaaggatgctatactcaaccggattctcccactacctgctacaattcacaagaggccacctccgcagaaccattacctctggtttgtacaagaaccaaacaaaaagctcagaacgttatgcgggggcgaccccaatgagacccgccctcagcggtccctgcactccttcgggcccggtgcatcccggagccattcgagacaacacccacagccccgccactccccgtccgctgtccccgcgccggaggaggaggagggggctggcacccgccagacctggtgcgcctggaagaggcggcagctgcagcagcgtagcacccgagaacgctgaagcgacgccatccctgcttgtgcagtcgccaggcagccaagcgcgtgcgctctgcatttgtcccgccgcggccccgccccacgcacgcgctccgaaccctctagtcccctacgccgtctcgcatgcgcttatactcttcgctccggccgccgcggccccgcccctgcgcactgggatccctctagcctgccgcgcctctcgctggtcatctgcgcccctccgacctcggaaagagtcctgggtgcgggattcctggtagccgactcgtcgtctgaccagggccgtgcccgcatcttcctaaggcactggttccggccctggggagactggaattgagacgacagggcctccgctgaccagtccttggacacaacgcggagcggggctgaggggccgccctgccaggcctgcgctgccgtgcttttaggtagcagcgaacagttagcctttgaaccggagcccggggtggaatacggggagacggaggggctcaccacacccacgcttcccggagagggcggcggaggcgcgcggccgccgagcgcgaagccggtccccctgcagccccgggagcgtcccaggcccaccctacggagggtggaggcgcccccgcagcccgacgctcacgccgcaaccctgtgtggcttagggttgtaacctcgttggaaaataaaatacaaaaaatattaaaattacctcccaccgtacaaccctcggtgtctagggttgtaattttaattttttttccaacttttacacagtgactatcaccaaaaaagcgaggtgttttttttttgttttttgtttttggagacagtctcgctcagtcgcccaggctggagtgcagtggcgtgattctcctgcctcagcctctccagtagctgggattacggatgcccgccaccacgcccagctaatttttgtatttttagtagagacggtgtttctccatgttggccaggctggtctcgaactcctgacctcaggtgatccacccgcctcggc

SEQ ID NO: 45613 - DNA, 1597 bp, Homo sapiens
tgtttctgggaacagaacagtctcttccacatgaagaaacgtggcccaggagaagcctccgtctgcatctggctattagctgctcacactgaaaatcaggatgattcacagaaaatgctcttgataaactggacgacctggcaacactgggaccgcaatcctgtagggcaacagtcggtgccccgaagagcacaggcactgagcccgagccagccgggctcctgcagtgctgggcgcaggccctggagcatgaggggccccggacaccacctgcggagggagtggcctgtgggcctcccctggatcccacaggccgcacgactccaagggtgcctgtccagcttcatcctgtgtgatggtggcacccgggcccacaaagggccaccttggcgagcttgcaggaacaccctgtgccgctacccacagccttgggtgcgcagctctgagagcagccaggagcaggaaaggtgggggaggagaagctgggggaatgggggtgcggccagctccagggacctctgatcttgctaaaagggcgatactttggtgagatgggcacgaagaagagggcaaaagaaaacgtgcgctggcgtcacctggccccttagaggcacctggggaaactgaggtggaggatgaggacagggcggtctcgccaactttcggcggtgagatcccgggaagctgcacggcccccggggctcgcgggcgccgaatccgggcagaagccgccgccggtctccacttggccgccccaagccgacctgaggagagcccgccgagggcgcattcgcctcccgccagcccctcgcctccccgccccggcccctccgcgcccggctcccgggtcctggcctcgcgcccccgccccgccgcgcgctggcgtgcgtgtccgccgcgacgcgccgaggccgggccggaaccggacccgcccgccgcccgccgccagccccgccgccagcccagccgcggcgcccacaggcccggccgcccgcgcgcctctcacccgtaaggccgccgcccctgccgtggccccggcgtcgctgcagcacgaagaaggggttggcccgctccgtcacccacagcgcattggccaccagcacctcctccgggctcagccacatcgcggagccgctcgcaccgggccgaggcccgcgagacggaagcgcccgccgccgtcggcgtcccggagcggagcgtgcggagcggagcgtgcggagcgggccggggcggggcggggccgggcgggcggcgccccctggcgggcgtgtggcgctcccgcacgcggcccgagttccgcgccgccccctcagccccggcctcgggcgcgcgccagcctggcctcctggagcggtgcagcccacggcctccggcctgggtccagaacggaacggcccagtccgcagacaggggagccgctgtgcagagcagggcttctggcgttttgaaagctgtgcagtgtgagagaaggatgtcaagaagcagagtttggcggcttttggctggttgcgcgtgcaacccggggcgtgttagcactgcaaagggcgcctggaaagggtttgcagttcctcctaattctcagctttcttttcttttt

SEQ ID NO: 45614 - DNA, 738 bp, Homo sapiens
tcatttcctcatgccaagatttttttgaatcttgaataatgagctaccgttctctgcaaatcttagaacgtgatttctatgaatcagaatccagcaatgggaaaagggctctaggggatacctagtcacgcctcccactaaacttcaaatctctactacacatttgtatatgttcctcaaataaaaataataaaaatatttatttttcttattttgagggaaaactagagtgacacaaatttcagttggtaaatgttgacatttcacaaggtttatatgaatagccaagtagagcagaagacctcttttgggaattgaaattcagtaacctcgcttacctaggtactaagaaaccgaggtgtgagaagccaatatgtaaatatatttaccttgcatttattcacttctttgactaccatcctgtttatatttgcaaagtttcaaaatttaccagatctgtttgcagtgttaaaaaaatttaatgtataatcagtcgcagtactaaataaacagtatttcatcataacagaagggcagtgactccaaacacaagggctttttgatggacttctgattgaagccaacagcacgaagcccttggtcaatgcaccgagcgtggtgaggaagggatgggggcttgcaccccttgtggggatcctccttgtgtagttagcaacccacccatgacagggggccctagaccacctgggtcccacacactgccctgacatcttgccc

SEQ ID NO: 45615 - DNA, 467 bp, Homo sapiens
attaaacaataacagtaaagtctatataaatctttaaaaaccaggaaaataaatccataattttcagacaagtatgcattattgtaaactatccaagaacccataacgtccccttcatactaccacagatccgctaactacatgacaaagaactcactctgctaaccagaggtaacaagtgaaaccacacaatgagtagcctttcctgtcaatgacgtcatggacagggcactggaacagacgtccttcagtcaccaggtgaagggcatgctttagaataaacaggaccaagctcttggttgacaaggcaagaaaacaaaatacttacacttgtattggtacatacagtatatagggaatacttatattccaatgtggaattttaaaattaggtataaaacatagccttaaatgaaaagaaagcttaacaaccaaactaaataacttaataaaatcatttcagagca

SEQ ID NO: 45616 - DNA, 486 bp, Homo sapiens
ttaatccccaattcaatttcttacttattatagctactcagatatgctattttttcttgagtcaattctgacaatctgtatatttttaggaatttgttcatctaaggtgtctaatttgtcagtatacagaaaaaagtaaacatagcaggtttgaactactatccgtcgaaaggcctgcttacaatcttggcccttgggtggcatctgggaacatgggtttggggaggattcccaccattacctaataagagtgactcactgtgagtgtgactatgtggtgagtcctgtgagtcctcctagtgagtcactgaacctgtggatggtcatggggaccccagacatagttaccataaagttcttcacaatattcctttataatcctttaagtttctgtagagtcagtagtgatgtccttttttagttgtgattttggtaaactgtcttcttttttattgttggtcagtctatctaaaggtttgtcaattt

SEQ ID NO: 45617 - DNA, 2129 bp, Homo sapiens
taatggcagatatctcccaaaagttcagcgtgggccaaaacccaaaaaatcatattccacgatgtgcaaaaggtttctttcaaaccatgactaataatttaaacaaatacatgtttacaccaaataatcaactaaacaaagtccttgttcataggaaaacatgacattaagccgaatggtttcaaagacaattcttgaaaattttacctatttcccttttggtcggcacccgtgacctgaaaagccttggctagtagttccgattagtgtcagatcctcataatgtgacattttcaggcgtcaaattacagtaaaactactagggcaagaacaagagccaaaagcaacagggaagatgtccattttccatttacaccccccccccaatttaccacttaagaaaaacggcacgtttttatattagaaaagggccgcatccttccagatctagcgcagccttaagtccgtgatttgaggaacctgccgcttccaaaatacaggctgagacgtcctccccatgaagtagttttgcgctcttgcaccacctcctttgtctacgctgtccctgcaaactcctagctcaatgccctccagcaaacgagctgcctgaacgcaaagatgaccgttccaagtcttttttaaaagaagggaaaaacccagtcacgctcctggagcctggttcccacgggagcaggccgggctgtccacgacggaagcctcgaccctggctggggctgtcggccgggcagcgcgggagagccagggccagagccggggccgggaaccctagtcccgccgcctacgcgggatgcagcgaccaccgcccgccgcccccgggccggcactcacctccgtggaggggcagcggcgccagcacctggccgcggacctcggccttgggggagtcaagcccgtagcgcccgcggtcgatgcgaaacgtgagcggggcgccgcggccgggctcctgcaccgtcacgttgatgagcgccgtgtagtactcctggctcgcgttgtctgcccgtgccggccacaggctgcaggtcagcagggcgagcgcggcgagccgggcagggcccgcccgccccgcgcagctcatcgtccctccggcagccgccgctgctcgcggaccgggctccggggccggcgcctagaggcggggcgggcgcggcccgggcggcggcgggagcgcgcgcgcgcggcctgcgcggggccgagcccgagcgcggccctcctggacgccgcggccccgccgctcgccgccctcacgtccactgcccgcctgtggggacgcgcccatgggccctcggcgagggcggcgtctcaggtcgcacgcgggcgtctcttcggggtcccaggagggttgtagaagcgtgccccctccatccccccgggtcggtcccaccgaatgggaggcgcctcgcaaggacgcggcgggggaggggaagggcggcacgggaggaagcgccccgaggagggtcagcggaacacaaagtccctctcgcgcggctgccgcctgaggcgcgtgtccgccgccgccccgcccccccgctggtctagcggcaacgcgcaggcctaaggcgcagtcccgccccgagcgcatgcgtgccagggcctgtccgctcccgcccgcctgcacgagggcccgggcagccgggtcagccgctggtgctggttgtttctctgtcaggcgtgatagccgcagggcgtggagcccgggagatttgcgaggacgtatggaaatgtgtgagaacagactacaaaggaaaaaaagccataactttaaaagaaatgtttaaaattaaatgtcatgagatttaacattcacgtcatgcggttgacatcatggatgggggatgtctctggcccggacctgcagggacacgagtggttgggaaagacctctagggtagccgtccctaaccattttggcactgggggacgggtttccaggaagagagtttttccagggactgagggagttgaagtggtttccggatgaggctgctccacctcagatcatcaggcgttagattctcgtaagaagtgggcaacctaggtcccaagcatgcgcagttcacagccgggttcacgttgctatgagagtctaatgccgccctgatctgacagga

SEQ ID NO: 45618 - DNA, 538 bp, Homo sapiens
gacagggtaatgggtgtgtgtaaagcatgctgcacagagtttgggatgccagcaatcagagaccaagcgggggtcccctgaacagtgctacaaaccccagggggttgcccagatttcccaaagtccaactcctctttctcctcctcttccttttctttcttgaatggcacataatccccactggtcctaggaaggccctgctcttgtttcattattaacatgctcccttttatcactatttctcactcccattccttgacccatagggaaccattttagtgtgcctcatgcgtctcttttgtttgtgttcttgcaaaatgtgtgttgttgcttaatgtgcctgtgctttttaattattaaactgtattgggttattgatgtcattctgtttctgatcctcttcacccagcactatattgtgttttttttttacttctttcatacatttattgcttttttatattgcaacataacatacataaagtgcaaaaattttatgtttacaactcaaaacgtcttttatgaggcggaaacaccc

SEQ ID NO: 45619 - DNA, 947 bp, Homo sapiens
gttgcagtgagcagagatggcgccgctgctctccagcctgggcgacggggagagactccgtcaaaaaaaaaaaaaatccaatcctgtctttatttaaaatgttgatattttgttcatggactttttcattaactttaacttttaaaaacatggcattaaaatattgcgcacctcgacggctgcgttttccggtctctccggcgttttgcgcgggaggagagtgaggcgctttctcgcccacatcccccgcgggggtcgcgagggctctccctcagctcagccgcgggctctcaggaggctcaggtctggctgaagggaaggattgtttgggagcaggaactataatcagccttgattttaggtcaggctttcgtgctgggaggcccgccctaaaatcaaaacgcgagaaaaacctcaggaggtgggagcagctgaggccagacctgggggagggtccgtgaggggaaggagggagcagatcccaaggcatctcggcggagaaagggacgcaggtcggtgggcgattgctgggggcggggtggggaggagcgctgccgccggaggagcgcgaaggagcaaatctgacgcccagcactcgggacgcccagcgcggcgtcaggggccccctgtgccccggattcctgccgggctgagtgggcggtgccggagggagggcgccccctggcggttcggcgcgggccggcgacggcctcggcttctttttttttttttttgagacgtggtctcgctgtgtctggagtgcagtggcgagatctcggctcactgcaacctccgcctcccgggttcaagccattctcctgcctcagcctcctgagtagctgggagtacaggcgtgtgccaccacgcccggctaatttttgagtttttagtagaaaaggggtttcaccttgttggccaggctggtctcgaactcctgaccgcaaatg

SEQ ID NO: 45620 - DNA, 1789 bp, Homo sapiens
gggcaaatgcgggctggcatgttcaaggcgggcgagatgagtgggacggggcagcagtcttctgggggaggggcgcggtggtaagggattcgggctgggtcccctctggcactgctggacaccgagtgtgcaatgacaaggcaagagaggagtgcgcggggaggcgggaggctgggcgggtggggagggggttcctacaccactcacaccagcacgggccagcaccctgcccagtcttccacagatgcacaccggggtcctgcccaggcgtctgcatacattcacacagcctgacaacaaccctgtccagaagagacatttccccaccttcccgaaggcaaaaccgcggcagagcgagggtcagtgccttggccaaggtcgcggggacgcgaccccgggcccctgggcacccggcgcaggagtgcagctgtctgccccacctccgggagggatggcgcccgcagaccccacgggcaggtcggccgggccaggccggtgagcaggcccgcagcccggggctgctgacagccgggcggaagggggcgcctgcggcatcccccagcacaggggcgacggctgcggctgccagggccccgcagcccccggcccgccccgaagcccccggccgcgcggttccctcaccgcccctccccgcgggcccggcccgagcagccgccgccaggcctagcccgcccgccgggctcacctcgcctccccgccgccgcgccacggggagagggcgggcgggcggactggcggcgctgcgtgctagtcactcctggctccgcggccccggctccgccgccggcccgccccgctccgctccgccccgccgccgccgccgccgccgccgccgcagtgggtgtgaggggcgccggggcgctgcgacccttccggtcccgctcccttctccgccgctgccgccgccgcggcgcccggtctgacagaccctcgcgccgaccaatcagcgcgcggagagcggagcaggcgcggccaatggcgcctggggggcgggccgatggagggtggcgcgggcggggtcgggggccgggtcgggcgcccgaggtcctgggccggggttccgcgggttcttcgcccccgggcctttcagtggcgcgggccgagtggccatggcgctcgggtgcgcgcagtgcacgcggtgagctggagacgcaggcattgcgcggcccaccggctgagcccgctctccctgcgaggggggcgcagctcggtggagagggtggcccggaggaccgggaaccgggctggaggcgcgcggggctcacaccgcggggtccgcggggagccgggcctcgggctgcaggtgcaggcttgtggcggtgaggcgactggagcggcacgggagcccgcccgtttcggggagagcccggggcgatcgcggggggaggccggcctggcgtccgggagcccggcgtgctagggcccggtaggcggggcgggcctcgcactcggttgctcgctgcggcgccggaggaacgggtctatgggggtgtgggtgaggccagaagccgggtcgaagagggggagggggtgcgaagagatggcggtgtgtagacaggtgacccggtgggtcggtgacgcaggaggagactgcgcttggtggcgggatcacttagttgacaacatctaaaaattaggaggtgcggcagggcgcggtggctcacgcctgtaatcctagaactttgggaggtcgtggcgggtggactacctgaggtgaggagttcgagaccagcctggctaacctggtgaaaccccgtctctattaaaa

SEQ ID NO: 45621 - DNA, 769 bp, Homo sapiens
ctgggatcttgactctggaagactccctggcccttcccagcacctgtcttctgggcctcagctcccatcaacaacgtggtcttggctcaggcccctgactctccctgcccccgccccacgcacctccaaggccaccctctgtccaccctgcctccacctggagcccccctgtggccgcctgctgctgcactccatcaagacatcacgctccggcctcagactgctgggctctgagcctcgctggactcttcttggaggggatggaaacccagtgaagatgggatctgggataaaggaccatatgtgtagatgctgggcatccctggccagggtcccgtccccgaccccaggcctgtgcctcccccactccccaacctcccccagtcagctgcagttcgtgttgccttcaccctcacaggctccagcacttctgacttccacacacccagctcaataaacccaaagtaaacattccctccaaaagtccctgaatggtgtctgtcatcctgggttgaactcgtgcccatctcagcagcaggaattttgacagggaaaggaatgctatgggtcagccttcaggccttggccccaggcctgttgcagggcacagaaggggccatctggctggaaccccatctactgagagagggacaggaacgagccctaagggagccaccataagagggagtggatactcaccaaagatgcctatatctgctgcgtctcctgcaggtgcccctagcgagaggtgaagccagctggacttcct

SEQ ID NO: 45622 - DNA, 1002 bp, Homo sapiens
tggtttgagcctgtgaggcagaggttgcagtgagctgagattgtgccactgcactccagcctgggtgacaagagcaagattctgtctcaaaaataaaattttaaaagttctgcaattctgcataaagataaatgctatttgttcctgggggctggggtcaccagggaggcttcctggaggaggaggcagggctgaggaatggatggcagcagagagtatttgtgggtgaggctatggtgctgctggagaggcagggtgtggcagcttgggctggggccagcagtgagcttggaattccccagggctttccagaagccagaaggccggggcggagtgggttgtccaagagcttgtcttgtcctcttgccctggccacagccgggaagccctgggcaggcgcccgtggatagctggcacgctcagcctttggtggagaactgaggtgagctggaaggactaatgggagggaggagaggtgtactggggccccggggcaaggccctgctttgcactcaagataagaatccagggctctaaggggaggtggtgagggagggagccgcccgtcccgccgtattcaaggagaaagacacatctggggtcaaattagagagctggtggggactgttttctggtgctgagtcagctccaggaggtcccctcttccccactggtccagaaagtctgaagcaggaaggtggaaaaacatttcgtgctcagggaggaaacgtcttcaccccggtttacaggtgaggaaatgggctcagagcgtggctaaagtcccccaagggccaggcaggcagggcaggtcggggtgcccagggttgctgccgctgattctggcctgggtggaggaggggctgacggcctgtgctgggacagggacaattgtgattattagcctggaggaaggggggcttgaaagtcaggaaggccacgggagtcgggacagagaagctgccgtggcttaaaagtgtcccctagagttcctgcactggcagc

SEQ ID NO: 45623 - DNA, 1340 bp, Homo sapiens
agagcaagacaccgtctcaaaaaacaaaaaaaaagtggacaacctggggcggaaaaagaagtagatgaaaaatggaggagcgctaaggagaggagaaaacagaagtgccaaggcaggaaaggagcgaggagagcgggaacagaaggagacgaaggatggacggagaggaagggatggagggcggcaggcagggaggcagggcccgcagcgcgccgggccggtccaccgctctccagcgcgggggtaagggggcggggcctgggcagctgcgtgccgggagcgacccccgcaccgaagggcggatggttgtgcccggcgacggcgcccaatgagcggccaggatgttggagcgccggcggcggtccgggcgctcgctggctgagggacggcggccgccgccatgatgcttgtttgctttcaatgaaaacgaggggggcgcggaggaggaggcggcggcgtcggtggcggcggcgacggcggcgcggaggcgaaggcagcggcgggcgcagcgaggagggcgaggccgggggccgagagggcgggagggcgtagtggcggcccgtcggggcggctgaggcgggcagccgaagcagtggctctcggagggggaacaaagagcagcgactaaggcggcagaggagcggcggcggtggcggcgctgcagcagcgggcgggactggtatggtggttccacagggcagaccccgctgcactcacagggaggaggaggcggcagcggcggaggaaggcggcgcaccccgagaggtgagcgaggcaggccggaggcccggtcggggcgccgctcctctctccggccgcgcacggaccgccccccgtcggccgggctcggtcgcgggcaactttcgtttcgtgggcggcggtcccgctgctccgcaagctggcggctgttgggggccccttcgacgcgccgcgatcgcgccccgccccgggccgcgcccccgggccgagtccctgggaggggggcgttgattgacggcggcggcggcggcgcgcagaggggagagggtcggcgctgggctcccggatcccggccggtcccggctgccgtcgtcggaggaggcgagtccgtgtcccgggactcgtggccaagatgggtggcaacttttgagaagcgcctctgtgggtggcgcgctgtgtggagtgtggagcttcgcgctccgtggccacaattactgtcaagcgggaaaccaactgcttaccccctcccctaaaatgtttttaaaattcagtttaacgcagattttgagggagaggacggggtggattacaggttaaagaagcacttggcatgcaatgaggatgcttattttatagtattg

SEQ ID NO: 45624 - DNA, 1816 bp, Homo sapiens
actgcctggatactgacgacagtgacaatttccctactgccccgaacagtaatgagtttcccttgttaacacaggccactgaggtcaggcataccgcagtgcttctaacagtgagaatgagacacagaagcagggaaatgggtgagctcaatggtccccagaattgggaaggaccaggacgcagtgattgctgatggaaggcagatcctggatgatgtgagcacgtaagagcaaaggctacacggcctgaaaaaataccgtaaatgactgaaaataaagctgggcaacatctcagccagtgatgttctaaaacaaaacggcagacccactacagcagcaagggttaaccaaagtgaagcttcagccttcagggagccggccagccacagtccctctacttcagagtttatcagacgcgggcactgcacgtcccggggctctctactccacacacgttagcaaacaggaagaaaagttttcttgccaacttattatatatatatttcaacactgaatcaacatttcctttctgctgaggagaatcagcctctattaacttggggaaaggatgctggagtgaggttaggggggaaaggccactccccaatcccaccccctccctgccccgcacgcacggacgcccggggccgagtttcacaacatcctccccagtccgcggagcccgcccttcctctaacagctggaggcccgggattccgaaagcagaaggcggagttccaacctctcggctcgggaagggactaacgcgcagctggcaccgggtcggaccgggccgctccccagccaagccccctctcgctagcactcatgggcaccggggctttggggcgacccgacgtcccttgggctccctctcggcgcccgcgaggcctcccccggtctgacctccgtccccggacacctactcaccaggtcctcccgacgtcctggccccgaacttggcctgctccggggcgcagggagcgagcccggtgcccaggcgcgtcccaagcgctgccgcggccgcctcgcctttcgactcgccagccctttctgcggcgcgccggggccggacggccgggcgggcaacgtggcccttccccggcaggcggggcggggcggggcggactgaggggcgtgaccgacagccccgccgcgccccgccccccggccggcgtccgccaggccccctcctcctggcccgcctcctttccccgccgcttctcagtcaacccaggacccaagttttcccaggaccccaacttcgggagtcggctttccggctccctggcgcaaccctgagggtggacgcccgaccccacccctgccctcggccctccagcgcagctgcccagcctggagccgcgcctgaagtgggcccgcagtccaggaaaggcgttcaccaaaccctaggccaagggctgggagccagtccccccaccccaacccaggggaggctgaggagcccgggtgggagccccagggtcgcgtggggcagggacagaacaggaaccagggtgcccgacggggggccggggggaaacacctgtgccaaagcaagccggggccagctgtggcttcttcccttttgtttttccttggtgggtggggaatgagagcttcagttctgagtaaagaaagcgaagagagacctaccagcaggggaggcccaccagccctaggcgggaaggactcggtcacaagctttggcggaagcaccatggaaaagcctagaacgggtctgcgcccggctggtgttttaaaggggaggaaggtgcggacctgaagaggaggtggaggtggacccaggcccacc

SEQ ID NO: 45625 - DNA, 2140 bp, Homo sapiens
aaagtaaggcataagtacaggattttcagtttgcagatgacctcactgtcacccatcctcaaggaacatgtgaggcctaggtgttactgagctagggagaggcagagacatgccagaagccaggcctcctgccctttgcccaggccaccataccctactgtctctcaaaattcccaacactgtgctctacccctcctttctgctgtgtgttgtccctgggaaaagcaggcatcttggcacaggtaaattggaattgaaggagggagcagacaggaagtgagaagataaagacaaacagggctgcttttatagggaatacagcctgagaaaatacaaagggcgaagagatgtctggaaaaaaacgtcatcttaaggagcgggagagataactagcatatggcacaggaaggtaaagaccaccactcactccaagaaaagtgcctagccagacacctgccctcaaggcttaagcatccttccaccccctctttaatcagctacctcaaaggggcacactgaaattggactggagagccataagggccaatgcagtatctgcaagactccttcaatccaagttctccttggatctattcacctgttctacaacttgatgatcccaagtactgtttaccaacaagatgatgaaacacattcaggggcaggcttttcactaaggacatcttcttaggctgttgccagcacactatttcaagaagaaaacagaactcctgactcagagttgtttctgtgcttttaaggcacgtagagcaacatcgatgttattgtttcctgtgtacacggccctggatacttttcaaaatccttgtttcatttgctcctcgtaacaacttgtaagggacctggaaagtcagttttcccccattttgtaggtgaagagaacatggcctgtgtagggttgtacactgactcaaaaagtcaaagctagaacacaagtactccttcctgacccccaaacctgtgttctgttcctctgctcttttcccgagctttcatgggctaagctccccttatagaagtaggaagggagacaacttaggaggttatctagaccattcccgccttctccccccaccagcagtccttttcagttagctccccaaaacagagcagctgcctctgcctaggtaatccattccagtcttaacccagactgacttggaatcctattatctcagtgttggaagggcctttaaaggtaatctaatccaacctcccttcagaagtcttcaattattatcatgttctccttggcctaacctcacaactgccattgctcacaatcccttacaaggcactcatccagcttgggtaaggggaagttgggaacaagtctatacctggacagagtaatggagaggtgtagcttccagtgtactcatctggataagatttcctgaatagtagcctccgcgaactcgccagctcaacaccttctgcacaggcacagcaagacattaagtgggaaatgagacaggagccttacctttcttctcttgtctcagttgctctccaggagatcatcaaatccccattcagcactccattttcaaaactgagaatcccaaatcagatccaccaaagtgcagcttctctcttcttatccaggtccaaagtccatggctgagctgaccctgacggggaggagtctgggggggaaggggtgtgtccaggcccctccccccccactgcagacttcagtgcccctctcaggggtccgttacctcccttcattcagctgccttattaagctcagagtctggtgatggacagatcccagatactatcccatctcttgctcaggcaggggaagttatccactgtgagaactggcccatctgtcttgtgctggggctcatgagaagaaacaggccttagaagcggcatggcccaggaggcagatttctgtgttaacctgcagaacatttaaacattataacgctctctaatctagatacccaaatagagtcctaaaaccttctagtttccactccccacctaagagtccatactaggctctatcatcaaaacaccttcgttaaacactccgcaaggttatacaaagcacctacttaactcacgtatcacacgccagaacacagtcacctcatcaatagtg

SEQ ID NO: 45626 - DNA, 2469 bp, Homo sapiens
ggagactcttctaagaaatcgagaaaagaacgccctttctcctgccctcctgtctaaagcgcaacataataatcgaatctcccaagcttcttagggtgctgagtgttttaatccaccagccctcttcaactagttaataaatcctttccagaccgagatgctggcatcttccacttgcattctttgctcctttaactaagctccccctctgcttgcaaaactgtgccagagatgtaattcccaacctctgttaaagtccttcccggggctactcccgagaacactctcctggaatgtttaaggcccaagtcctgcttgcagcagccccacagtgttcccatttctcagcccgaaaacccacccctgttgccccctcccctccaagtttattcgtaaacacacacacatccattctctctctcaacacacatccatccacacacactctctctctcctttccttcctgtaggggcgtggcgtccacatgacctccaccccctccaagaatttaactcctcccacccttctccccggaaccccgtgccccgtgttcacaagagaagagggtgacactgcgacccttcctggactctgacccccacccgtccgccctgcggacgaccctcgctctaactgcgccgggtcgttacctggttcccgcccgccccgtctcggctaggagccgcggcccgccgcgggtcgcaatccaggccccaggcccgatccccagcgctggcccaggccccaccccctcgacccccagcggcccggccctcccctcgcactccttcccccctcccaccatccaccgcagccacttccgcccgtcctccggaagtgggccccggcaacgcagcgttccacatcccgcccatttttctacccaacgtccccagcccgtcaccaccgccaccacgggagcgagggaggtgggtctgcagggcctgagactgttctacagccactgttcacagggctgaagaacaggtgtgggcagaaccaggttgtgagaaggaagccgggcgcagagtagcggccgtacaggagggggaggggcagaagagactggccagcagcggaagcgcgcggcaggtggagccgcgcgggaagaagcacgcatgcgtcgcgggggggttggcccttggggtgctgggcggagcttgggaggggcgaggacgctgaagtaggggcggaacctgtgcggtgcagccctgccctctccctccgcccaaaggtcgcccagcgacggcctgcttgacctggtttctcaaaaagggtgaccccccccctccgccccacgctggtcgcgggtcctggcgagaagcctttcggaaagcaccggggcctgtgtgttcccgcttcctcggacgcgagctctgtgtagccgtggtggaggaaggttttgtttcgttcatcgctgctgtttctcgctgcctctcttgacgaggcagggcccttgcagggtgcgcccgcgctgccctctgacaggtgctgttggtacctgcggccgggcccgccgtcgccggcgcgtgaacggcctgcccgaggctgccgggaggagggctgcctggccggcgcggcccttcccgtcgtgccccgggctcctcggaagcagcctcccgctccttcagacgtcggactcctgagtttcgaacctgccccgcggtttccccctcacgctgaatccaggggagccgctactcgtttttgaagttcctatgcagccctctcccgacatgttcgagaatcttgccggactggggatggatttgcagcctccgtgtttgcccccacggttcgaaaaccggaatctaggcccggtctcctggcctgtgttctgtcgtgggatttctccagagcacggactgacttaacatttccattactgggaatgtaatggttgctgcgtcaggactctggagatgatttttttatttggaacgatataatttttggaatttccttaaagggaaaaatacatattgcttaattatattgcttgggatatattattgcaaggaagaagaaaataagaccctttcttcccccaccttcaaaccttctccgcccacctgtctttcccatgggcattaatggcggctccatttactcaggccagaaccagaagagccagcttcactctctcaccccctctacacaatctgactagaaatcctgttgaccctaccttcaatctgtgtctaggatgcaacacctcaacatgtccacaccccccttcatccctcacctgaacacctaggtctccctgccctccctaccctcccagtcgctgggtttccgtacagcagccacagggatcctgtcgtttctgtgctccaaactgcacagcggctcctcagtttacttgaaataaaacgccaaagtccttacaatggctgcagagccggacaacccactggcctgcctagctgtctgacctgctctccccttcctctgttagctgcatt

SEQ ID NO: 45627 - DNA, 2386 bp, Homo sapiens
cttccacacgcataccaaagaaaataagaatctcaaggttggaaaatcccactttacttcaagtgaagtcactgggttgtccccatgaaatatctccacaatgggtgtgctagacctttactctctgtggcaccaccaagaccccctcaccctgccagagccctctgaagtgtactcagaatggaggggctggaagtggggccagtggtcctggtagtcagcctccccttctgacacaagaattatcgtggaacagcttgtgtgaccgatcaactggtctctccatctttaagccattgtcttgttgactctgttactgcagagtttggggaggtctcatggcttctcgcatcctatttcctgagcttccctgaagccaacttctggccactggtatgtgatgcgagcacagtgcctcctcctgctcctccaggaagcttctgctgattgaacgcaggccagatggcgagatccggagcaaccttcttagatcaagggaagaaaggggcacaagaggggagtaggtaacaagataaaaggagctccctccctgatgactacagagccatcgtggcagccctgggcctccatttcagacgttcatcttgcctaagccaccaccatcagggtctcagtcagtcatcattctcatttactcgggtggctgggtgagggcggaatactaccttccagctgtctgagattaagcctaagccaccaccatcagggtctcagtcagtcatcattctcatttactcgggtggctgggcgagggcggaatactaccttccagctgtctgagattaagcagaacagcagctaaagcagtaacagcaggtctccttcagcagcttgccacagggaagagggtcccgcgtgaaccgaactcaacttccacctgcgcagaggtagctaccatttgcgtagaggtagctgggtctttaaggttagagggaaggcgcagggagggagagacggcgggtgggggttgaacaaagtggagattcacaaaagcagactagggcgggcgacgtgatcagatgacctgtgcgggcggcagcctcctgccctcctccccttcgtgcgccggctggagcgaagagttcttttgacagccgtgagcttccccgccaggaacttactggggctgcatcaccctagaaacgtggctttgggctgtggaaacgctgcctctgtggaagtctctcctcgcgggggtggacgggtcgctgcgcgcccagcgttcttctgcggttctcacagcccgccgccgccgccgcctcggggacctttgcggggaggcctcaggtcagcgccgcccttgcgatggcgggagagcagagcggccccagggcctctgagctccggccccggcacgtcccgccctctcctccgcttgcgggagccggggcgcctcggagggaaaccttccggacacaggccgggagaagaggggccgtggcgccatcgcgcagcttcctggtttcggccatgtttttttttttttgagacggagtttcgctctttttgcccaggctggagggcaatggcgccgtctcggctccctgcagccgccgcctcccgggttgaagggactctccggcctcaggccgcggtgttcttgtaaattagaaccggcctatgcgccaagcgcgggtctcgcggctgcggagagaggcccagcagggggcggggacgccgggaggcggggcctggccgagctgcgcacacccgggtggttctggctacgggtacccggacctgcccaacgaccgttctccattcccgacctccgcaccctacccggtccgcagggcaccttcctcctctctctcaggcacgtcctcgacctcagttgccacgtgcacatgctggtgccttccaggtcggtctttctccaccagactccacctggaactttcttccttttcgtcctgtgctggcctaacccctgctcggcctcggccctcagctgccggctctaacaaagcctctgtctttcccagacccctgtgaccaggtcaggctctgctccctgcgttcctctctccttgcttccctcctcctcccctccccagaatcgcttgaacctgggaggcagacgttgcagtgagctgagatcgcaccattgcactccagcctgggtgacaagagcgagactccatctcaaaacaaaaaacaaaaaacacaactcttgctggctccttgattttagcccagtgagattcacttctaatttctttttttctttgagacagtctgttctgtcacccaggctggagtgcagtggcgtaatcatggctcactgcagcctcaaccttcctggactcaagtgaaccttccacctcagcctcccaggtagccgggactacaggggtgcaccagc

SEQ ID NO: 45628 - DNA, 1652 bp, Homo sapiens
gggttcccgcaggctgtcccctgggtctaagaaactcttcgaccttcctctccctacctagttaactccttttctgcttgcaggaacacgcggcaggtcgcctcctccccggtgcacccgtctgtatgcaggtgcgcttccccagatgagggctaggacgcacctccggggtctctattcacacctgcagcgggagcttatcatcatcactcaccgaccaaaaaaaaaaaagaaaaaaaggtggtggggtggagcggaggggaagaaggtcgaatcagatcacccctagaggtctctctgccctcgcaatcactctcaagtcctagagtaccaaacttaactgcagagggagcacgaaatggtgggtattttgaagcgctaatttttagggatcccctcccatccaaaacagggatgaatagttgaggaacaccggagcggggccctggcccttctcggaacgttgagcagacctaacatgacgctggtccgttcaaacgtcgcagttgtggcccacacagagcccagtctgttccaggggcgcgccctgcacccctctgcctgcccgaggtcttccctcccctccgctccccagaaacgcacccactgagacatgtgcggggagggggcacgcttactcccacatcccgcccgagacccgcggagcagccaagacccggccaaaaaggggagggcgtggcaggcaagggccgggggcgggagcgcgggcggccgcggactcacgtactggctgtggcggcgccgcgggaacccggccgccagcgggacaaaagcgcggaccgcacggccggaagaacccgcgccggccctggggcacttccgcgccctctctgggacgctggaggactgactcgatggtccgggccgacggcgccggcgggagggagggaggggagcgcctcctcggctatttattgaggaccagctgcagggcgcgcgctccaggcgcggccaggaggccgtgggcggggctttctgtttccgtgcccattagcttctggggtaggctgggggaggggcacaggtaataaagtaaatacctgcctacctggttcctgaacacgtgattcattgccaggtgtgggtgcggggacgttcccggaagtgggggcctggcgggaaatgggggaatccgggaggggcgcaggacagcgctgggctggggacccattgccttctcagctggttgggggctggcccgagagcaccagcccttcctggtcgtcagcaccagaagcgcccccggttaggcactggggatgcggagtgggagcgcgcccctggagccgtccctgggaccgggccacgctcccacccggggcgccagcttggcagcgacctcgccccctgcccaccccaccgccggtgtcggcttccaaacccagggcctaaaatgactttgaagaccttttttttttttttaaattaatgtttgtgggtacatagtaggtgtccctatttgtcgagtacgtgagatatcttgatacagacaggaatgcaatgcgtaataatcatatcagggttaatggcgtgtccatcacttcaagcatttatcctttgtgttacaagcaatcaaattatattcttatttttaaatatacaactaagttattggctatagtcagcctttt

SEQ ID NO: 45629 - DNA, 939 bp, Homo sapiens
gcccaggctggagtgcagtgctgcaatcatagctcagtgcagtgtggacctcccgggctccagccgtcctcccgcctcagccttccaggtgctgaaacgtgctttttttgtgtgttcatgctcattaacaaagctcaaagggacgcatggaggaagctctgaattatgatgagaaataaaataccgccctgtgtggtggctcattgtgatggcacaggtatcccatgcaggtttccgtagtgtagtggttatcacgttcgcctcacacgcgaaaggtccccggttcgaaaccgggcggaaacacctccttctgctttttacctcattatctcagatttgttacactgaggacttgcctacaacactccaccgctatctccacctggttaaggaaaaaaggctatcaagggtatttatacctttgcctttccgcctcaaccattggaacctgggacgaactgaacccacttcacttgctgtggacaccagcgccgacgaacttcgcacaaagcccgtccactggacagctgcgcgctgccaaatggaatccagatcccgagcaagggtgcggcccagggagagttccaaggaactgggggacaaaatgggcaaaccacaacaagctggcagcggtgggattcgaacccacgcctccgaagagactggagccttaatccagcgccttagaccgctcggccacgctaccttcctccgggggttcacctgcatcttttccttccttataaaacatccccagggttcccgggccaacaaggcgttggggcgaatccacagggcatcgcagaaccaccgccttccagcaggattcgcgggccagaggcaccagctgggaaacggctccaccagcgccccagcagagaagattcgcgacgcgcaggcctcggaatttgctttgggggccactcagaaagtcagaaa

SEQ ID NO: 45630 - DNA, 1891 bp, Homo sapiens
tttatttttcattgtatttgtttttgattttttgaagtgagagtgtcgaagtcttcccctgctctggagtgcattccccaaagagggtggctttatgactggccttcctaaagcagatcctgaggcctgggcattgagaatcctgtgtcagggcactggtggagccgtttcccagccagtggctttggcggagcggatcctgccatggtcctgccctgtggattcgccccaactccctgttggcccagagccccttcgcacgcttcataactgaaggaaaatatgtaaatacccagcggcaaagaggtagcgtggccgagcggtctaaggcgctggattaaggctccagtctcttcgggggcgtgggttcgaatcccaccgctgccagtttgtggtagttttgtcacttttgtcccctatgggttacaaaaggagtaatgggccccacacatactcgagatgcggggttccatttggcagcgtgccgctgtccagtggatgagctctgtgccgagcttgtccacagcaagtaaaactggattgagttcacaggtgcgggtggttgggaatggaaagcaaaagcgtagatgccctcttctctttgtgccgctgtgaccaccaggtggacatactagtgggatcttctaggttagtctccagtgtaataagagcgtgtaatgagataataaccgcttcggggccgcgcgcggtggctcacgcctgtaatcccagcgctttgggaggccgaggtgggcggatcacctgaggtccggagttcgagaccagcctgaccaacatggagaaactccgtctctactaaaaatacaaaattagccgggcgtggtggcgcatgcctgtaatcccagctactccggagcctgaggcaggagaatggcttgaacctgggaggcggaggttgctgtgagccgagatcactccattgcactccagcctgggcaacaagagcgaaaccccatctcaaaagaaaggggggggaaaaaaaaaaaaaacactgtggcatgtttccgcccggtttcgaaccggggacctttcgcgtgttaggcgaacgtgatgaccactacactacggaaacccacacctacctctgtcgccataatattgtctgctagcagctactctccgggtacgttcgacaagtgatccctagctgtaaaaggagagcccccacaaccctcaagagcatactctcacgtgcaggtctgtgcccaaagtcttcacagcaactgttgcttccgggacggctcgcttagtctcctatccacgattctttccaatccccagcactcccggaaatcttggtgatgcctccgctggacatctttcgggatcaaaactgtcaaggtaacacaaaatttagttgaaatttaaaaagctggctcatccaggatttgaacaagaagaacttcagttgaaatggaaaaaaaaaaatgaaaaagtgggctcgtccgggatttgaacccgggacctctcgcacccaaagcgagaatcatacccctagaccaacgagccggctgtctagttgctcgctgaatcttttcatgattgtgttcttcatggctcgattcaccgaaaaggcggatttccgtctggcagcttgaacccattctcaaggtcttatagtctcccaagcccaacttgtccccgctgcccatctccgcgtctgccactaattctcagccgcaggtagctccacacagggtaaacgctccctatgtcctgtgtcctctggtctcctggaatccgaatgagcgcctccctgctcgatccactcgagtagcaggcaggagcgtccatccgttctgcagcctgggcgccccttcccaagcgagtccaagaaaggcgcaaatcttgaggcccaggggcaggacac

SEQ ID NO: 45631 - DNA, 2024 bp, Homo sapiens
gtgcgcggtgcggggaagacggaggcgggagccgtcccgagacccccagggggccagtcctgcacctgggcagcgcccccactgttcactgaggacttgggctcactttctacacttccgttaacagcaagaataaatcagtcagaaggccagcataccttagttatatattttgtctaaaataaactaaaattttgttttaggctgaaagcgaatgtgacaggtagagccgttactcccgggtcatgaatgtggccgtctgcgcttttccgtgttaactccacaggaagaaatcagaccttgcagcacggaggcggcggggacccgaaggccgagggcgcgcagccgccaagcgcagagccgcagaccagagcctcagcgcgcgcgtcggggaacgccgcaaacaaacgcatggcgggaaggggcgcggtagtgccatcgtctccccctggagagagggaaggagacacgagggcgagtccctagctggagtgggaagaccggagagaagcggaaagacgctcccggggagcgcgcagaaggaagtgagcggggtcgtggggagagggcgcgcggggcccagggaacccgtgatggaaaaggaagcccgcagtgggtctgactcttcaagagataaggaagtggtaggaaagtagccttgcgcggtgggtatcttagaggcaaaaagaaagtgactccgccaggctctggcctcccaggaaggcggaagtaggcttgcctatcttccacttttctatctttaaggaaagaataggaaaagacggaagcaggccccagcgagatttgaactcgcgaccctggtttacaagaccagtgctctaacccctgagctatggagccggctgttggtttccttttgacacaaaagcagttgacgctgtcgccggcgccgcgcagccgcagtccgctgaaccctcggccgagttctgtggctgctggacccaagctcctcccacggccgcagccatcttgcccgtgcgtccgtggcacggaacggccgttagtcccggcagagggctccgcgaagacagtgccgtcgttgggcgcgcgcgcgggcgggagctgtcggggcggggcggcaccgccgagctccgagctgtgaggaccgccccgggccttgggcggggcgggggccagggaagggcgtgcgcaggattggggagcacgttttgcgtcttgctgtgcgtgaggaagcggggatccaggtcaaggctatggaaaggtcagggaagggtgtcagtgcgcccgtcctgcagggagtccagatccgagaggttagggcgggacctggggcgagctgggcggtgggggaacagtggggtcatcaggaggtggaggcccagcgggagtgtggcgggggaggcggggaatcaggagggccaggtgtttggaggcgctggggtgggaagggtccaggcgaggttgcgggtgggtgccagccccgtctcacatttggatgaagtaggaaaaggcagcttttagggtacaccctgacatgttctgtcagggcccttaaagggcccacgggccggaggagaggggaaaaggatgagggctcagcctggcaaaggacagaaagtggtgggtgtaggaggtggaccttggtctggtggcctagcctgccctgtgctccctgcaatgccgggtgacttgggtcactgggcggccaggccagaggtgggcctctaggtgccccccattctggatgctgagggtccctgtgagggtctggcggcagaggcctgcgcttatgggtcagcagctaggactgatgggttgaataagaagggcccaagttaggccagttgttctcacagacccagaggtccctagagtttatgatgcccagagtctaggagagggaaatgcacacacatgccctcgaggacaccagcatcctgacatccaagttactgtactgccctggttagcaagaaagaacatctgttcccttctctatgcaattgttacagtaactgttgttacatttcttaagatacata

SEQ ID NO: 45632 - DNA, 1814 bp, Homo sapiens
ttattgcctcaacccccacttttaaaaaacaaaacgtagcatcctgcacaattttcctttcttctctttttcaggtcacagttcatttttggcatcgtgcctgatgattgtctctcctttttccacagctgctcccaggtgcttagccgggcctaatcctctctcttggaatcccttggtcaagacccgctggtttggagtcagcggaggacgctggaacaactcttgccctgcgatgccgggtttttgcagcggctgagacccagcgcgtaccggttgccttccactcccggtgtcctgagttaagcgaccaatagggaccatctgggagagctgctgagagtaggtggggatgtagctcagtggtagagcgcatgctttgcatgtatgaggccccgggttcgatccccggcatctccagtgtagttttgcacattcaattattgttttcgattttcctttcaaattttgaaatccagcatgtttgaagagctccaagaaaaaacccagagggtggagtctgcggagtagaaaaagaccgcggcggcccctgccctcctctgggccccattgtctttccctcctgttttaaaatccacacggtacttgaccgggtgaggtagctcacgtctgtaatcccagcactttgggaggccgaggcgggtggatcacgaggtcaggagtttgaggccagcctgactaacatggagaagccccgtctctactaaaaatacaaaaattagccgggagtggtggcacacgcctgtaatcccagctactcaggaggctgaggcaggagaagtgcttgaatccaggaggcagaggttgcagtgaaccgagattgcgccacgacactccagcctgggcgacagagccgcagttcgtggtgaaaggtaggcccattttttgagagtcttctctgtcaaaaaaaaaaaaaaaaaaaaaatccacacggtgagagctccagtggcgtcagggtgcacgtttctccatctccgtgccgtgagcttcatcgcgggtagaaaatggcttggtcgctggtagggtagaaggggcaggaaacggacgtaagtgggagggacggtcaggcactgacggcagagtttgaatttcccaggagccgaggcactttagtagttttatcacactccaaataaatccaagttcaaacccgcagttgaatacactccgactctgatctagaatgaaaaattgttgagatacggtcatcgggcgcccggctagctcagtcggtagagcatgagactcttaatctcagggtcgtgggttcgagccccacgttgggcggcaactggtcgttttagtcctaaatctacgactactagccatacctaaaaatatattataagtagaccagctcttaggaaaataatctgctctgaagtcttgcatttctgtgtgtgtaatactcttgcgggcgctccactgttcattatctacccattatcttgcgatacaattaggatttaaagctgtggtaaaatatgcccaacaaaatttaacactttttaactgtacagttctgtagcattaaatacatttaaatggttgtgcatcagtctccagtcctttttcctgtttcccagatgaaactctgaacccattcagcattaactctccattcccctctgcccacagacgctggcaaccaccattctactttctgtgtctttgaatttgactcctctagatacctcatataagatgaatcgtgcaatatttcctttttaaattgtcttatttcacttaatgtcttcaagattcatccttatatttcctttttaaattgtctt

SEQ ID NO: 45633 - DNA, 1563 bp, Homo sapiens
tctcctgccagtagcgctgtcctagggatcccgcccacccctccggcttcttctctgaagcctttgcagcattttccctgagattgctgaagaggcccctggggatcgggctcccaactcacccgccgcgtcccacggcccgaagccgacgagctgcaagtgaggatgggtgcagagggaggccgacggtcacgccttggagaggctgatggtcctcttgaccgccctccaccgccactgcgaacccaaaagccgtgtcagtgctgcaggcccgcccgaagtggcgcagtcctcctcctgaaccagcctgtatttcacttgaatttctctgtgccctgtttcttttccgttccctgtccttttgctccgtcctacgtgttccgcagccttgtgtgacctgtccatgcctcagtggcctcatctgtaaacaacctcccagaatggttaggttcctctgcaggaagcccagggccacacctgcagactacttgatgtgtggtacacgttgtagttaccggcatcactattggcccgccggtgcacaccttccacggcgtgaacttccaccaaggatttccaacccgagccttcttgcactttttaatcgttcatctgtcattccgtggcattccccggcggctgactgtatttgatccgccgggactttgcaggaagaccctaataatgaccagtaagaccacttacttctcaccctcatattacagacgtagacatggaatacgcaggttgaagttaattggcaatggattggaaaatccggccggtgtctaagtgtagcaaaacttgtgaacgtttatacacatagactccacactaagaaacctttttgaactggaaggaaaacacagtcttgtttccgcccggtttcgaaccggggacctttcgcgtgttaggcgaacgtgataaccactacactacggaaacagatgcggagaggttactctatgacttttataagtgttatagtcaacatccaggtgtcggcttcacccatggagtcatggcccttagatccattcttccccagaacaccagtctccttgtggccctgcgtaatgccgtttgtcaaactgtaaagcgtgacctctaagggtaccccagtcacttccagcaattaaaagcaaaacaaggccgggcgcggtggttcacgcctgtaatcccagcactttgggaggccgaggctggcggatcacgaggtcaggagatcgagaccatcctggctaaaatggtgaaacccccgtctctactaaaaatacaaaaaaattatccgggcgtggtggcggccgcctgtagtccactcgggaggctgaggcaggagaatggcgtgaacccggcatgcggagcttgcagtgagccgagatcgcgccactgcactccagcctgggcgacacagcgagactccgtctcgaataataataataaataaaaacaaaacaaaaaactagcgagcatcgcgggaggaaaggcaaatgtaccttccaaggcttaagactggatacgcttccctagtggttccttttcttccagggaagacagccagag

SEQ ID NO: 45634 - DNA, 3076 bp, Homo sapiens
agggagtcgaaagcaggtcgtagcgagacaaaggcggaagcctaaccactaaatctcccagtaaagtgggagtgaatcagataggttttgacgctcacgaacgcctggggtcgtcctgcggtctcaccccagtttcgataaaccacattgttccctccagcacagcaagtctcacagcaagacgggggcaggccgtctggtaaacataaaatgcctaatatgtgctgcccgtgggcgagtggcctacagcaaagggtcatgcatgcacgatagcccgcggtgctggcctgcaggaattggtccacaggtacccgcctctcattctttctttgagagttagcgagggtgcaaacgttgtgagaattctgctcggggccttccacacacggatcggagaacaccaggttagtccaagttctaacacccactgttggtgaatctgctacccactaggtcttggtacagagaataccatttgtgcacttaggtaacacaacttgccttaacctttccaaaaagcgaaattacgcccaacgtggggctcgaacccacgaccctgagattaagagtctcatgctctaccgactgagctagccgggcggccatgtctgtattctaactttgtctctgaagatggaggttaccctcagaggtgtaagcacgtttccactgtgcaaatactaagaagcgcctgcgcctggctctgttctaggcactagagccgaggatctgaaatctacggattcctgtacatgtgatggctgcataggcttcagaagggaagagcaagagattaggtgaggggcgagacctgaatttacttgagtagtgctctccttcagttttgccccagtccgtgttcctccgaagcgcagggacacacatgtccttcctgccacgtaaggccggcctcgggagagaatctcccgaacagaccaaaacgtgtttccgcccggtttcgaaccggggacctttcgcgtgtgaggcgaacgtgataaccactacactacggaaaccaccttggctactttcctgccggcatcgtcctgaagacacacacggctgagacggccgggatagctctaggcaagcgcccttgtaggacaggcccggggacccctgccgcggccggctgagcggtgtccaggttctggagccggacttgtccaccgcagccgagtccgcaggtcctgtaatggcctagcatagttcacccacgagggttcgtggtttttggcgcgtttgatctgacatactcagaggcctgaccacccccctaggaagcgcgacgtccatctggagttttcccgcgagccgccttgagagcagggtaagttctgcaggcccagccctggcgtcacgctgtgtctggcactcactggagattctgtacataaatcatggccccgtcatttttctcgcatcaaacaacatttatttatttatgtatcgacatcaaatctctataaaaataaaatttaaagagctatttaagcatcaagtattatttctaccgcacaaagcatctatttttgcagagatgctgtgagaatgtagatgtaatgattcgtcaccacttcttcactgctgggcagttagggaagttcatctaaaccatgagacagtgtccggttggcagtttctacctcggatgcgaaacgccgactacagttggggaagggtggggcgtctgctgccctaacccgcgaagcgctttctcaggccccgcccccggtccgacccggacgaccctctgagtcctccacaacgaagtcgtctgcctagaagggccggaagtacttcagggcgcgccgcggacccaccccctcgcttccggcatcggctgtggggagtaccggctgcagtcggctgtgccgggagggtaggatggcgtctggccgatgcggtgatagcaccgaaagcagacggccgccaggcgctccccctaccccccgaagtttctccccagcggcgggggatgggggtaggcggttcctctgttctttctgcgttccccgcggcctcttaccacagagacgcgggcctccaccgtcctagccctcccgccctgttctctagtgcggactagagcgtctcctcgccatttcctgtcgccctggggccccgcggggaaaaagggggagtagcaggacagcggagggaagtcgcgagcttaggtggtgtgtagacgccggaagtgttgggaaggaggccggaagctaggggcggggccaggaagtgaggaggggcgggggtttatgaggagtccaagggagcattggggcagacttgtactcagagccacctgagggacttggcggtggcgcccagcactgtcccctcccctcgtagagacacggttgtcgtttgggagtagggaacactgtgttggggtgggttgtcggcaggacatctctctggctgctcttggggcgaggtgtggaggggcagggctgggggtggagccgggtcgccagggcgtcggtagggaagacccccgcccctcgcccccccaccgaacctctacactggctggctggacactaagatggctgccgttgccatgacacccaaccctgtgcagacccttcaggaggaggcggtgtgcgccatctgcctcgattacttcacggaccccgtgtccatcggctgcgggcacaacttctgccgagtttgtgtaacccagttgtggggtggggaggatgaggaggacagagatgagttagatcgggaggaggaggaggaggacggagaggaggaggaagtggaggctgtgggggctggcgcggggtgggacacccccatgcgggatgaagactacgagggtgacatggaggaggaggtcgaggaggaagaagagggtgtgttctggaccagtggcatgagcaggtccagctgggacaacatggactatgtgtgggaggaggaggacgaggaggaagacctggactactacttgggggacatggaggaggaggacctgaggggggaggatgaggaggacgaggaggaagtgctggaggaggttgaggaagaggatctagaccccgtcaccccactgcccccgcctccagcc

SEQ ID NO: 45635 - DNA, 6680 bp, Homo sapiens
gacttagcaaacactctcattcaacggtcagactcatttcctgggctttgtctctgtctcattgcatcactcatacaaccctggatttggctctgatcacagagtcaagtgactgagtatatgaaagagaagagccaagtgacagagaatcccttcagaattgcaggacatgtcctcactcccacttggggattggctgacaatgccatctgtcatcaccaggaccctctaattccacctgccaattacctgagctttcaaggtaaaacatgttcaaactgctgcccactcagaacttttgcacctggcaaaaatgttcagccacactcctcagcaatgctgagtaacttatttaaagtgagggaggccaaacatcttctgtaggtgtgctctgctttccagttcccaaatggactggatctcccctgggaaaccagccaattgcatccacctcacttctgcccagattcttcccaaggccccagagctaagtgagcagctacttgcgttgtgagatcccagaggcgcagggttccatcccaggagcctgagagggcaaactggccatctgaggagataaccacatcactaacaaagtgggagtgaccccgcagagcacgctgtggaattccatagttggtctcatccctggtcagtttccacatgatgatggtcttatctaaaggaggtaaaacagaagaaaaatcagtgaggaacccgcagcccgtttaacacactggataattcactaagtgtcaaggtcatgagtgggttaacaacaactaaggacgcttaaggagggatggaaacaacagacaagagcagttacagaccaggactgagtggctctattccagactaaaaacgcacgtagaggtaaactgtaccctgataacttttttttttcttgagatggagtctcgctctgtcgcccaggctggagtgcagtggcatgatctcggctcactccaaactccacctcccgtgttcaagcaattctcccgcctcagcctcccaagtagctgggattacttggccagctggcacctgccagcacgtctggctaattttttaactagagatgcggtttcaccattggccaggctagtctctaactcctgatctcaagtgatccactcgcctctgccttccaaagtgctgggattataggcgtgagccaccgcgcccagcctgtatcctgagaacttaatttaggtgccagaaatacagacaccctttcctgaaactcagacgaactcaacagccactttgtgtcttctctgcaaccaaatgcacagcagtttgtggctgtagagtagctggggcctcctatgcctacctctgagggccgacagaaatgtagtaatgaatgctggaaaagccacttcaggcgctacaggattggatgcttttactgaaacctgtcccactcaacaaattttacgattaacagccagacatgattcaaaagtcagacaattcttaacagtgtagcagcaaagcggaagcacaagaagcgtctaaacgcagtcaggaacacagggatagggacggggagaaccaggggcagaaaaagtaggccgacacttgagccacgaggtcctctggagtccacctgcctccccacgagccttgggccgggcggcagctcagaaacagcctctggatttcagcaccgacactcagatggcatgttggggtcatcaccgccccgcccggcccgtaggcccccggccacactacgaaggagaaggcaaaagatattttaaaagtttccaactctccaaccctcctagcagctgcgagctgatgtacacgtaggttctcatctgcaatgtggttcgcccgggttgaggcctaggctcgggtccgcacgccccaattcacaatggggcagagaagtctgtcagtccccgccaactcgcgcgccaccggcctgccacaccacacgcggaattccctacacgacacgcggaatcccccagccctgcaatctcgggtcctgaaatctaccttagtccgtacctcgagaggcggagaggatcatgtccgggaactgcggggtagtagcgatctgggttacccagccgttgtggcccttgagggtgccacgaagggtcatctgctcagtcatggcggcggcgagagcgtgtgtcgctgcagcgacgaggatggcactggatggcttagagaaactagcaccacaacctctcctgccgccgccttgcagtgaaagagagagagaaaagccccccgccggaaccggaaatacccgctcgaccatgcaaaatggcgagccccatgatacatttctgctcaagatggcggcgccatgtaatgcaaaaggcagagggaaattgcaaggcatcacagtcccgtcttccgtacaacaaaatctgactgcactttacaaatacactctgaaacaagcacattcaagtgtttaaaaaggcttctcagggatgatgtagagcgagaagcgaaagaggtgaagtgtacggcacattcccatgaggaccgccgggctgcttccccgcccctatgtggcatagctcgagctccgcctgttccacttggtgcggggagggttgacggggcaaccccaggggagcttaattttcatttcactatcgtgggtaacgatgggcaatttaaaaagtagagtattaaaatgttaaaaataaactttaaaactgtgcttccggagggtgttctcccctcacgaggtttttgttctgatgcacaccaactccggaaggacttagtccaggctggactaaggcaggagagggttactctggatgaactaagaattggtctctttttcccgggcgcggtggctcatgcctgtaatcctaccactttgagaggccgaggcgggtggatcacttaaggtcaggagttcaagactagcctggccaacatgatgcaacctctttccaaataaataaataaaaaaaattaaaattagccaggcgtggtggggggtgcctgtaatcccagttactcgggaggctgaggcaggagaatcccttgaacctgagaggcggaggttgcagtgaaccgagatcgcgccactgcactccagcctgggcagcagagcgagactccgactcaaataaataaatacatacatacaataaaataataaagtaaaaattgccctgtgtgttgctagactgccaatccgttcctgcctaggccagaacacgggaagctctcgcagaaacggaaatgcccaaaggaggaccttaaggttctgacttctggggacatctagtggaaagctctctctgggcccagccagcgtacacaaaagcccaggggtctgggggtccaactgtgccctgaaggacgtgcccagacagggaagcggtggaacacggatacctaactgtccttctgccttccgctcgaccgcaggaatttaaataagtaatggctcccattctcacccatctctgactataagagacagtgttggcaccatgtctattcaagtagttttaaacaggggcacagatcaggatgatagcagccaccaacatctatgcaaaataaagggggcattatacctaagtatatacttttctatttgtgacatctatcaactttcgtttctcatctgtgaaatgagattggaaataatattagtatctacattacatggtggtgtggaaagtgaagaagcaaatgtaaagcgccctgaacaaggcagagtaaatgttgtgaaacttagcacctcttgggtgccaggccttattttaggtcttggggacacagctgtgaacaagacagaggggggaccctggtttgttttatttgcagtttacttcctacggtatgcgaagaggggagaacattggaacagagacacggagagagccctgcgggtatatgggagaataatgttcctgtggagggaagtcaaatgggggaaaaatatttcaatcggagggaagagttagtgccaacgtactgagctggagtgtggaggggctgaggacagagcagggaaatggagggtgcagttaacctagggccttgaaggcctggagaagaaccttggcaatgtctgctagaaagcctgcgtaaaggcagaagacaggcgagggagggtggcagagctgccggaggctgtagacgcccaggtgtgcagggaaggccaggatccctccctgaaacagcttgctctcctggtcctctgcaggttcccctgccttccgccgcagtctcccttgggctttccgggacgttgtcctggctgtggtcctccgcagcctgtggaccatcctaaggctccaggtttgtatacatcacctgcctccttggcacccccagctgactgttctttcgcttttccaatacgggactcaatccctacccaggtgattgtggtggtcgtggaagaccgctgccttcaccctcccgctaaccagcttgctgccccccactcgggtcatgccagcgcctccctgagccctcgggcacaaataggtgaacgaccacacccgcctcccgctgtggactgagattcgcggtgcgaggggttcccgggttgaggacctaaaacgccgaggagttccaatttgtcctcgagaacacggggtttctccattcgcggccgtcaacagcactagatcacagttacattttttttcctttcgcgaaacctcattcggttctctttttcttaaacgttccacagggagtccaggtccccacccacgcccaagggaaaggccttgccgcgccgcgggtcactgtcccggaagcgggaggttgccacgtccggccccaccctgccccgccccctttcccgctccgctccggggccgccctctttccctgcctcgcgacacccagaccgagacctcgggaatgctccggccccctgccgccgtctcccggcccggttctctttcactaaaaataggcgattctggcagcgcccctcctatggggccttgggggcaattggggttttgtcttagagcccgtgtggacccggatggcgacggcagcccgaggagagggagggctgactgtatggttggctttccgacgaccagaccctgcaggattcggcctttccctttggagttttcctccatccccctccgtccctcccaggggatgcccgcaggccacagtggtcactgaaggtcaaccctgagccgaaggagaagtggcctcgaccctggggaccccttcaggtgcagcttgagggggaacggccgcctttcccgttgggcacccagctgtggctgtgccctgtcctcgcccagctcccggcataggcatgcgctctgggccggggccggggccccccgcctccccgggaggaatcgctgggttgactctgggtcagcaaagggagcccggccctttctagcggggggacgtcctgcagccgctggaggaggctgagtcacgcttttcccaccagaagtctacctgtgcctgcgcccgccggacctgccggcctcttccttctcatccagggggcctcttctccagcctcacggaggtgggaagcttgctggaggcccctacctgccttttggggaagaccccgaggctggcccacgccctgctggcaggacccttcctgactgggtccaccgttcttctgggtctcaccacttctcccagcccctgggctgcttcctctctcccgtgtctgggaccccagaggcaccacttccattccatacaaggtaagagtcccaaggagaggccgggcacggtggctcacgcctgtaatcccagcactttgggaggccgaggcgggcggatcacgaggtcaggagatcgagaccatcctggctaacacggtgaaaccccgtctctactaaaaatacaaaaaattagggcgtggtggcgggcgcctgtagtcccagctactcgggaggctgaggcaggagaatggcgtgaacccgggaggcggagcttgcagtgagccgagatggcgccactgcactccagcctgggcgacagagagagactccgtctcaaaaaaaaaaaaaaaaaagtcccaaggagaaattggagaggctctcctatgaaaatccatctcaccattccttttctgaggagtccacaggacctgtacagttggaaccagcccctcaggcttccctgccagagcccttttctccaggagcagaggcatccatcccctcctgccagcattccagaccctggagggcttgcgcggtggcaggttttcccttgaatgctgaggcgaggctgagggaaaggtgcgtggccaggaccagagggcctgctgactgccagctaaaactctgtgcaggaggctttcccacgtactttacgtactttaagatgatgagcaaaatccttactgtctccctgcaaaatccgtgtggcttcctctggcgtgtcccatactcttgtgtttgtggccagactgggcctccgctcttcctccaaactcattagttctctcccacacagaacacacattgttctgcctggaaggcccatcacatccctccccaaccctctcggttcaatctaagctttcttggggtctcagcttaggttgcctgttcagggaagcctctgggaccctcaggtctaggtcacatttgtttcatgctttcacagcggtggtgtagtgtatactggttcttcttatccctcaggtgtctcct

SEQ ID NO: 45636 - DNA, 2732 bp, Homo sapiens
cttaggtagactgccagtattagcagtagtggtccgcttccagtgaccgtcatattatctgttcagcttcctctggggaagccaatctgccccaatcttcatggttttgtgtctccttttttacccatatgaccatctctctccaccgtgtctccctcatcaaataaagagaagtttagcaactaagtacctgaggaggtgggaaaggaatgctactcattcctcagctctcctagttacctttccactcccttcatccccccacattccctcatttctctcacctggtactcctgcaccacctcctccaaaggcagcacgctgtgctgtttgtggctcctggattctcggcacaccacacagatggcctctttgtccacctcacagaagagtttcagggcttcctggtgtttaaagcacatgccctgatcattactccggtttccccgataaggagtggggcacatctggcgaattatctggaccatgttggccagctgcaagttgggacgaaagctgcgacgtgtaaagctctttcggcactgggggcaggtgaactgccctggaaggggcaaggaaggaggcgggtggatgtcaggatacagctcttcatcttcgtcctcatcgtatgcttccagtatttcttcttctcggtagacatcaattctcaggtcaggtctcaagcctcctaggtaatagtcctgatcttcctcttcttcttcttcctcctcgtcccacatatagtctacgttgtcccaattagttataccactgtcaccgagccagagttcatcgtcatcttggtcttggaacaactcttcgtcagcattcccccgatacaacacctctcgaatggagccgtcccatccatccatggcccccaccgcttcctcgtcctcctcctcctcccattcatcttcctcctcgttctggtcctcctcgtcctccttactccacagctgggtcacacaccctcggcagaagttgtgcccacagctgatggacacggggtccttgaagtaatccaagcagatggcacacaccgcttcctcctgaagggtctgcatggggctgggagtagtggcataaccagccatcttaatgcccgccggcaggtgtagatacgtcagcttggagctgaggagcggggacgcgcctgcaggcctgcctccaaactactctggtgacccgaggctgtcctcaaccttgctcttcttcctcggggccgcaggggagctttgaccccctctctcagggtgcgaacgcccagatccagactcacagcctctctctgggatcggtggggacagagcaggctgcagcccccagctgctcggtcctgtcacgtctctcgctaccctcagggtgtgccctacactgcggcgtccgcctcagatgcagccgctggctaccctgcccgaggcgacgcaaaatgacgtctcgctcctgcacacgctctggagagacgctctaggccggcggaggaccacgtctctatggtgtgccgggggccgcgcgggccgggagttgggtgggctgggggacaggcgcgcccgcgccgcccgctccagctgggctagtgctgcacattccggccagcccctcctcaagaccccattcccaagccccttctcagctccctcgggccggcagagcggctctgatcaggtcagcggcggacgccgggaagaggcccggcttgggagaggtggtttggtgggttggctggttctagatggtgggggggtcaacacttgagggggactgggtctccgagccgttgtccagcctgagccggagccccaggaaggttagagggaagggggataaatctctccggaagccccgcccgggccggggccgagttggtccgcggcggtggggaagcctgggacaccaccctggtgctgtcgcccgtcccgccgtccgcgcttggggtgcctttgtggggatccgggcgccgcacagctgggagggcctgccgcccgggaggctcggatccggggcgcccagtgccccccgctgccttccgtgagccgtcgggccccagctccacgtaggcctcagacccagccctgtttctgcttgcggggccgcggctgcgcagtattgcggcgtctgccagcaaagctgcgccccggtcgtgggtcccctgagggggccggggctcaagttcccttcggtgctgccgcctgcgtcgggccagggttccgagttccagccctgagctctgtgagctcggccgggagggggctggatttgggaccacacttcctcaccgccgtggtttagacttagtttgagagcggctggcccctccttcctgtcccggtgtcctccgctgtctgttatgcccttcactcctccctggggagggagggctgggggcgctgtctgggtctgttttccaccccagcggggccctagggcagtgtcatttagactccactctgtcacctttcctggagaggggacctgatccagggctgagaggtttttttttttttttttttttttgagatggagtctggctgttgcccaggatgcagtgcagtggcgcgatctcggctcactgcaagctccgcctcccaggttcacgccactctcctgcctcagcctcccgagtagctgggactacaggcgcccgccaccacgcccggctaatttttttttttttgtatttttagtagaaacggggtttcaccctgttagccaggatggtctcgatttcc

SEQ ID NO: 45637 - DNA, 3159 bp, Homo sapiens
ttctacctagagaaaacatgcaagcgcatattgattgagggctttctacacggggggttttgataccatttgttgcccagaagatatggggtacaagtacagaaatggcgacagatggagtctacaagctctttccaaacgttcacattcctcagaacctcacccgttttctcggccacaagaaattattaatttatttgacaaatattttaaaaatcactattttgtgctagattttgtcccaggccacatggctgtattactgaataagacaactttttttttttttttaatctgaaagttgctggctagtgagacagataaaaagaaagcaaatacatgtatttccgatcaataatacggagtaatatgatagtgactggaggaccaacctggaattgggtggttaggaaaagcctcttaggagagatggcatttgggctgatacctcagcgataacaggcaggtatgcagagagctggggatccaggtgtctggatagagagcacagcccagcaagcctgacaggctcaaggaacagacaggagaccagcatgtgtgtaactcgcttagcaagaagataaaatgaagtcagcaggggtgagccagggcacgtcagattgacgcatgtactcattcagcaaatatttattaagcacctactatgttcaggacattgttgaggatacataaattaagaagaaaaaccactggctcaaggattctgtcgctggagagaaacttcagagtttaataacgttgatagaacacccaaaacaattctgctacagtttagaaattgatccattccagacagaaccacaatgcagacattaagggacacacatcatctaaggccgtgaggtctgaggtcagagatccagccatctgctcccccagggtagggaggtcgggcctccccggggtgagtcacgtagcccacctctccccaccaggcgaggcttctcggtcttggtgcatggggcagggccgcaggaaatcccccagcctaaatctgccgcactcagaaaacccaggcaggggagcccccagagaccaggcctctgattagcacctgattcacggaggcagccaaggctgggtagcgactgctggtaactggcccccggagtcgccccaggggaaaaggccaaagggggatctggagacccccggccggggagcgggctccgagacgagcgcagccgcccggtcagggcagcgcctgcgcgtccgccaggccccgccgcgcagcctcgggtgtcccggcggggcggctcgggccgcgcacgcgctctggcctccggggccggccgcctgggagcccgagcctagtgcctcccacgcccggcggccgcgagccggggtccgcgagggcggagtggggcgcggcagccaggaacccgactacgaatcccagggtgcgggcgggcggagcgaggagggacgctgggcctgcccggtgcgcacgggggcggggaccggcaaggcgggaccatttcccggcataggctccggtgcccctgcccggctcccgccgggaagttctaggccgccgcacagaaagccctgccctccacgccgggtctctggagcgccctgggttgcccggccggtccctgccgctgacttgttgacactgcgagcactcagtccctcccgcgcgcctcctccccgcccgccccgccgctcctcctccctgtaacatgccatagtgcgcctgcgaccacacggccggggcgctagcgttcgccttcagccaccatggggaatgggatgaacaaggtaacgtcttccctcgttcgcgctgggtttgcctccgctccgacgccctgccgtctcgccggcgtcggctgcccgacgactcgagcccggggtgccctttcccgcggtggggacgggcgcggagggaggggcggcgcgcctgggcggcgaccgcggagtcggggttcggaggtgttcccgcccccaccccacccggcttccgggtaggcagcccccagccgcctgccttgccagccggtgcgttttcgtggctgaaacaagccgcgccctttgaaagcgttgacacttgttctgccgagaggtcagctgagctccgaatggatgtggcttcttttttgccctcctcttcgctcccaaactacgctcttgaagccaccaccgccccccccacatcattagtaaacgggtgtcctctgtaatttcctctttctcctcagattctgtgtgtgtgcctgtgagcacagagaagtttttcttgtggacagagaagttaacagagtcctaagtcctgagctgtttctagatagtggggaggagagaaaagattcagagttgattaggttatgtgacttctgcaacaagggcaacctgttgctggctgcttgcgctgatgaggccttctggaaaatctgtgttgctccatttgtcccgtccgtttctgggccccaccctgtgttcttttgttgcccgcacctcacttcccgggcggtgggctagcctttcccgtccagggaagttgccagattccagctctggcagctgagagttgccggggtgtattcatgtgaaccacagggttaaggattttgttacttggtacttggctggtttcgaggaaggattgacaagactttacaaagcccgcaacaaagacaagtacctttttacgggtctttgaatggtcctggattagatgagtcgtctttctgcttcactttttcattgcgctccacccacccacatctctacatgccgtcagcttccacactgggtggggatggcaatgtggctgtgttttttttcatgtccctcagcactgggtcagcagtggtttgggtgttggggctggagtgttgcaaatgcggattcacggtagggcagggaaaacctagctaacttttcacgtgcgcatgtcgtgtttattgtgtcctggttacccagtttgtgaaagaactattgtgtgtttgggacctgcatatcaatactggggtattttggtaaagagaattgtattcactttttttttttttttttttttggcgagtgatcaagtttggaaacagactgtctctctcttggataaatacttgtattatattccgatgagcactggaatccatcagcaccacgagccttctgctttttaaattaaaa

SEQ ID NO: 45638 - DNA, 3107 bp, Homo sapiens
tggcttggcgttgcatcacgggcacctctcggcccagttctgctcccttccccttgactccaaccaagcatgctccctaatcatacatgctgacctccatctcagagtctgccaccgtccctgttaaaggctgaaggaggactaggatcactgtcaacaaaagcatgacccaagaggcaagacacagtcatgtttatagcatattactatgagccactcactacttctagatgtcacggttcaaaggtgattgaaagaaactctgtgtttcccaatgcctgctggataaataactcagcatggatggtgagacagcatctctaacttcgcctgtctccccggtaatcgtgttcctcctcctcacttctttatcagggttcttggtaatagtagtccccccttattctcaggggatagatatgttccaaaacccctagcagatgcctgaaatagaagacagtactgagccccttatagactatgtttttttctgtacgtacatagctaggataaagtgtaacttataaattaggcacagtgagagattaacaacactaataataacaccaagcaatgatgaccatacgctgtaatgaaagctgtggatgttgttgctctctccaacatctcactgcatggcacttgccctctaatggcctgatggctgccacatggctgatgggccagcagcatatacagtggggtctgctggacaaagcagtggttcacatcccagaagggatgaagcgggaccctgcgcgatgtcaccaccctgcaaagaatggcatgcaacttcaaacacaaagtgttgatttctggaattttccatttcttattttcagactgaggttgccctcaggtaactgaaactgtggaaagggaaacggtggatacaggggactcctgtgtcattccccatcctggaaaccctccagcaacccctgactccccgaccgccccaccccctgccgagcacgtctactcagccccataactgcttgtccttccctcctctgccacccatgcacctgcccgtctgagagctctctacctcaccccgaggcctccccggcctcctggccattgttctctctcgggcggtacccacactatggccagataattcctcctttactgtagttcttaccttattacgggggaatatgagccaaagccatgtaactcgctgccgggcaggaactaacagagccagcacatgcttctcccgtacccttctctccatcaggtggccaggaatgttccggatccccgtggctttgccatggatatctcatttgaacaagaagtaaccccccccccagaatctcagggggtctcgttaccacagcataacctaacctttctagaaagatacactcctctatccagcatgcctagagtcttatgtgtgacaagtgacggtatgctgtttcacaaaatttcgctgaaagagccgttgatgaactttagaataacccaacattaggcgctgttacaaatgggtggaattagacaaagccgtttgcctttcacctcttgcttcagttttcagaaaattgcccaaaggtattgcaaaccatttgcgttttcattggcttggttaaggagttggcagtgtcaactggccctgtgtaaagccacgtcactgtttctgtagagagcatgacacgtcagagaggtgggaagtgttgccaggactcttcttagaatgctggcaagaagagcaggcgaaaagggaagagctgtttataaacagggaaaggagacatcacctcgtatccttggcttctcattacgtcatcgattacaatcacaagtctcatttcctacaagcctgaaagcgggttcttctctgcatgtaggaaaaagccccgcttactaactctgccctcaaagagatcacaagctggtcctgaacgccctgtgccctgggaatgcttactgtcgaagctctgcaaattttctcattgaaggcactcagggcattctgctaattaaattaggaaaatgtgtacagctctacttgaaaaaatccaggtttatgctctgtattctattaccaaagaatttatcacttttcaaataacattcaattattttaaactgagtgtgcagtgagagcatttataatataatctcatttccagagtgttccatcccaactcctctctggtataagtagcttagaaggttagattttttttttccagaggattaaacattcgagaagagtggctaagaggcagcaccaggtttctctcatttcctcaaagagaatttagccttgtgaagaagaataaagtgaaggtcaatggttagatccatggcttaaaaataaaatgcagctttccttactctgaatttaccataaccaaaaaggccacgaggcagccattaatgatcctaagttgcaacagaaagaaaaaaacacctacttagggttaaacgaggattcagtggtcacttgccgccggcctccacttcacaggggcggaggatgaggccagggaagactttcttacccacactgacctgaccagagatgaaactccccctcctatgacagcctgcactcagaggctgattctgaaatagtcatgccaaatgcagccaatccctgtgtacaaggagaaaaaatagttcctcagagctgtgtccttgggccagccatctggacctctcacaatctctttcgttctccctacacttgggctgaatcccgccttccttgcctgccaggtttggtttgggggccaaatgagtgaaagtccgtgagatacccctaagtattgaagtgcgtagtaaatgataatagccctgatttgttgaacatgatgatgtgccaggcattgcgcaaagcatcatttcatcatcacaacaaacactgctgggaggcagggacacccccaccctccttgtacacccagaagtaggactttggttaaatggctctcccaaggcctcacagccttaaaaactcaagcacttatttaatccccaatgatactaccttttggccatgcaatgtgtcatggccagtaattagatttgcaaacacatataaccaaagaggattagaagagacatatattctatataaattacat

SEQ ID NO: 45639 - DNA, 2500 bp, Homo sapiens
catcttgggtcactgcaacctctgcctcctgggttcaagcaattctcctgcctcagcctcccaagtagctgggactataggcatgtgccaccacacctggctaatatttgttattttagtagaaatggggtctcactatgttggccaggctggtctcaaactcctgacctcaggtgatctgctcatctcagcctcccaaagtgctaggattacaggcatgagccattgtgcctggcctaaagttaaatatctactttagcaccatgttgagcaataaaacgtgtaaaagccacaagtttgatgggccaatgatatatctattttccaacatcttttttaaataattaataagaattaaaatgcctttagatgcatctgaagtcctctggattccgaaacccgtggcaggtgtagtactactccttagagagacaccaaattcccatctgtctcccatggtgcctagcatctgcttttggggcctcatgcttatcagatgaacagaaaatttaatcaattaagaattaattacttgattgattattgacttcaggggagatcttcatttttaccctgtaactttaatcagtaggtcaagttatagactggaaggaggggtttcctctttctctgaccaaccgttttctctgatcggccataaatctccaacaagcaaatctctctgaaacctggtgactggatgctttcctacaatttcacagctttgttggaaaattctgccttccttctggataaggaacataaagtccttgtccatggtcagtctcatagattgatttacattttttccatgttgctgaaacatgactcttctctgtaaatgattacatgttggagtcttttcctggcaaaaaaaaaaagagccaagaaatgcaaacaactgaagctgagacactcacttcagaggtgcctgaacattttagtcatccccgtggctatgtttgcttgggtgacctcgcaccggagcttactcaccaccgtgtgattttgtgaccacataacttttgctcaatgttttaaaggttcatgaaacaaccaagaggcctgctttccctcatgttcataagcaatggcaaaacaaaattcagggttttttttttttttttttttttttttttgacatttaggacccaggtcatgatacaaaacattgaactttaaaagatgtttaggttgaaaattttaaaaatagattttaaccgtctaaaggagagaataagcagaatgagagatggagtgacgtcccctctcagcgtgagctgcctggccacatgcagccaacctggacctggccggctggtcactttgttcttagtctcctctgtgctgggaggctgtccctccccttctacctggttccttccacctggaatcaggcgctagttcatgtctcccctcaccagtgaccacagccagaagaggaaggtgagtggaggggccatggggcttccatgggcttgtggcctgcctgcctggacggagtccctgctctcccactgctctgttcaagacactctgggtgaggagcagggagcccttgtgcctcttactcttgatcccagactttcttcagcctccaaagagagaccatgtgtggcacaggatgccacctcctctgtaggatggaggcagggagccctcacaaagtccctttggagcgcagaagaaaaactcagctatggaacaaggtagagaatggaagcacgttagtgctagcagagtctgcctgagacctgggtaggtccccaacatttgggacggctgtttttgtcctggagtttgaaggagaaacccctgaaagatgggtgtggccgcggggaaagaggtggggtgtgggcggagggggcctcagggcaaggcttggggtgcggcgggggctgcagaggctcccagtgccgtgagacgcgtggccgcggggcccgtgctggctgggaccacctccaggagcccgtgggtgcccgggaagagggcaggaggtgctgggccctgctggggaagaggatcggtaaggacttgcaggtgactttgctcgcctgtcctgaacagggcacagggaaggcttcccagggccgtctccttgtggcctggctcctgcgggccccgagccagcccttcccggccagcccagcacaacagccccgccagtccgaaccaatggagaactgcttcgcgatgggaagccgacaccagcagcgaaagcacaacttccggccaggggaaaagcacacctccaaccatgcggcgctaggcctcggctctccagtccgcaaggtcctttccaggccgccgcgggcgctgctgagctctggaccggactgtcccgccctccccgccgaggaagccccccgccgggccttcccgccctccccgccgacggagccccccgccgggccttcccgccctccccgccgacggagccccccgccgggccttcccgccctccccgccgacggagccccccgccgggccttcccgccct

SEQ ID NO: 45640 - DNA, 1356 bp, Homo sapiens
aataacttacttccattcaaagacgagttctttcaagaactatttctcggaattactaaagtgttttcttaacaatcttgggatacagggttacgcatcaccaggcttccaggctgctggtgtgcggacctggagccggcgcgcaaggtctcaatggcagctacaacaggacctcaggctctttgctcaagcactctgagccgccgctcccctatccgtaaaatgggtcacacggcagcgtacatacacccgcgcgaggatcaagtacgtgcacgcaaacgctgacaacagcggcaggcgccttttaagcgctcaggacagccagagcgggatgcacgcctaggcagacaggtaacacccgcctcgcgttcacttttccggagaaattctcaaatctcacggagtggcaactgcgcaagggcgaagcggcgcagtctggggccagctccagcgggcggggcctggagtcagccctctgcagcccacgcccctcaccggcgcaggtggggaccgcgggggtgcgaactggcgggggtgggcgcggagcccagcaggcggctgacggcggggatgggggctgcggggctgggaaccgcggggggtcgcggggccccgcaggtgaccgacggcgccagtgggcgcggctgtcccttcaccgctgaggcctggacggacgccgcaggcggccacctccgtgcagctgacgtccatgtcccgctggccttcggccaggccctccagcctcccacacatacctccagccgtcctgccgcagctcacggccggcacagacagggcccggtaggtctcgccgaagactccgcggccgccagccgccggcacctcacttccgcccgccgcgagcgccgagcgtgtagatccgcctggcagtcgagcgccgagtcctcgatgggcggagccttcaggggagggtagaggaggggaggagaccggcgcgggtgctggaggtcagcaggggccgtgggcggtggacgctggaatgccttgggttccgagggacccagctgcctgaatggacacgagtaggaggtttttgctgggcgtctttgcggtggcgggaagcggtgagggagggaaagaaggatacaagctcaaggggcaggccgggtgcaccatccatccccgtgccctcgggtcatctcagggagactgtgggatgatagtgcgtttgtgggccacagttcacaacgatgggccctgcatcgggtcagaggacccctccggaacagggggatgcacaaggtcaagagaatgcatggaatcagagggctgcaccaggtcaggggggctgcaccgagaccagaggaagcatcaggtcaggaggatgcactggag

SEQ ID NO: 45641 - DNA, 1389 bp, Homo sapiens
ttagacactcggcatcaattgttccatggtaccaaataactttttatattacctctgatttgtcttttgcttttcacagcaactgagcacatcactgtgttttccccttttccctgaagaagtaaacttgtctttttagtctcatgacaaaagcaggcaactctggtggcttatatttagttacaatttataaaggcaggactgcgagtcaaacccgggacgtttttttctgttgtgtgtttgcgtgctgacggggactggcttttcttcttcttcttgtagtttgaaatggaaacgctgcactgctgagaaaataccacggaaatagaacccactgcattccaggaaaataaataagcaaggccacccaaattttcaatgagtgctcctgcagaatgcaggaaatggcaggagatccgtccgaggcaccccaggccgggtcgtgggtagagagcagggacgagggctgggaggggacgcaggcacagggtgagggtggcccgtctccagggagaactgcgcgctcacaggcggggccggcttcccgcatcagcccggccgggctgcaggttctgagcgagggggcggccgtgcctcactctgggcgggacgcggcctggtgcagggacgctcacttccagtggcatttcccgtcttacacgatgagcttcatccacgttctccataaccccctccccgccacgggaagcgtcagccacctggaacagccctattctgctcggttgtaaaaagcgtcaggcgcttttgatttgaaaagcgttaggcctgggaatcgctgttgctccctcggtgggcacgccctgctgacacgccctagcccaccggggaagccactggccacgagggagcgaggcgcacgggtgtcttccctccccagagtgagtgtcagggaggaagccaggtcttccagggcgctgacaaggcagggccgggctccttccctccgttgtgtttctctgaaatgttcgaatcactggtgtgacgggagcacttaaagccgaaaaaggaaagacgaaagcaaaggattcttcagggcacatgtgtacagactcctgcttcccctcacttgctttctgtttcacttctcagatcatcactacagcgtttgcagctttccagctcatcatgctgaactgaagacaagacgaggggaaaatcaagggtgggtttttccgcagcaccgtggtgtcccggcttgggatacgttttatctgttgtgagcctaaaccttttttacttctcaagccaggccaaatttttggatccccttcaggttgcattggtaaacaagaaggaaatgtacacattctatttattcttacaaccaagaaatgaactaattgagtagctagtgtggaccacagttgc

SEQ ID NO: 45642 - DNA, 435 bp, Homo sapiens
tgcaaatctgatctgctgcctgtttttatgaataaagttttataggaatacagccatggctgttcatttatgcattgtctgtggttgcttttgcactgcaagagacagagttgagtgacagagaccatctggcctgcagagcctcaactgtttactgtatgagtctttacagaaaaagtttgccaatccctgaatctggcttgggtaattgggtgaatgaaattcactaagtttggaaatccacaagataagtagtttaccttgggacaagatcaattggaggcatcgatgtgaacatttgactcttgattctcagtgagtgtgtaggcttctctactttgggcatttattataatatttgcatagattatttgatgtcaattccaatattgtactctaattttaatgtcctttttaatttaaggcacaaaggat

SEQ ID NO: 45643 - DNA, 3511 bp, Homo sapiens
atgtattaatcacctcaagatctttaggtgtaaagtttcatttgaaggattttgcagggatattatatgcatggtgaatgttccactggtaattctggcctaattttagggttttacagttgcttttggttatgcatgttactaaatttacaaaatctttcatctattgcaaaatcccaggatgattctcacacagaggaaactttctgacaagtaaacatttgaatgtgagccactggtaaggcaatacttcaaaagaaaatcatttgtcgtagctgacttttttttttttttttggtcaagatcaaactgagaaaatctccttgaagcttgtaggctggtctgtgtcatgcagcctgggtgttggagggcctccaccaccccccgcatctgtgtttactgtcatttcaccaccactgggtcaaattgtaaggaaaaataaaacttacattaagtaatgttgtaaatacaaataaaatccatataaaaatatggacagtggggataaaaaggtaaatataaagcaatgtaggcaacttcccattcattgcagcaaataagacccataacagcatttagaaaatttgctagataggaaaagcaattgcaaatttcatgggaatattcaggaggaatagtgggaaggccaaacaaaagcactgtagaaaagaggagagagagacacacacaggagacaccaagatgagtagaatctatgcttggcattcaaggagcccagggccatcactcagcggctgctagacacacgcagagacaggccaaggacactaatctctgagatttggttgactatgtttagacctggtctcagttgttattttagtggtttatatgtcttaaaatagcagtcttttaactttcctctttaaatgtcaagcttgactactgcagcttcatttcaaggatcccttgttgggtgaatcaaaaatgttttaaaaaagtctttcccttttgagctgattttgtgaatattctcacatactcttgggattttggtttcaccccagttttctaatgacagacatgttgtaggattctgcccacacccccagtgtgggctgacctctacaacctgaacaatgactcatctaggcttttcaaatattaaactagcttgtaaatcctctctatgcctaatgcctccaccagctccttgtctgtgccttcacaagtcattaaaactgtaaagacatgaattcttgttttctatgacctgaaaggattctacagcactagctatagtttctagctataactttccacgctggcaaagaggtagacagtaaccattttatgaaaggggaactaatgctttacaaaatgattactgtttacttctttgtcagttaacagtattattaggatatgtattcaggtaaaaatctgcactccaagcccagccagtccatatttggcccatcaatattgctggagcaagcttttaacatggcaacatatcccactgaaacacatgcatggactctatttagggaagttttgtgaacttcacctggactctcccagttgctaataatattgtcagctcatggtgaatcacccagtactctctctccccttgcttggccctcccttggtcctcccctccctgcctttacacactggctgcttatttgtgtgctgggcagacaaagtcaaaaaggacagacacagtccctgcctttaaaaagcgatgggaagagaaagggagcattgccacactgaggaaaggaagcattgccacacccaccatggggcccacgctgggtggggaaaagttcaggagagcttcctggaagaggtgacattggagtagcatttagaaggatgcactaatcccatgaataaagccaagaaagggcatttctggacaagagaatggcatggaagtgcaaagcactaagaggaaggaaaggacaaaagattacaaactgcaaagagctgcatgagctattttgcctatggcagctccactgggtgggcattcacctaccgttgcttgggatatggggtttggtttttgcgtggtgatgcgtgccagagatgaaaggggtttccagggtctttgctcttagtctcgggtgaactgccttgtatcagtactgtcctctcttcataagcattccttgggctgaaacaaccttggcttctggtctcaggagccttttctcctggtgcaaaagccccaggctacctggttacagcatcaggattagattggctggttttactgcagcagtgcttaagtaaatccgaatgtaggaaaatcactgttttaaagcaatgtagtttgatcagttagaacgacactgatcttttccttgtatgaacttagaatctgatctgtaagattctattcattttatgcatctttttcagggtcagtattcactccttcaacagctcatgagcattataaagaaaaataaccttcttttagatgctttaacacagtttcccaaacttgcaacataagaatcacttgggatgcttgttacttagacagatgactggggctttcccctgggaattctgatttaataggtctgggggtgggctctgggaacttttatttattttttaataagtatgctaggcagttcttattgtcaggctagtttggaaaacacagtgcacttagcccgtgttttactggatattaggcaataaacaaatacgtctacttacaccaggcaaagtatgcatgatgacattgatgatgtacatttcgcaggtcaggaaactaaagctcaaaggtaagtgactcacataagagcacactactggtaacagaatgacctgtcatcaaatccagagcctctgggttctgttacattacagtccaaatgatggacgttaaaattgtaagatctgattgaggtttatgtcaggacttgtaaaattaacttttttaaattgggctttattttaggttgtactagttcagttatacatggcttttaatgtagtgattttatgggggaaaagttgtttagagcaagccaagctaaatttagtttgttgccatttgaatttattaattcagagatagctaactcagttaaaatagttttcttttcaaagaaggctatatattgtttaaaacgttaagagacctaaggtatgtaaatgtgtttgtttcttttcaaaataaagcaaaccaaaagtaaataagtaaaacaaatcagctcacaaaagtatatactagagaattatttatgtcattcaaattagtttctgtccatagttatattctacaaacccattctttctgatatttgctaattaataccaaatatttaatttaccttaattcatgattccttcagaaccaaattgaaatttgccttggagttatttatcagaaaacaatttgcttagcatattggtagcataaagagcttcaaaaaagatgtatagatatatatatatattttcaatttcttctgtagaaacagttgcatggcaagtcaaaacactgagacaatgggga

SEQ ID NO: 45644 - DNA, 1849 bp, Homo sapiens
ccttaggtgtttctttccttttctttcttttttttctttgagatggaatttcactcttgtcacccaggctggagtgcaatggcacaatctcagctcactgcaacctctgcctcctgtgttcccatgattctcctgcctcagcctccagagtagctgggattacaggtgcccaccgccacacccagctaattttttatatttttagtagtgacagggtttcaccatgttggccaggctggtctcaaactccagacctcaggtgatcctcctgccttggcctcccaaagtgctgggattacaggcgtgagccaccgcacctggcctcaggtgtttctttatagcaacacaagaacagcctgacacagtgcccccagatgtggtacactgagaagagcacagggtcatttctaagggattcttgcccaaaatgcacaagtgacaaacctgagacaagtccaaaccaaggagcatttttatccaacgaaagacctgtatttaaaaagtgaagatcgtgaaagacaaaggctttgaaactgtttcggatggaagggaattggagttgtgaaaccacaggcaacgtgtgaccctgaattgcactctggacctttgaaaaacactattagtgccgtcggggaaacttgaatgggggttgatgtgacagtgctgtatagagccgtgtgaatgtcttgattttgacgctgtgcttagtttatgtagaacaatgtccttgtgcgtagggaatgcacagtgtagtattaataagaacagatgacacagcgtcacatgagaagctcactggctggttcaggaacacccaggtgtacacgacaaccacccagccccgtcctcacacatcgaatgtgacggtattgagataaatgctaacaattagggacccccccggtgaagagtacacagcaggaaggaagctctttgtaccccttttgcaacttttcagtaaatttgcagttatttcaaaatataaaaagttaaacatttgctagaaaagtttctaaatgtttactctcggtttctgctcaagggtgggtggcttatggttcccgcagaggcattccaagttacacgatctgacaagacatggagcgacctgagtttgcgtgtttctaacacgttggcttgaatccagcatgtgctggtgctggctgtgtcctgatgtggcagtgagagctgcttctccctataatttcaatcacgcagctggagaaatccccatgaaatactccaccaaggtgaatgagcacgagaggcatttctacacgagaagtccctttctccagctcctagcacacttggtagcacctacgaatcctaagggaggtgttttctgtaggcacagatgttcctggtatagaaatctgaccaacagagagtacccctgggtggggccatagcgcatcccacgtcctggacccagccctttgggagacggaggcaaaaggcgatttggcacagaagtagcctattgtttaagttgtttgggcgtcccttttgtttcattacctgcatttaattttgactattttatggagttaaatgtgtgatccttcttattagattcttagaaggcagctttgctttatgcaagaacaccttctatatgaacgtttgtaaatgctttttaacagttttcaagcaaccttgggcacacagctggccggggagctccggtggaaggggccagctgcttggctgccagaattggaacgagcataggacatgtgcagccactgtaaacaagaatgaattttccttaacctttatgagtcaaatatttatttttggaatattaacaaaatcaaaagaattgccgtgttcttttaagtcaaaa

SEQ ID NO: 45645 - DNA, 685 bp, Homo sapiens
ctcattaagctcttctgcaggtttcagtctctgcactgagcacttcacgcgtatcatcagatcctgcaacaaccccatgacaaccttatttcttccttgattcttagctatagaaattcagtctcagagaggttagagactttccttcatcacagagccagtcagtcacagagctgggatcaaccccagatctgtctcactttcaaggtcattttctaccaccgcactgagaaacctgagtaaagtcccaaaactccaccttcacatcaataggtcactaaaacaatcaatgtgtaagattaagcttggccaacagaggaattctgaccaatgtgaaactaccggtcgagaaactcaggaagatacctactgtgttgggaaatcacaggacattctgtgtaacaaagttcagtgttacggggtaaaaactaaaacacccaacaagccagtgagggtcacttgtataactgaggctccacgtttccactggaggagccgagtgtgcaggggtgtggtgcagcgcctcacacagccttacgcaggaatgtagttggcacacccttctttctccctagccagcagaaaaaaatgcagatacgcagattgaaagtataaatgtaaaaattgcttaattcattgttaaatattcttatagctatcagatgtaatgacaaagacagacaat

SEQ ID NO: 45646 - DNA, 400 bp, Homo sapiens
ctatagatttgcatggggcgatgtgcctcattatcacagctgtgcactggtgtgaataaatgacaataggacaagcacgcagatctttccaaacagcatgcacctgggccgcaggctggccgagcgcctgagggttgcaccacctacaatatcatcattgtgtaatccagtcctccctctgtcagcacaacagcacaatctagaatcaccgatttccaaatcacaatgtaatcacactgtaatctatgtgtttaagaaaggagaagccacacacatacaaacacgatcacacaccatttccttgaagtcaccagaacggcaacatctagaacaaataacctcctctgggaaggttcatttctccacggttaaccattgatgggctggcgtgatcccttta

SEQ ID NO: 45647 - DNA, 1549 bp, Homo sapiens
agcggctccgtcgctttttgtgcaacaaaggcaggaaaaaggaggaaactcggcgtggcagggcagcgggctggaagtgcaccttcccggggccgaggcgcccgctccctggactaatgacgccgcgtggggatcacgccccgggcgccctggggtgaggaacggtcccccctttcgagattgtccgacactggtgccagtgaggtcacagcaaaagtcccaaaggaatattggaaagaaatggccgtgaaccggtttgttcttgcccccgcccccgggaacacgccctctccgtcgttcctgttgactgtcagatcccgggaaccaagcggcggagctcggcggcatctgaggcttccgcagggacacaagtgcaggcacagcccagcaccctgcgccagacacagccgccccaggggaagaggaggacgctgctgtcctcccgcaggagtcaccagccaggtaaagaaaaaggtaaagtaagacaaagaaaagtgaaagtcggagcccatttagtgagcaagagtaaaggtcatccaaaaaggcgcatacaatttcaagcccaggagtgcattcattaaaacaagaggaaaagacaagatggtccttgaaaggagctcataggaaggggcacagcacaaggctcccgaaagaggtcactgcaagtgtcctgcgcaatttctgttcagcacctctgcagtgacgacaggggtttgctttcgtaagcagcatcgttttcactactacagaagcacatacgccgcgtgcagcttaggcccgagcaaagtccctgctcccctagacccagtcccttcaggtgtccccctaggggaactgtggcgtgtccccccaaccaggcgcactcgcctaaactgcgtccccgaactccagggcgcagggagccctcgcgggctgcccggggctggggcccacacctgaacggaggagccggctggcggagcggccccgcgcgcgcacacacgcacactcacagacacgcgcaaacccacagcggcgcgcgcgctccccattggcgggaggaggaaggcggggccggccgacccaaaacaaacaacctgcgccagcgactttgccgccgcgctgcagtgtggcctccgcctggtgcgcgcccgttggggagctggggaactggggagccgccaccacctcggccacctcgttcccccaccccttgccgtccgcgctcaggccccgcccccgcggagccgccgcagggttatattgggccggcccgaaggtggaggcgagacgcagccgcggcaggccagcggggagatgctgccccggaggctgggagcgggaaggcggctgcgggcgcagcggcctcggggactcgcctccgcgggtgctcaaggctgaaggcgccggaccttcccccacggtggcacgcacatcatccggcaccatttccgtgccccgaagacgcccgcgcgggacctgggaccgccagtgaagaacccctcctgggctctttaacgagcagcagatgcgcatgctgcttctctccggcaggaaagccttctaagcc

SEQ ID NO: 45648 - DNA, 1336 bp, Homo sapiens
tttggtgaactgcagccaaacataaacattaacataataccacatttcccttcccattcctggaccctctttgtcactgttttcaggaacagtttaactttgaagccttgccataattgaacctttgtatcatatctgtttgaaacccaaaatgctatacaattcaacatctttgacatgtatttgttatttctgatcaccaatttctagccattaagaaagaagtagaaaagttttgcaacctttggctggctctacccactgtagttaaatgtctggtcatgctcaaaatcacagaagttgcccattcaaaaaaagaactcagaatgaagacactaaagagaccctagtctaaattccagctgtgtctcacacagctgggtgaccttagggaaacgggtcatccctgcaagcctcataaggacgagggttgggctggaacatgtcttgcacacctccctcacagttcacacccatgaaaaccctcatataatgtcaaaaataacacgctaatgtgttttttttttcccttttccctaaactcaatcaacttgagatcaagtgtgaatctcagggacaagtttcagtatgtcattcttcaacatgattaaagtacttacaaacacagcagaatatattggatgccttagggtacaatggatatatacaacttgtcattctaatgggtcataacatgtatttccaattatgtttcccccagtgtgctcctgacaacttaagtttctcacaaaatcccagctttgagaattagaggagaatgcttacttcacaggcaggagacagaagttgggctattttcaagagatttcatcataagcaaggcatttagggctgggtcgcatggtggctcccaggccgctgctctgggctgacaggatcagctcagtcctttgtttatttaagaacaaagtctaaaggcaattctcagggtagcagagttgatataacctaaaaatgcaatagcctgggtgctcccagcactttgggagtccaaggtaggaagatcatttgagactagcagttcgagaccagcctgggcaacatagtgagatgtcttctctacaaaaaagtaacaagaacaacaaaaaattagccaggcatggcggcttgtgcttgcagtcctagctacttgagaggctgaggtgggaggatcgtttgagcctaggagttcaagatgcagtgagctatggtggtaccactgcactccagcctgggtgacagagaaaaaactcctgcctctaaaaaaataaagaaaaataaagcataaaaatatcaatgtaattagcaccaagggcctcaaggcatgggaacaaat

SEQ ID NO: 45649 - DNA, 1820 bp, Homo sapiens
ctggggctagttaggggggcatgttttcagggcaaagctaaacttcccagtacctcttaaatcatgcacagtatgtagcagccccttcccactctgggcaaagccatctatggccctggtgcctgctgcacttcaatatgggcatgtgtcaagcaccaacatctaaaaggggaaccacaccagcatgaagctgcctccaccctccccacattcactcacactgtcttcttcagcaggtacataggccgaggaagcaaagggggactcagagcccacagcccatgtggaagagaatgtggcatttctgcagaatcacgtgcttccgaaagcctggatttgttcacagggtagttcctgggggatgctgccaacttttaaggcctggatgagcaccctgcaaggacaagtccccagagggggaccgagatttaacacccacaggactctgtggcccccccaaactatccagcaccctcaccttccccgtgccgggtttcagaaagcagctccaatgtgaaaaagatcgagcacatgcaattccctctgctccatgacccttccctgcaccctgattccataaccacacgtgtaagaatgccggggagatgttgtgcaaaccaagcacttttgaccccttgcggcagttgcacacagtcagcaatctgaaaaaagataattattagttctcctatttattagctgagcccttttgagtaatagcctctggggacattcatacatgcaataaaagtcctcatcatggttaagtgcaaaatgatgtggcctattctagatttttgctgaaacaaaccctcaagcccaggtagttcctctccctggagttgagaaaggcaaagactttgacaagcaccttctccactcttgtgtgacttcagcatctacttcagaaatatttgttgagctcattcagggggttgaaatcagtaggctaactcagccaatttggatccagcaaagatgaatctgagcccatgttttctaaaatgcaacctcacgatgaggtgtgactgaaaagagctgtctggcggcccaagtcccctcttccatgagcaaagttgaagtgtttcagctaaaagattggggcctagaacaaatcctgcccaataaggctctttcatgagtcacaggaaattagaactaccgtatcttttagtcacagttgattcaatagaatcaagacccagcccacatgcaggcccaatggctggctgtttgcacagagtgattcatgaagggagcccaaattctctgcccgataagatctctctccacacacttttctgtttgcctcaccgatcccaaacccccaccccagctcattctgctgcctgaaatatcaccctttgagtcattctgttgagttacataataaaaatggggcataagttctacaaaaaggaaaaaaatgggggaagggggactgggcggagagacacagggaatcattgatccatgacaaacacaatgttcccttcctcacacctctgttaattgcaaggtccaagtggaccagcttgtaagccttggaaggactcagtgtgagtactgaacacagctgtccacagacaaacacaaatggcagtctgcaaaaagaaaaccctgcttcaatcttagcattgtattttctgcacctcactagcagaggtgttgggtgtgaatgaaacaatccatgacacttgtggtgaccagcagtaccttcaattcatacagcaaatgtgatgttaagttctaccacccataggtcacaatcagttttcccttctgggggtccctcttcctttgtcccaggatgtgaatca

SEQ ID NO: 45650 - DNA, 2236 bp, Homo sapiens
gtttcaatggagacagttagcagcacattttaaaacttaagtaattttacccaacttcacaaacactaacttgttgcttcttttataaatgaaaacaaggaagtctctagggttggtttcgtccacactttttcttaggctatatgcaaaccaccctgggataaagtcctcactgcacgtaagccaagggtgactccagggagccagacggcatttccttccataatacacaaatttgtattttgcctgatgtttttgtctctgagcccagatcccacagtgataggcgccacaaaagtacacagaccaacagaggacgcgccctgattttgcagaagagaccgatgcttggaggtcaagaggctgcctgccacggattcagactggaagcttcggccgtctgagcagattagagcatcaggctttgtcgctagtgcatgcaggagttttcacagataaaaatctttctttcttctccttaagattctggtagctaaccagaagctacatgaatttttttttacttactttttaagattaaaatcatacatgaggtctcttttataagataatgagtattgcaaaggatttttttttttaaagaactggtttttaaaaattgagagactttaacaaggcttgtatgtttgtttttaaactccttttctatggtaaaggaggaaagtttaggcctaccacaggaccaaggcttgcagaaagacaaaactgttctggaagcaaatgggacccactccttcacctccttcccccgccctccctttcctctccttgccccaaactgaactctgcaaccattactgaagcttacaaaatattctgctactactcgacagtttaaaaattaacaagcatgtaaagctaccgggggtaaaagcctggagcctgtggcaagaagcaagccctggctggattctgtaattatttcttacgcaactccaggtcgcagtcacagctttccgaagattacacacttccagccgctcagccctgctggagcaggagggcctggctctgccagagttgtgtatgcctctcatagcatcataattagtcattaaacagcagaacaaagggccattctgaccaaggtggcactactggattcctttgcttgcaggaaaggagaaatttcttgcacgttctcccctggaaggatgtgaatggggttgggaagggaagaccaagatgtggagaggggtggaccgagagttagttgcagaaggcagacttcatggggattttctgtccctgctgctgcgtttcttgtttgtgttgctgcataaactccaccagaccagcacgctgtgactgccctagcccggcccgatcaatgggaagggacctcttggagggcctctgtgcctacgaggtttccagccctaccccaggcttttccttattaccaagattgctgccctcatgttcacacattttattttttatcagaattttgcgaaatcagaattctaaacttctgaggccctagatagttttaatgaagcatatacctagaacctgaatattcagggtaaagtattagccttaagtataatcacggctagcccatggattctgcagatgaagaaactgaggccagaaagcccagtggtgagctttattacaaacattatgggggcttcatgaaggcacttggctttactttattcttggaactcagagctaacctcccatgctttctttgtctgctctatgaattcagtgtctacctgaaacctccacccaacctgtttgtacacttggaaaacccaacctggtgcatgggctgggtgataatcatggcaacactgcagcctgcaggtaagtgtgaagataacagcaagacagctggagagtgctacctgccagcacacagtctcaacccctaagaggcagctgcgcccaagagaggagggatgtcaatgaagggtcacaccttcagtttgggctgaaatgagtgagctaaaggagtggtttgttattcagaattacatttgccaaagtgtactagggaaaagaattaatttcccacagcattggtaagaggattgggtctttttgcctggactttatagaagaggtcaagaaagatggaaaatggcccacggaaactgactcgcccacagcggcctgccctgctcagctgtgccactcagtaaccactaacagcgactccaagttgacaagagaaaaacagtcttttcacattaatctcatt

SEQ ID NO: 45651 - DNA, 502 bp, Homo sapiens
accctatctccacatacagacacattggagattaagacttctacatgcgaatttgagtgaaacaaaattcagtccctaatcgtgtctcagtttgtctctgactctctctgtgtgtctgtctgtctctctctgggccatttttctgtgcttctcaatgcagagggcaaaagacagcttctactcagttcccaaaatttgtgtcctcccagttcaagctctgactaagacttagtgactccagtttcaattccaaattcttaggagagtaatcatactggcatagtccagccctggagctatggagcactgctcagctatgtgaccttaatcagaagggtcacagcctggtacaaacacagccacaggggtctatccacatggctagggcatgagagtgctgaggagtggctttatagaaaaaccacccaaattctttgatacagaagagctttggaaacatcacagcagcctaccttcccagcctccctctgcattccctgac

SEQ ID NO: 45652 - DNA, 960 bp, Homo sapiens
ctgcacggggtcccgggaggacccaggaagtctgcgcgaacggcgggcgtgggtccggagggcccggggtgggaggtctgccgggcgccggcggcaggcaggtggactgcggggggcgaaccgacggcgggccgggcgccggcgcgggcgcagggccggggcccgggccagggcggccggcgcgcgtgtggtcagccccgcggtcctccggcctccgggagcgggccggcagggctcggcctccggctcattcggaggcggttctcacctcccattggctgccgccgctggcggggcggggctccgctgcccggaaaaaagtgtaactgcgtaaaaaagtcctcgcctgggtgacggatgctcaaaagttcagaagttttcccaatgcttccttaagcggctggcgcgcgagagaccgagaaaaggtgacgcggggcccgggcaggcggccggcgcgcggccccccccccccccgccctggttatttggccgccttcgccggcagctcagggcagagtctcctggaaggcgcaggcagtgtggcgagaagggcgcctgcttgttctttctttttgtctgctttcccccgtttgcgcctggaagctgcgccgcgagttcctgcaaggcggtctgccgcggccgggcccggccttctcccctcgcagcgaccccgcctcgcggccgcgcgggccccgaggtagcccgaggcgccggaggagccagccccagcgagcgccgggagaggcggcagcgcagccggacgcacagcgcagcgggccggcaccagctcggccgggcccggactcggactcggcggccggcgcggcgcggcccggcccgagcgagggtggggggcggcgggcggcgcggggcggcggcgagcgggggccatgcaggcgcgctactccgtgtccagccccaactccctgggagtggtgccctacctcggcggcgagcaga

SEQ ID NO: 45653 - DNA, 664 bp, Homo sapiens
gattctgacagcaaagcaaactgactaaatgagtcccatttactgaaacgacactagacaaaactgcttctcagatttatgtagctccaaacatgtgcatgcgtacagagtcctctctctccgcacacacacagttgttacgcacacaatggaagacatcactgtgcttgtgaaacctgtgttgagagcagacagatggcggttatcaaatactttggcactcatacacaggagacagttacatctcagaggagtgtaacttgtgtgaaggctaacgctggcactggatccaaacctgtgcaaatagccctgtgacaccctcttctactgaaatatatgaattgttttaggccatcggggtgggctgggaaagagttttaaaatataaatagagaccaggacaatgactatatttatttagaggtgacaacatccttaaataatttaggtcagctgacgcaagcgctgagaagctgaacaactggcatggtgctctatcttcactgccaggccaggcaagggggccccagctaatgctgctccgtgctgatctgctctctgctcctcatacctgttggtatcgaccttgtaagaaggttcagatccatgagtggcccgtgatgactgaacactaaatggatgttgggagaagctcatctctctg

SEQ ID NO: 45654 - DNA, 520 bp, Homo sapiens
ggcagagccggtatctgaacccaggaagctcagaaattatgttccaagggacaccattcacataaatacaagggaaggtgtgcatttgtggaccccaatgggcacagcttggagtgtcctctataattaccagatcccatgccttggcatataccaggacaggtttgctaacaagtcaaggcatctgcactttgataacagacactttgatgtctctgtttgtttcagttttgtctctgactcatttttcagttctaatgctaggaatgtcacatagttatttcctggttttatatattcaaaagtactcctggaaaacatcttcctgcaattcttgaacaaaggagtcaaaggacacaaagttttcacatttttccagttttggtttcgatctcagtttgtaccagcttcagaaaagcactcattccaaagttctagaaatttcattaactgtgactgcactctgaagaacaaccttgcttaaattttgatgtataaatttacttctaattacagagca

SEQ ID NO: 45655 - DNA, 602 bp, Homo sapiens
ctgaaaacaattattttatgatattgtacattttctagtttttcttatagtttataaatacatatttctgacttagcattaatgaaatgaaacctaaaatcttgaaaacatttaatataaattataaataggggaaaagtacttagggtagttagctgctactcatgtgttactgaaagaagaggcatgaattttattatgaaaaaataaaatgtggataaagaatgctttggtagtaaaaacatacacacaaaaagcactggatttcacaatcaaagtccaatgagaattttccccctttggcagtcaaacaaaaattccaggaaaatagtttaaattcccttcacaaagttcaaatgtagctattggttattaacttgcaaatataagaaataacatttcggtctgggtatctgactaatggttatttatggaccctataaaatttagaataacttttgcatttaatatatctcacatgaaattactgtttcagtagtccaaaatctgtttactgcaattccatacagatgaattataattctaaatagaatcctcaaattctgtttacgttttaatgtaaacacttcacctacaggaat

SEQ ID NO: 45656 - DNA, 716 bp, Homo sapiens
aaagctcttttcagtgagaaaagaatgaacaaagtgaggccgacacatttcagaaagcatatctgcaaactgcctataaggcaaaagcgaacttttcattttctgtctcgtaagttctgtctttgcctgccacagacctgatgagcttcagcggaaaagtcagcatgaacatgtgaagcacacgatgaactttatcaggctgcgtctctgtggccactttccagatcacatatttacccagtaaaaacattcaggccacacgaggaaggaagtcttcggctactgaagatcattagtagcactgagtgcaaccactgtcagttttgtggggttggcctctgatcactcacacaaaggacggaaaattgctggcgccgctggacctgtgcccagctcacccggcagtggagcgtatgaaagcctttttttttttttttttttttttaaactaatgcactggaagggggcaaagggtggcatggaccctcaggcacattaatcagcaggggaattggccaaatgtcgtctcccgctgggcttcaatgccaaaactacacgtgtcagtgacttccagagaaggggaggccccagaacaacactggacacatcaaatgtcctcccttccttcatatggaaagctcatctcggaggtgtcaggataaaacatgagaacagcatctgtcctcagagaccaagcagagtgattcactatttca

SEQ ID NO: 45657 - DNA, 866 bp, Homo sapiens
aactattattggatatttcaacagttttatcagtgattgctgaaactagagaacaggaaatcgagaaataacactatcaactaacttgaactaatggacgattaatgaacactatatctaagagcagatgattatatattctttccaaaatgctcatgtaataagactataaaatggaccaaaaccatgtttccacaaatttaaaaggatcgaaataacaaagaaaatactctcaacaacaatagaatcaaactataaatcaataaaaacgacttctagaaaatatgcaaatatttagaaagagcatatttctaaataacccatgggtcaaagaagtcacaagagaaattagaatatgtattttaattgattgaaaattaaaacatatcaaaaatcagtcagcaaaggcagtgctgggaggctaattatggttttaaacacttatagaaagagcagaaagatctaaaacacataatctaaatttcatcttgagaagctaaaaaaaaagacaaatcgatccccaagtaagcagaagaaaagaaataaacataaaagctgaaagtaatgaactggaaaggaaaaaacaacagagaaaaatcaatgaagccaaaggtaatttgctgaaaagatcaataaaatgaagaaatatttccaggtagcactgaaaggtggtgggggtggcgagggtggaggagaggagcgtggacacaagacacaaaattttcatgccaggaatgaaagacagcaaattatctgcagatcttacaaatattaaaaagaaatgccataaacaaccacagttgattctttttatttttttttttccccctgagacagagtctcactctgtttgccaggcaggagtg

SEQ ID NO: 45658 - DNA, 735 bp, Homo sapiens
caaactgctccctaacttgtaccttctcctgctcctatgccacagctctcttccataagttcattctgaagagtcctaggctgttctatgcaaatgacgaatcatttgccaacccttagattttccggcttgcatccggatcagtgtgttggctgtaaaccaaccaacacagatgatcaatattacagcacaaaggaagtaaaaagcctttgtgattatccagtaagctagggatcagaaaagaatgattgcaaaatcctaacgtacagtagaataaggaaatgtttccaggtatttgtcagaaaagggccagcttccatctggaccatgacctacaaacaacattaatgctcctaacagaactatttaaataagattccactgtttgttctctgaaatctcctgggacacaatgactacctagaaggtaatcagacctcgaccacaggagagccaaggactgccattccagctttcctgccattctcacttcctggcaggtgaactctgctcccattccagcccctgaaagcctaacctaagaaaagaaaaaaagagagaggaatagaaaagaaaaaactgtgaaaagaaagaaatgaaatagaggcagaaaacaaagaggagggagaaaggaaacaattacactagaggtagtttctgctagaccaacactgagccaggccatcccagttttcactctcttctggacactcaccaacaatatactttaatttt

SEQ ID NO: 45659 - DNA, 1759 bp, Homo sapiens
ccgcgcggcacacacgctcacagcccccagagaaagaccagaggcgctcgatgtatcccgcacaccccacacgcaacacactaactgcaccgtaccttccgtcccacctcccggcagcagaccccttccgggacgccgagagggctgttcctggagagaccgcagcccacgagtagcggcgcgtagggagagcacgcgtgcccaggctgcctcggccggcgcgcccccgcccccgcactcacctggcctgtgataccggtgatgagcgccacgttcctgggcttgcccatctcgccgtccccggagccccgggcgctggggcagcgtgccggtgcgtgtgccatgtcccgcggcgggcgtgcggtcggcggcagggcggagcgcggcagagggcaggcgcggtgccggcaggaacgcgggggtgtgcagcacgaagcgcctctccaggctgcgggcagggagggagagcgcaccgcgcgaccggccgccacagtctgacaggggcgcacgggaggccgtgcagggagggccgggggcgggccgagccggccaaggcgggcccgacgggccaagcagcggggctgcggcctgactggcgcagcgtcattcgcgtcagccggcgacgctgtagcaggccccgcccctccgccgacggccaccgcgcgggaggggcggggcctgccgccgccaccgcctcagggaagaggaaggaggccgcggcttcgcgtcccgcctctcgcctggctggccgtggggggcctggacgcagtggcctcccgaatctcccaggaccctaatatcgcccgaggatgctgggaggaacgctgagccgacctctccgttaggctgaaggtctgaattttcaaacccaggggtcacagggccggggtcatggactttgataaataattcctggaaacctgttgcagtgccctttgagaagcccggtttatggtacctgaagggcagtagcgtacaaggcccgtaaacgggggtcacagatgtgggagtgactaactaggctggctctcgctcttctggcctttcctgaggctcggaaccagtaacgaggttccaaatagctgaattcaaagttttctcttctgaggactgccagtgcacaagaaagtccctagccccacccgtatgcggcataaggaaatgttgaaaagactgcccgggtcaataaacctggacgtggcagatttcaaagaaagtaattcaaacacaggtggggtcccggcttacatctgttggatttggctgccatttggcagctgctcgttggacagggagaggagaggaggtgactcagagccgggagggcagcaggtgtgtgtgcctaagcagttggctgcaatccaggacacagacggaaacttcccggtctccgttgctctgcttctctgtccacattcctctccctaatcgataacttcagatcatcatttcaaatcacagagttactagggctgtgcccaatataacgtgcaagagtatgtatagcagacctggaaccccaaaatcagaaaagctcaggattacatttaaaacctccctctcgcgctcctcgaggtccgttaggaatatttcttagctatagatagactggtctggtttcacacctggcctctcctctgcgttctatgaggagaatggctcaacaaacatctgatggtgcctctgagtgatgaagagaccctgaagctgaggagagggaacacttccattgagaggaacatgctataagctagaaatg

SEQ ID NO: 45660 - DNA, 671 bp, Homo sapiens
aaagttcttagcatgtggtggatacgacataagagtttgttaaaaaataactcagggcttctactagcaggcgaggaagccacttgtatttctcacacttaggtgtgcaggggccatgagtaaagcacagaaggcaaggcacgctgcgggagaattcagagggcgtccgtgtgggagctgtctaaacggtgtgacttttggatcttctgcctttcgaaattctttccccttggctcactgaggcctgaaattccacagtcacaccctcccatgcctttgatgtctgccagacaaggactttgtcctccacgagaataccctgcaacagggagagcacacgcgaagcttctctggacatttttgtttcctcagtacgtttatcagattcttcctgagaggagagattccattgggtggatttggaaaatgaaaacaaagcaagagaatgttgggtgcctgcctagtatgtggaagataagaaggaaaaagaaagatggggaccttgccaggggtggccacaccctgggaacaggtgtaatggagagctggcctttcttgcacagcgttggcgtcaggcagggcagtccgagccccacctcagccactatgaggtgggcgttctgcaagtctgatcctcaggttcccacccgcaaagacgcaggtggtcacct

SEQ ID NO: 45661 - DNA, 1149 bp, Homo sapiens
aggttgttgtgagcattacctaaaagaaaataggtgctatggcggcatgtttgttgagctaggaggactcggaacaaaattagcttctgcaccggctgtgctggagccaggcaggccgctccggtgtggccctgtttttcctggtttgtgtcccaggaacctgccaaccctcattgtcccggattttccctttgactccaaaagccgtgtctttcttatcaagcctctttatttttgttattatcccgtcaacatactcccctctgattcgcccccactaatgactcgcgccctttccaaagtcccagcacaccgcgcttataatctctttcagctgtccttaaaaaggttctatttgtcccctccgccccgctcaggggcgcccggactctggggcccggccttcgcgggctcccgggttcctcccatcgcttccctcacagtcctggccgcagggcagcgggtttcgcacgggagggaaggtttggatggctaacgcccagggttggtcttccctgtgtcttttatgggaacacgttcctgcctgcgccccacgggacagagccgttttcccgccccgccacgccgcgcccgcaggccccgctgcccgcagcctcttcccgacgccccaggccgtgcgcccccccgaaccgggcccaccgcgtgctgtgcggggcttccgcgcctgcgcacgaacgcttctgcgagctttctcggaagcagctggggggcggggaatctgctgaggaacggcgctttataaatcaaaagataataataacagagcttacggtgagcaccggaggctggaaacggggtggcatccgctcggggcggggcggcgtcgccagcgaatgacaacactgccccctggtggccgatgcggccaggcccgagagagcgcaggccgggtgcgagccaggcttcctcaccacgcggcttccccactcatcccatagaaaccgtaactgagcaaatgacggtaagtccccaggaagcgttaaggccaggaagcagcacaggagaaaaacccgaatcccatttttttagagtagggatttatttgttgtccccagatagcaagctgaatttctgaatagttcagagctcacaaaagaagccaagacctttcagggcattttataatgt

SEQ ID NO: 45662 - DNA, 567 bp, Homo sapiens
gcaaacatgcttgtctcaggttcatgaatgcagaaattcttgctgtctccccatttctgagagaggggcctatttgtagcatatggaatatgaaagggttttccctgccagaggagatgaaatgtttgcatagtcaaataactcagaacacgtgtgaaactccaggcccttggaaagtccaagatttatgggacctgttccgtgctgaccaggattccacggttcctcgtgcactgccaccacccaggctaccacgactgttgccccagggattccagaacctttgcactctggtcaaagctctctgctgcctattttttttttaaactctagtaaatgtttctttgtaaatacagagtaacagaaaatacaggaagaatcctttaatgagtctgaacattgtggacaagcacattggttaagacagataattatctctctttcctaatttctttccctcatcaccaaaggatttgaggttactaccatgtggtcaggacaactatttttatggacacaaaatcaaaggattttcaagtatcatagttaaccaaaacatcataaatc

SEQ ID NO: 45663 - DNA, 2368 bp, Homo sapiens
caacacatctaaaagggggcgagggacgctttattttcatttccctgaccactactgaggtgagcatttctttcactcgcgtacttgtttgtattttttctgctgttcacgtccaatagaacactggttttctattggaggcttttgggttttttcccccatttccctttcgttacaaacgacccgctgcggccgcctcctgcttgtccccacaggcccattcaacagcccagcacggaaggccgggaaagcggcgctcgccgctccaacaacctcgcgcagtccgtggctcctccctgccctcgcgcgactcgcaggcctgggcggagggctgcgtccgccaccgcgcaacctcgcgcacgcgcaccacgctcgcctcgcaacccccccccccgcccctcccccgcccccgcaaaggctgttctcagagtcggaaatggacgcacggcagctggggcgaatggccgcggactacacttcccgaagtgccgcgcgaggtattctcggcggtgattggggcaaacggccacggactacacttacttacatgccgcgcgaggcgcctccgccgccggggcaaacggccacgaactacacttcccgacacgccgcgtgaggcgctgccagcggccggccgagggcgggcggacgcgggagctgcggacgtgaggcatgagcggcgccctcctccggcccgcgagcgtcctgctggttccccgagcgagggtctcgcggcgcggggcctagcggagggcatcgaaggcctccgcgtgcgcacgggttgctgcggccgcgccgggcgccggggagggcggcggccgccatggaggtgagcgggccggaagacgaccccttcctttcgcagctgcaccaggtgcagtgccccgtgtgccagcagatgatgcccgccgcgcacatcaactcgcacctggaccgctgtctgctgctccacccggcggggcacgcggagcccgcggccgggtcgcaccgcgccggggagcgggccaaggggccctcgccgcccggcgccaagaggcggcggctgtcggagagctcggcgctgaagcagccagccaccccgacggcagccgagagcagcgagggcgagggtgaggagggcgacgacggcggcgagaccgagagccgcgagagctacgacgcgccgcccacacccagcggcgcccgccttatccccgacttcccggtggcccgctccagcagccccgggaggaaggggtcggggaagaggccggcggccgccgccgcggcggggagcgcgtctccgcgcagctgggacgaggcggaggcgcaggaggaggaggaggccgtgggcgacggcgatggcgacggggacgcggacgcggacggcgaggacgacccggggcactgggacgcggacgctgccgaagccgccaccgccttcggggccagtggcgggggccgcccgcacccccgggcgctggctgccgaggagatccgacagatgctacagggcaagccgctggccgacacgatgcgtcctgacacgctgcaggattacttcgggcagagcaaggccgtgggccaggataccctgctgcgctcgctcctggagaccaacgaaatcccctcgcttatcctgtgggggccgccgggctgcggcaaggtgagtgcggccttggccgttgggcttccgtagttatctcggcggtggatgcagctgatggtcggagagccgggtgtgctgccctcgaaagaagccgcctgcctctcctggataagggggtgcagacttgggctgggctggggcagtgcctggtccacaggtggagtctgtgatgggtgtgaaaagggcacacacccccagattggtaaggcaggcttgccgggtttgcaaaaggacgatgtctgtgaatccatagttttacaagatgtggactcttagatttgatctgcctttatcttccatcggtctccccgccccctccccagactttgatttagtaaccgaattcgcaaggaatcagcatgtttaaattgtaaagaaacatttgtatattccgtttgtacataataacggattcagctttgaaaaaaatcaaattaattctgttgtgcttccttccttttccactagttgttggtttaacagactggtatttattcttaagaataagtttatttaacattcttatattcttgagaatatattgattttactaaatatactcatgtatttacaaaactaacataaaaactttttcatctgcaagtcattttcatccggtatttccgtaacttttctcataatgccttgtactctagagaagaaacatccgtgcattttggtgtccagttctgtgtcccttcgtgaggcgttagcgttcca

SEQ ID NO: 45664 - DNA, 765 bp, Homo sapiens
catgaaaatccatagcttccgggccactactgtaatcagaaaagacaccaagaagaatattccattctcagtagcaacctggaaagaaactgaattgtaactgaggagtaggacttacatgaagaaaactaccacactataccctactattgaaacacaagaaaatgcgaacgaaagtagagagaagccgttttcctcaaagacgtcatctcaaatttatttttacattcccatcatgcttggcatgtagaatgtgatcagtacatatttgttgaatgacaaaatgaggggataaataaactttccctaagatgtgtatgtagacgtttgaaaatagaagtctgtcgctgatgtttctgtccaccaggagtcaggcttcagccaggaaagagtgagccagtgtctgagctgtctctcaccaggccttccaccagctccaggtcaccaggttcaggccaagactgagtttcagtatttgtcgttaacctggtagataaataaacagttttaaagtagagcttatgtatttgtctgattgcaaaagtaatacatgatcattgcacataggtacaggagcagatgcaaaaaaaaaaaaaagcagataaaagatagtaaaaatcaactttaacatttaatattttttctcagtgataaccactgtaaacattttagtgtatgtcctttgggaattttttccaatgagtgtgtgtgtgtgtgtgtgtgtgtgtgtgtgtatgtatgactacaccatctgtttatagcttg

SEQ ID NO: 45665 - DNA, 4083 bp, Homo sapiens
atatcagcattcagactctggaatcttgaatgaacctcttcaaccgtgttgaaatggaaagtctaaaataaagaaaatcttctttctacaaccatttattttgaaactataaagtgattccttggtgtttccttctatcacattaaattaatgtgtttttattactaattattgatgatcccaaacccaatactttattaatttgtcattgcagaacaaacaataggaaatccaaaatttatggcttcgtgagacagaatgtttacaactttacacattgcttttacatcactctttgttacacttgcagttccacaaatgtgggtggttaagatactaaatatttatatataagtctgccttttccaaagaaaataataaatggtatgttcatatttatattctgtatcaaatataattttactgaaagttctcagaaataagcagtaaaaataggattcatcctctattcagaaccacaaagatagtacagactgaagcttttaaaattttattaccctattaacatcagtaactcacttattttaaaataacttccttaaacttaacattctggcaaaagtttaattccccatgtatcagttacaaatcaagaggccctttgtggttttatgagacctaggctggttcctttatgattaagacacaaagaacaaaattgcatagggtacgaagtccacattactcaccgagatatggaatgtttgcactgtgcctatgctccatctgctttaatggaaatgggggaggagtccttaaaactattctttgctgaggttttaaagtccctggaaaacctcaagctaggaactgatataaccctgcaagaagcaactaacaattagtaacagaggttttttttttttaatggatttaaaaaaaacatttaaaatgctttcatatctaaagtgatgagtaatagaagtttcgcagccccttgaacttgaatcccaggctgcaccttgccaaggaacaggtgcagtgtaatttgcggcaggtatgttagaagagcctccacttttaccactcctttctgctgagcttagagagagagagctagagttctcttctcagaattaaagagtaccaagcacagaagtcctctccatgtccattatggacaagaaggaaggctgggcatgagagtgacctgtcacatcgccaagggctgggtcccgcccctgaagctgcgggtctccccctcacctcccctgcagggcgtgctatgccacagcccactgagccatgcgcagcaccctgggactacagaaccacagggtcactttttctcttttccttgcaaaaaagcaatgccactatctccactataatgcattccctatgtcttattcctctcattatgcttgaaagtagtgttatataacaggcaatatttatgagttgcatatcatcatatgcaaagcaaaaactggaagatgctagctcaggaggatgtagtatgcctttcaggaaagctgtcagattcatccactggaacagaagcctcgccctgcagggatttttgtcagctttgctcactgctgtctcctcagcaatacgaaaaacagttcctggtacgtggtaggtacttaggaaaaacctgatgatgaatggaagcctgcatacaagtgtgacttttctgaaagtctgatctcataaaaatacagttctgaaaacacaaggtaagagctcaaaggcacaacctttccatgcagactgtccattcgtagggagatgggaggaaagcagacccttttttttgtttctgctgaccttggacagctgtgctgccgtgttacctctggtccccagaaaaaccatggccatagcagatgaaatgctgaagggagagatgaagatgtttccagccggattgttctcactcaacgccaggaacaggtccaaggcgaagcgggtgtttgctgagctcagctgctccatggtgaaaactgcaacacagaacagggtcctcatggtgcccactgcccacgccagcagattaggcagcactatttctccagaagcttcctcaatttctgccaaccgccctgaggcatcctggatcttgtactttctccccgcttttttattccagcagggcaagaacactttcccaggcccacaaatgtgggaccattctggccaaggactcagcagttataggggattttagggcacccagggtgccctaaagggctctgaccttgcagacaggtgagtctgggggtggggcgggggtaaggcaggccccagctaccccagctttagtggggtgggagggcccacccagccctgggtcttcccaacctatgtgtgggagcgcacgtgcttctgagcctttgattcaagtctctgattcattgggcaatgaatccattgcctaccttcacctgaactaagagccttctatcagagactcagctacctactatgcattaaaactccagcaaaggtatcactgtaattattataataatataattcttccttatttttgaggttcaaaaggtatgaggtccagtgcccacagtctcagagccggtgtaggatgtgccagtttggaaacccaccacagtccagggtctggccgtgcagcgtcccatccgccacccactagcccatctcgatctccactctcagagccctgatttcccccgaggacaggcaaagaagaaccgtgctggctgctcggcatgtaagcacaaagctgatttctccttgttgtgaaatcgtctctagaatcgcacggggttcctcctctctctccctgcagctgcagataggagccgcggcctggccctgggctgcctggaaaccgtcacaaacagctctgggaggaagggaattcagggagaagggacaacattctgatctcaggtttcagtcttgccttccgcctgcatctgtcgtcctccctccctccctccctcgcgggctggcccggcctgtacccaggcgggggcgggggatcagaggtcgtctgtctccgtcggggcgcccggaagggatgggggcgcgaagctggcggggagggcgagcgcagggagctgcgggtctgaggggcctgagcctggggggtggggggtgccgggctggaagctgagcgagggagcctggcctctccccgcgcccgcccccgcgccaccgctccgaggcccggccttacccgacaggccgccgaggcacgctccgggctccgagctgggtgcgaggtcaggaaggaggcaccgagggccgctgctcttatagcaggcggaagcgtcacccgggccagcagccgcgggcggggcggcggcccttcccggtgactgcgtaggagtccgagctcccgaggtcgcctaagtgcaagcagaagtgagcgtggcttccgggcagcgccctcctcaggggcgcggcttctttctcagttcaaagcctttccccgaatctctggcaaggacctgaaaagctttttcttactaaggtgtgaatgactgagacgacatattgtgacacctcttagagggcaaatgactccctttgagtcccatctatattgggagctttctttgagagaaggaagcaaatttggggatcttgcacagggaaaaagaggggcccccagaatcagatgaaacagaaccagttccaaacacctgctctctgtttccaagatgacagcttgctgctgcgtcctcaatggtggaaagtggaagggcaaaaggggccaaatctcatgtgaagtctctcgtataaggggccaatcccattcatgaggaaggtgccctcataatccagtcacctcctaaaggcaccacctgttagtattgcattgaggattgtttcagcatgaattttgcagggaacacagacattcaaagcatagcattctgcccctgccctccaaattcatacccctctcacatgcaaaatgcatgcattgtatcccagtggcctccaaagttccagtatcaactttaaaatgtaagtccaaagtctcacctaaatatcttctaaattagaaaggcataagattcaaagtacaattcatcctaagtgaaattcccctccagctatgagccc

SEQ ID NO: 45666 - DNA, 1533 bp, Homo sapiens
tttctttttgagacggagtctttttgtgttacccagactggagtgcagtggcacgatcttgactctgctcactgcaacctccgcctcccaggttcaagcgattctcctgcctcagcctcctgagtagttaggactacaggtgtgcatcaccatgcccagctaattttttgtatttttagtagagacagggtttcacgatgttggccaagctggtctcgaactcctgacctcaagcaatctgcccgcctcagcctcccaaagtgctgggattacaagcaagccaccgcgcctggccagggtttcttttagtcctttcattttctgccaaataatggaagaaacctagcattaaaatttcagctgtgtaacacagcttcatcctccagagggcagaattccatcatttataaaatacaaatcactggcttccgctgagacataaatgccaggacatcacgtaatttctccttttcagtccagcttggtcctcctcactggggtacctagaatgtctataatttaattttctcttgcaaatatccatgtaagcagtccactggggagttcctctgacctcgcatccttctttccccctcatttcaccagcttcctttcagtgtctcaccttagaaggctcattttctttcaggtctttgtccctgatattgcctctttctagatgactcaccccttcttctaattctggtctcggctcaatgccacctcttccctgagaccttccctggcttctgttctcatcccgagttactttctgtttgctttgtagcctcagtcaccatcagaaactggttgcctatctccttcaatagaacataacatcaggagaataaggctttgacccagttgttcactgctgcgtccccagtatctaaaacacctggcatatagtagttgtttaggaaattttgctgaataagtgaatgaagattatagctcagaacaaaccaagccatgtggacagatgatacaacattgctcagttcagtttcttgatgaatgataaggagaataaaaagctctctaaactgcatggatagaataactataatttgaatgaaaatggagccccaacaagaggaattcaggtcccagtataaacagcaagatacaggaagcaaagtacatgacagaaacgatctgcatggcataatcatggtgcaaaaaagtttgcctgggaattcagaacgaagaatgaggcgttcaccgaagcctccgattattactctgaggacaagataaacaagagtaagcttatattgtaataaaggattggccgggcacggtggcccacgcctataatcccaacactttgggaggctgaggcgggtggatcacctgaggtcaggagttcgagaccagcctggccaacatggagaaaccccgtctctactaaaaatacaaaattagccaggcgtggtggtgtgcacctgtaatcccagctactcaggaggctgaggctcgagagtcgcttgaacccgggaggcggaggttgcggtgagccaagatcgcgcc

SEQ ID NO: 45667 - DNA, 623 bp, Homo sapiens
tttttttttttttttttgtagagacagtgtcttgctatgttgccccagctggtctcaaattcctgtgctcacgtgatcctcccacttcggccttccaaagcactaggattacaggcatgtgtcagccactgtttcaggtccctatactcattttaaaagagagagagagagggacaaataaaagttagccatgtaagcaggaatgaactcagtgcccaatccctctcccctctgcagaggtcgggtggggctgaacgttctagccctttaaatatggacttgatctctctggcatggccagcccctctcttgaagctctctaaaggcccactttgaggcacctcactggcataagctcaggcatggtcagaaggagcgctttacaaataaacagacatccttatcactcaggaaattccaggaatttttgaagctctgtgccaggaaccaaggactaagaccaaatatatttttatttttatttattatttatttatttatttattttttgagatggagtttcgctcttgttgcccaggctggagtgcaatggtgagatctctgctcactgcaacctccacctcccaggttcaagggattcttgtgcctcagcctcctgagta

SEQ ID NO: 45668 - DNA, 2784 bp, Homo sapiens
ttcacacggtgcggtgctgactctctgtatgaagtgtgttcacctggtgcagtacaggctctctgcatgaagcatgttcacacagtgcggtgctgaccctctgtatgaagcgtgttcacacagtgcatgtgaaaccagaaccgacagtcgaacccaagcagaagtcttgaccaagcacttccctcctgggaatgcaccatgatatcaccacaccgaagtccaggctggcaaatagggacatttaagtgacatttaagctcgtggtggccctatgaggagtcattgctgactgagatgggattttaaggtgttgcctgcctgtgtgttctcagaccctctcctgaagccccaccccttcccctgatcctctcctgggacccccctcccctatccctgaccctctcctggagcccccctcccccctccctgtccctctcctgaagtcccctcccctgaccctgtcctgggaccccctcgcctttccctgaccctcacctgaagtcccctcccctttccctgaccctctcctggagccccctcccctctccctgtccctctcctgaagtcccctcccctgaccctcacctgggacccccctcccctttccctgaccctctcctgggaccccctcccctttccctgaccctctcctggagccccctcccctctccctgtccctctcctgaagtcccctcccctgaccctctcctgggaccccctcccctttacctgaccctctcctgaaatgccctgcctgcaccattgtcttatatttttctcatggttagactggggttatggttttttctgggaaaggccacagaggtaaagtgacatctcattgtgtcatattcagggtccatgccatcaacatgactcatcagtgctgacgcggtgatgacctgggggacgcagtgtttctcaggttcccccactgagcctctgcaactccagtagtgacaaaccgctccaccccccgccatccattttcttaattgttcaattgctagtatcacatttcatcaagagacgcatagcagagtccaaccaagactccatgatagagaaaccaggcaagaactactgtctcgtcgcaacttgaggagacaatatttcttgcctggtttccctatcatggaaactgagtcccccacagtttcgtttcctcaatcgagctaattactgaggttgcttagcagcctccggagtgagcacagcggaaactatcattagggaactttgaacgtttctgtgaaatgccaacaggaaatgtttcggcattttcaaaatatttagaaaattccctgttcagttacaaaagtgaatctgaatcttaccctgcagaagttaaactgctccctcttctggataaaattacctttgtaatttctttttacaacctacagcctattgtgcttgggtttccaaatggtttaaagttcccttgtcccttactttgtgtcaagggggtgtttgtgccttaaagggaagatcctgtgccttaaaggaaaccagaactgatagtcgaacccaagcagaagtcttgaccaagcacttccctcctgggagtgcaccatgatatcaccacaccgaaggccaggctggcaaacagggatgtacacgcaggggagacgagaacttctcccgtgagaaacagcacagtccagccatatgaacccacagctcaggaagtattgctcacttttactgttctctcttagggaagggcattctcaaaacgtttccgcacaagcagaccatcccttttattttccccgtctgtctcctttccttctgctttcaaaatgtctcaagagtatttacaagagttgagcaacacaggcatctttatctggggtctttatccacagagcagaggacaggaagtcatcactacagagacgaagcgatgtatggtttgacccagtggaggactttgttaaggtggaggtgtgagtgtggagtgtaaacgtgggacatccagggcagtggagggtaaccactggagaggaagtctggggacagtttgggagcagccaaatataaaataagcatttctgttctaaatccaaatgaacattctacgctgctgtcatctccagtatacctcagagatcctaaagtttcctgaagttgtttggaagtcacggccgatgtaaagtgaaagcgcacacatatctgtaagctctgagctcaggatttcacgtgaggtcctttgttcgggaggcaggggggttctccctgttgctggctgaggtcactgcattcatagtgtgacaggagacagcacaatacagcaaagcagctggagggattgccttgtagagtggaagaccttccgcagaacagaacgctctctgtcctgttctgctggagaatgaaaagggatgggtggcctgcgtgaaacctctttatggggcttgtgcgttctgacactgtgaccgccgaggccacagctgcctttgtttcttcctctctgacctccatgaagggctagcgcacaaacttggacagggacggctctatctcttgggtgatattctggaaaagtcagtcttgacttagtcaaaggcatcggtaattccccaacagctgagagcagactccatgctgcggttttcttgtaacttgaatcgaggagacttccacatctttgctatccattgcgcctggctttgtccactcgctgacttcttcatatataagctcattttccacctggaagaaaagaggagagagccttagggccccagcattgggtccgcaccgaggcctacactgctc

SEQ ID NO: 45669 - DNA, 759 bp, Homo sapiens
tcccctggggagggaagaagggctgggaattgagttcagccaccaatggccagtgaattaatcaataacacctatgtaatggaacctccataaaaatcaaaaagaccaggttgagggagcatgtgggttaatgaacagacaggtgctgagagggtggagtgtctagagagggaatggaagctctctgcacgcacccccgaccccccttaacttgctctctgcatctcttccactggttgtttctgcctttataataaactggtgataataataaagtgctttcttgagttctgtgagtcattctagtaaattattaagcctgagggaggttatgggaatccccaaatttgtacttggccgggcagcagtgtgaagagcctgggcaccccatttgtgacaggtgtctgaagagggggtagtcttgggggctgagccctctaactggacgttaagtactgtcagaattgaattgaattgttggacacccagttggtgtcaaagaactgattggtgtgaggaaaaaaacctcttaaaggtctttactcccacttactggtagtgttgctaagttcataatgcctttttcttatcactcatggcttcattaggcttgacttactggtcttacttgcctagattggtcttgaactcctgggctcaagccatcttcctgccttggcctcccaaagtgctgggattgcgggtgtaagctaccatgcccagcctcagtgtttttaatacacacaataaaacttatta

SEQ ID NO: 45670 - DNA, 3127 bp, Homo sapiens
tggtgcatatttgtgaaaggctggcccatcagtcagtcttcccccaaggtgacatatcttcagtatcaaagtcactgctcatgccaggacatcacatcgtggctctcatggcctccccatcccagccctcccagcttctactcgggggttctctctggcgactgggctcaataaacaggaatcgagccacgcccctaagacaatggacaccgatgagccgtccccgctggttcacctgtatttacacacccagtttcacatccagttagacactctgtatcgttattgtctaatcttaggcacacactgtattcctagacccattggtctttccctgccctcccccaaaggcaaaatgcatttagggtcccagagatccctggggagacacgcagcggaggtgacctaaacccaaagcaatggtctacggaggtgacctaaacccaaagcaatggtctggccccctctccctcctaagccttccagctaagggttctgctcttccggggtcagggcaggccccgggccggtgcgctaatccggctaggaggcttcgggcgaggcaggctggagacgccagggcagccccagggcagcggctcctgtccccaagtcctcgggccctcctccagcctcccttcggcgcaggaccctgggggagctcgtccccaccgccaagccgctcgcccttccccgttcgccgcccggaggttcgggaaggagacacacccgggccaggcgcggttgctcgcgcctgcaataccagcactttgggaggcggaggcgggcggatcacctgaggtcgggagtgcgaccagcctggccaacatggcgaaaccgtgtctctcccaaaaatacaaaaattagctgggcgtggtggcacgagtctgcaatcccagctactccggaggctgaggcaggagaatcgcttgaacccgggagaggctgcagtgagccgagatcccgccattgcactccggcctgggcgactagagcggctcaaataaataaataaataaatagaagtcacccctgtccgaacctggctgaactccaggcgttccccacccgcaatgctgcggggtgctgccccaggatgcacccctcctaggagacgtcccgcttcggagatcccagctacccgctccctcccccaggccgcctccccagaagcctccgagcagttggggcgcattcgtgtttgaaaaacacaagaggaagcgcctgcagcgctcggtttcccccgcggggcagcgcgggcgcggggtgcgcgtgggcgggcggccggggtgggcaggggaccgtgggcggcgggcgccgcagggggccccccacccccccatcccccccttacccccccaactcgctctgagcccggggggtgccggcctaggctacaggtggggaggactcccggtggcctggtggaaaagctgccctctctcacccaggcacgccacggacaccagcaccgcaagggctcttttgtgaaaaatgtctccgccagcacgctctcaaaagcttctctctgaatccgctcatctgaggagtccagaggatctgggccattcttttccagtctgcacaaggggagggaggtcagctgcaccctccctgtgaaggacgccgccccctttccttcccgcagccctcgccagaactctctcgggctgcctggcaagcgacagctgtacagtgagcctcgagtgaccttcagaggccaggcgcccacagcatccaacctgacacactgctgaccaatgaacttggttctgccccagtcagagcaccagagttcaatgttttattgacagaaccactagaagctgccttttcccagcctttacaaaactcaggactcggcctctcagcatatttctcaatgaacagctgactgtgccctggaatgtcaggtcaatcgccttggctttgttctttctgttatgacacatccattgtatgggtgtttgtggcgaaactgaaacagaaagattctcactttaacatcctgttgtgaggatttcaggatcatggcacacgggaggtaggactagattgccactctgaccagagcagcatgcagaggctcccactgtgaattttagctccagatccactgcaagaacaaacccgcaatcctgagagggcccacagaccctccgaaggaagcagactgctcctgcaggacccgggagacaccccaaatactgagtgccccaactgtggaagtgggaaagggagaccctcctctccccaacacacactcccactggagaagctgaaggtctgtttgcggagaagtttccgactttacctggagcagagtcaagttggagagcccagcgaaaaacagggggagaggaagcagcagtaaggccctgggagcttgctgggtcccctagcagcccattcctgtctggcaccacagggatcctttgggagggtggcctgaggagcagggggtaaaactccacagggagaaggaattctgtagctgaactttgtaacaatttgaaccccgcgagaagcctcctggccagaactcaggagggggctcgaatccagcgtgcagactccacaggcgtgggaagaactaaagctcttttctttctcagctaggaggtggaaagcctgcgacaagttttcaaaaccatcttgctcttcacctggaaacagatgcagggctattgtggagggcacagtgggagtgagaccagcccttcagtttgcatgggagctgggtgaggcctgtgagtgccagctttcccgcacttccctgacccctgcatgactcagcagagggaaccataatcctactatttacgcaattccagtgacctgggaatctcacccccattccccacagcagccacagcaagacctgccccaggagagtctgagctcagacacgactaaccccgcccccacctgctggtccttccctacccaccctgttagtggaagacacaggacatataatcttgggagttctagggccctgcccaccactggtccctttccacactactacagctgatgctttctagaaatcactacctcctggtaggaggccaaccagcacaaaaatagagcattaaaccccaaagttaaggaccctcatggagtc

SEQ ID NO: 45671 - DNA, 1483 bp, Homo sapiens
tcccaaagtcaactcttcacaaacactgttggtcccccttagaaggccccatgtccatcacggcattaattccactcaccctcaaacaccgcggcccggaggctctgattcccaccctggaggaggttctcttgaccccgccggcgcgaccctccccagcacgacccttcctcccgaaggtgattcctcatcttgctggtggtccccacagaccgcaggctctgcaggcgagcgctgagcctggctctgcagattctcaggaccccattcgtttagctgaattattgaaagaattaagatggataagagtgctcagatttgaaactccgagactggtggctttatttttttgttgttgttggtggtggtttttttgtgtttttcttttttttgttttgagacgaagtctcactctgtctgccaggctggagtgcagtggcgcaatcccagctcactgcaacctctgcctcccgagttgaagtgattttcctgcctcagcacatagctgacattattacaggcgtgggccaccatgcccggctaatttctgtatttttagtagagaccggttttcaccacgtttgccagactggtctcgaactcctgatctccaaggatccgaccgccttggcctcccaaagtgctgggattacaggcgtgagccactgcgcccggccgagactggtgactgtaaaggacagtgaagaagcaggacagacgtcatcctgcggatcccagagcagagaagagcagtgagaacacagggccggcaggtggggaggaggctgcaggggagggcttcggccagggaagggcagcgaggagacatccgggagggaggcgtccgcggtggctgtgggccgccaaggcggagaccggctgccgctcccaggcaccccccagagaccgttgctgaccccaccgagaaggcaccgcctccccggggctcttggctgagcgacctctcctgtcctccggtcccatcactcggtggcagccggtggacctgaagctcgccactcccgtcccctaccccagccgtgcgcggggacgccctcacctgccacctagtccagcgctgccgccgtctccgtgccgcgctccgagcctggacgccgacccccgaggcgcaggacccggccctgctgctgcgctcgccgcggactcccgctagggcctctgcaggcaccgcttttataccgcagggtcgggcgcctcccacgctttctgcgtttaggcggagcctggcgggaccagcgggggcgccgcgcgtggtggccgaggtcagagctgggagcagggtcaggtcagggtccccccagtccgccccgcccggggcgatgtccgccaatgctcccgccagcctgaggccggccaggttcccaaggcgcgcgctcggcctcacccacccccggcgccagggcctcttcaggaccgggttcagaacctgacagcccagagaagtaggttgggagcctgcggc

SEQ ID NO: 45672 - DNA, 617 bp, Homo sapiens
atcagcaaatgacatcttccacgctggaggtggttaatctcagtgtctatctacatgtttggtttggttgttttaaaacaaaaatctgtacttatccttactatcaagagaggactgaatatcactcatcggttcagcatttactaagcaccagctacgtgtctggcacttgtcagagagtcctccctgctcagcctcaattcagcaggctgagttgttccgctcctgcagtgtggcacggaggccagcaggaggcgcggtagcggggcttcccgggacgccgccagaaagaaaggagtgggtaggtcctgatgggaatgaagctagagaaaaggaggaaatgtccgctagaagatggcacgccatatctggagtctgagctttaagaccttgatcgagcctgagggctgcagcttcagacttgccctgtaggtggcagggcggatgccaggcgcccagggacacgaggccacccaatggatgtcaagcaggaggggcagggacagaaaggccccacggctgcagacgcgggaggccccgagccggagacgctcgtgtgaacacaggcgctgctcctgtcacggccccttactcgccttgctgactttaaacagtct

SEQ ID NO: 45673 - DNA, 1827 bp, Homo sapiens
acgagagcatcccagaaagcaaaagtgcccaaaaaatggactcagatgccccctcgcatctgagtattcctgacagcatgtgaacattaattattaattttctgtacctcagttttccgaagccaatctttaggacaaaaaaaaaaaaaaaaaaaaggaagaaaataacttaaatgccaatttgtagttaaagtttcctctttgccttgaagacatcaaagcctgtaatagtttgcctgtagggagtttaattcaaacacagagcggtaaggagatccgggctggtccacacgatcgtctccacaggtctgggcgacctgaaagtgctgcggattggccaagcccagcacggccagtccagtgaacacacgcagggggcccggatggcaccgtttggcgccgaacccctcggcctctctccgcctcccgcccggctcctaacacccggcgccccaagactgagcacgcgtcctccgggtcgcggagcgggcgaggggtcaccgaggccgcggggccgaccggggtcacctgtggcccgggaggctctgcgccgcccccatcccgcgccggccgcctcttccgtgggcgctgggcctgggcgcccggggtcctcgggtccgcggcgtcaccggccgggctcgcggccacgcacgactcacccggccgcgtcgccgttctctgccgctgcgaggctccggaagggaacccaagccggacgctcgcccgggcccccgccccgctgggactgctggggtcacagccccgcgcggccacgccccattctcggggctccagcgtccccgcgcgccgtcgacccacgcgcgttcccggccccgcgcgacccccaccctgcccccctccccgctcgcgcccccggctttcccgactttggagcgacaaacccaagccagcgtgtccgagcggctcccaagccagacacgtactccagagcggggagcgagcgagcagaacggcgggcagaggcgccggagccgccccggacctcaaatactcgcggggaggcgggcggagtcccgggtctcgagctaccgtcgcccgtccggagcgcgaagggagaggcggggcgggacgtgcgggtcaaccccacccgccagccggaggggccgcgagtcctgcccggaggccttgactttgaccacagtacagggccccaccagcgtgtttatggtgcctctgtggagactgaatgctggcctgtttccagaaaagggccggctcctgatacacggccatccactggggagtgcagaacacgcatttaaaaatgagcagactagatacaggtcacaaagactttgctgatgaaacagcttgcggcaaagaagccagccaggggcgggcgcggggctcacgccagtaatcccaacactgggaggccgaggcaggcggatcactggaggtcaggagttccagaccagcctggccaacatggcaaaaccccgtctctactaaaaatacaaaaattagccgagtgtaatggcgcgtgcctgtaatctcagttgctggggaagctgaggcaggagaatcacttgaacccgggaggcagaggctgcagtgagccgagatggcgccaccgcactccagtctggtccgtctcaaaaaaaaaaaaaaaaaaaaaaaaaaaaaaagtagactaaatagcttttgcaaagcaaaaggaatagtcaagcagagtaaacagacaacctacagagtgggagaaaatcttcacaatctatacatccgacaaagcagtaatatccagaatctacaagaaactcaaacaaattagcaagaaaaaaaaatcccatcaaaaagtgggctggc

SEQ ID NO: 45674 - DNA, 1023 bp, Homo sapiens
attttacagagtttacctcttttcatcaacaatagtaaacattgcaatgtttcctaggaacaacagaaaaattatccaaatgatatatagcaatgccaatcagcaatgtttctatacttttgtcagaggcatttgaaccagacctactccatcttgaatatgggtaggtcaattaaggctatcctttaataaatatcatggatcatcaaatatgagagctacgggactgcattcccaggaggttaggcattcttagtcacaggatgagataaaaggtcagcacaagatacaggtcacaaagactttgctgataaaacagcttgaggtaaagaagccagccagaacccaccaaaaccaagatgatgaccaaagtgacctctggtcctcctcactgctcattatacagtaattataatgcattagcatgctagaagacattcctgccagcaccagaacagcttacaaatgccatggcaatgttagggagttaccttatatgctctgaaaaggggaggaaccctcagttctgggagttgtccacctctttcccggaaaactcatgaataatgcactccttgtttagcatataatcaagtgataactataagtacactcagttgagtagctcttgcctctgctctgcctacagagtagccactcttttgtttctttacttctctgataaacttgctttcacttaactctataggcttgccccaaattctttcttgtgagagttccaagaaccctctcttggggtctggattgggacccctttctggtaacactttctagctctcatatctgatggcctatttaaaaaaaaaaaatagtagcagccactcccagtgactcgcttggtaaacctgattgggtcatggatcacttctaaaggacacctagcaggcaggcagcagagaacctgttacgaggccatgaatacagacaaaatgcatgtaacctttcctgccagtgtaaggaagtcaaggaggagagtttaaaataagatgctgttcaaagtgg

SEQ ID NO: 45675 - DNA, 3510 bp, Homo sapiens
tgaacccgggaggcaaagattgcagtgagccgagatcgtgccattgcactctagcctgggcaacacagcaagactctgactggaaaaaaaaaaaaaaaaaaaggaggatagacagggcttggggattggtggatgggtagataaggaaggaggagtctagcatgactctcagactactgacttggaccagcaggggaatggctgtgacaataaataagattgggaaaacaagaaggtgagcaaatttagaggagaaaatgaatttcatttttggcatggtgtggaaggctcgggagagaggtctaggcaccagatgtcaacgtgaggtgaaatggatatagctgaagtcaagggtgtggtgaggttttgcagggagagcagggacctccagcaaggccagtgcataagggagaatagagaaaaaaagaaccagaaaaagacaaggagaggccagagaggtgtggaaagaaccagggaagacagttattcacaacaaacaaaagagggcagagttttagagaaggaactgagcagtttggggctccaggtggggcaggagtgggtggccacggttgaggggcagtggccttcaaattggtctgggtaggttctaatgggtcagattggtcagtcctttccaggacactgaaggctgcagaggtgtgactggatgctggtggagggatgcatggcggggaagctgagtcagatcctgaaatcctccaagcatgcgcctgaaatgaccaagggaaatgaaggcggaggctgctgtcgcctggtggcctgggaagggccaagagccagggagctggagggaggagagaacgtgcgacctcagcacggagcactgtaggggaggcggggctggagggagatggcgccgcgctcccggatgaacagagaaagcgacagggtgagtcgcagggcacagtgtgggatgagtcaccgacagcaaggcatggactccgggaagaaggggagacgagccgggaaagacttgcatcggggatgtgagctgagctgcacccagacaaaagcggctcggggctcctgaaagcagcaggcaccgccggtcctgccaaggggctacttcctgcgcggagtaggagagtaggagaccccaggccagtcccaatccccggcccgtccgggatgaggggggctgcgggagctgcgggggcctcctccagggaggacggttgcagggtccctcggccgccgcccactcccgggggcgttccttcctcccagctgcgcccggagcgcctgctgcctggcgagagcccgcccctctgcaaccagcccgctgcagcggagggcgcctgggtgccctcggccgagccagcagcccacggtcggcgccgcactgtcccctggtggcggagcgctcccgcgacccggctcgccacgcctgggaggggtccaggaggacgcggctgggacctgggggctctcagggtggggccttgggggatgaggctggggcccgcgggaaaccgggctggggcgaggaggctcgcaggacttcctgccacagaatgtttcgatgctttttttaattctgcaaatgtaagcctttccactttaagtccaagctcagcgcagaggactgttctataatacatacaatttagtttaaaaatgttgcaaatgttaacatgtgtcacaaactcaagcaatccagtattatagaaagcaaagaatgaaatgtgctgcttctttctcccccagacgcccttgcatacattaagatatgtatatatggaaatgttaccgggagtcccggttatcccaaaaagggttgtttcctgttgcgtggtgaggccaatgcacgaaaccgaaagggagtgtgtcaagcagtgcaggctgtattcaatggctatggaattggaagatctgaaatcaacttagcttgtgagagctgggaagtttcagaggtagggtgtctttaatgaaggggctgggcattaagagcacgggggggaatattcgtgctttccttgggaaagaacggagatttttcccggaatcaagaaacccctttttttctgtcccttcttggtctcttccagtcgttgtcatggcgacatgttgtttagcatgagaacaggatgatgataaagccagaggctcttcagaggcgccatcttggatttcgccagcttcagctggtttcgtcctaagaaggaacttcgaaacacaggcattctttttcctgaaaataagcagagttacagctgagtaggaatttagctctgtcccatatgctatcgcattgggcagcaaaagcagggtggggtccagcgaaatcagcaggcactgcaatgagtaacatacccagccacgtttatgcagcatttttacgaaaatgaaaccatactacctgtaaaggaagatatgctaacaaacaacaaaactggcaggaaccaagattcctactgacactacccttagttttaattttccctgacaacaaatgaggttaacagagcataattatctaccgtgaccccttcaaaaagacaggctgtatacatttgcactaagagaagaaatcgtgtaatgtcagcaaatttcccccacttaaagcttctctatttaaaaagcttcacgcacacatgcacgcatatgtcttcaagatgaccacaatttattttgcagtcattctttgcaccagttcccaatttttcccactagcttgcaagctccgtgactcgaggagaccgggggatcagagtttgtttttgcggagaagtgagtcctttatgccccaaatagtgactgacatagagaaggtactcagtaaacactttttaaaggaatgcctgcctgactgaagcttaatgatgtgaggcttctagtgggataccctaccttgttttaacctgaagtgactcttccttagctaagagagccagacggactccatcgtgactccttcactcgcagccccttacccacccccttcctcaaggacttaacttgtgcaagctgactcccagcacatcaagaatgcaattaactgataagatactgtggcaagctatatccgcagttcccaggaattcgcccggttaatagcacccagagcccctgcgtttgtgtccggttgataacgcccaaagcccggcgtccatcaccttaggatagacttaaagcctctgcacctggaactgtttactttcctgtaaccgtttatccttttaactttttgcctactttacttctgtaagattgtttcaactagactccccctctcccctgtctaaaccaaagtataaaagaaaatctagctccttcttcggggccaagagaatttcgagcgctagctgtctctcggctgccggctaataaaggactcctgaattcgtctcagagtgtggcgtttctctgtaactcgctcggttacaacactaggttaatctttttcctttaactgtttgtttaaaatatattatgtttaagaccttctaactggtcagcctccaagatagtattgtgctgggcttg

SEQ ID NO: 45676 - DNA, 2307 bp, Homo sapiens
agggcacattctcacctctgaagacaaggagaacatcatcagcacatagaccaatcccagcagtgcaccttaggatggggagggccactgtgagttacagcaaaatgaacgaatgaatgaaccaataaatgtctgagagggaaagtcccaacgaccctcaggaggtacaatcaagagttgcagttattttcgttaggaacgttctaaacacaggggaaaccttccttccttctgctctattgttggagtggggccatcccgggacaccagaaatcaaggaattgagtttggagaagggacttggggaggtcacagtggcaggtgactgccaaatgaggtggcagaagccagcaagcgctggaaaaagtcggcccaaactgttcaccagcaccgccccccataactccccaccggctctggtttcaagactttccgttttctaggtatttccttggccttaaaccattttcctttaaacgaactttttctgtgaagccatccggtttcccccgatagtggcatctcacaaaggacaatccagtatcccaacagcgtgttgcgttccgcgggacgcagatttccttcacaggcaccccccgggttgcgtttttatagccacacccacccgcccccctatctcctgggcactgctaatgagtcctgcatttctctcctttggtctttggataaatgaaccatccgtgcgtgacctttgcgagggcatcttgcataataccagtacaccagcggcgccgtcggtgagtgacctttgggactggtttctctcaccagcgtaactccccgggagatccgagcaagctgatgagtgtatcagtggctcattctttctgttgcaccacggaccctcattctgtaaccgggataccagccagagatggggagcgggaggcgcagggcaggggcgtccctcctctcagcacagcctccccgcgctggatttctatcaatccagtttccacctgcctggaagtcagcagggtcctccccagtcccagatcgccgggcgaggccccagatggacctcaggggcggggagtgggcggagcttaggggccgaggcgaggtgtgggtggggcgggacgccgctgtggaggcggggcctgggcgcggacgggcgcggagcgaggcaccgcaccgccggggcggggagtgggcggggctcgggggcggggcggggtgtgggcggggctcacgggcggggcgggtgagtgggcggggcctcggcgtggtaggcgcgctgcgtaaagaggcctgcagtcccgcggcgcggggcaggttccgggctgcttaggttggcaccggtccgtggtccccgggggcgcagtcgcagcgctcccgccctccaggcgtcagcgagtgcgcggtccagtgcggccggaacctggcgcaactcctagagcggtccttggggagacgcgggtcccagtcctgcggctcctactggggagtgcgctggtcggaaggtgagtgatcccctgtcggggaccgggggacttgggaaggacagttcccggactggacggccagaacgctctcagggatttcagctggccggccatatggccctgtgggtcgtcgcgcccgggccagggaccattctgtacataggatcgtgcttggctctcacggaacgcgcccacacgcagggtcccggtgtcgaatcgtctggtggaatctgccctcaaccctatggagcgggtgctggtatcatagtcatattacaagtaggaatcagcgggcccaaggtcagtctgtaaagggggtaccggggtttaggcccgtgcgctgcccagcgctgccctgaaggcgcggctgaaccactggtttgcgctgcctttgtcaaggacattgtggcactgtggaaaaaatgaaaaatcagcttctctaacctataatctctctgggaaaaaaaaaaatcagcttttttttttttccccgagacggagtctcactctgtcgcccaggctggagtgcagtggcacgatttcggctcactgcaacctccgcctcccgggttcaagcaattctcctgcctcagcctcccgagtacctgggattataggggcgtgccaccacgcctggctaattttttgtatgtttagtagagacgggtttcatgttggtcaggctggtctcaaactcctgacctcgtgatccgcccgcctgggcctcccaaagtgctgggattgcaggcgtgagccactgctcccggccctctttttcttttttcttttttttttagaagagtctcactctgttgcccaggctggagtgcagtggggcaat

SEQ ID NO: 45677 - DNA, 1227 bp, Homo sapiens
actcattcttcttcctttctttttcttttttttttttttttgagatggagtttcactcttattgcccaagctggagtgcaatggcacaatctcagctcactgcaacctctgcctcccgggttcaagctattctcctgcctcagtctcccgagtagctgggattacaggtgcgtgccactacacccagctaatttttggtatttttagtagaaatggagtttcaccatattagtcaggctggtctcaaactcctgacctcaggtgatccgcctgcctcggcctcccagagtgctgggattaatgaaccactgcgcccggccaaaaatcagcttctttaacctttaatctctgaaaaaataaatcagtttaacctttaatctccgaagatcacagccaaagaaatacatgaaaaggaacaagtattaaataatatatacttctagctgtgctgtttatagttttgggaaaaaaatggaaataacctaaggtcccagaaataggaaaatgggcacaaaagggtatgcaggcaatggtttagctgccgcatgaatacacactgaatacactgtgagatgttgtctgttagaatgcccagcacggggactgtccacatggaaagaggcacaggaaaaaaagtgaaaacattataaaataacttcttaaaattaaataatgtacacgtcaaaaatatcagagcccacttgacctggtatatacagtttaataaccacatggctcttttttcctgtaggcctgggtaggtgcatagtttctaaaaagggagagaactgtcactgctgtggatggggtgccaagggaagtgcctggggtcaagtgaacagtgacacaactgcaagtcaagagcctgtgttggagtctttccccactatttcaaatagtatagaaaatagagctgagtcactcaaatagagctgagttagtcactcagctcttggacctcagattcttattcttaaccgctagggggatggagacagaagtcacaaactcacatgccaccagccatatgatgtaaacatgtaaactgggccaaggaatacaaaagggagtggtgagctggggacactgaagaatggatgccctgtctagaggagtgaaaatgaagcatttcatacaaacaacatgatttcgggcaatcactttgggaatcaggataaggtgttcccccagtctgcagaaacactggcaacatttacaaaggtaaat

SEQ ID NO: 45678 - DNA, 1174 bp, Homo sapiens
gactccattactagcaatgagtgggacacatttcctaacccatacacacgtttgttcagctggacccctcctggcaggagggctcatctctgggcaggtgctggggccacaagacagatacgaatggaactttgtactcttcggggacggtacggggggcgggcaagaaacaataaacaagccggcaaagaaagcgccacaaaattccaggtggcggtaagtaccaaaaactatggtacctaatagtgataagcaaataaagtactctagcggatcaaacagcaggggaatgtttgctattttagataagtggtaccggaaggtgtctcattgcagggacagtgaatggtgacctagaacctccggggaggctgcaggagggaactgcctctcccaagtccctcggtctccggtaggagatcactcaccctccagccagcgccggccggggtaggagccgcaggtctgggaccagcgcctctgcgaggacagctctctgagttgcgccaggttccagctacagggccacgtcccgcagaccaggagcgctgcggctccgccctgggggaccaggtacccgcacaacccaagcagcctgggaccaggcccgcgggactgcaggcttgtttccgcagcgcgcccgccacacacaggccccgcccacgccgaggccgcaccccgcctctcagccccgcccacaccccgcctccggctccaagctccgcccacgccacgccacgccaccgcagtccgcctccgggctcgtctagcccttcagggctggggaggaccctgctgggtttcgaggaggtggaaactggacccacaggaatggagcgcggaggccgggcgcggtggctcacgcctgtaatcccggaggccgcgacgggcggatcacctgaggtcaggagttcgagaccagcctggccaacacagtgaaaccctgtctctactaaaaataccaaaattagtctgggcgtagtggggagcgcctgtagtcccagctactcgggaggccgaggcaggagaattgcttgaacccaggaggcggaggttgcagtaagccgagatcgtaccattacacttcagcctgaactgcagtgagactccatctcaaaaaaaaaaaaaaaaaaaaaaggagtgctgggactctgtgcggggaggagggacgctc

SEQ ID NO: 45679 - DNA, 961 bp, Homo sapiens
ctgtcaggttctgaacccggtcctgaagaggccctggcgccgggggtgggtgaggccgagcgcgcgccttgggaacctggccggcctcaggctggcgggagcattggcggacatcgccctgggcggggcggactgggggtagacggatctgcctctgcgcctagccctgccctccgccgccgcgcgaacgcgcgcgcctccccggctagtcccggcaggcggagccccagttagactgctcgtcaagtgtgggaaaagctccgtggcgtcacaagctactatataaaaggcggtgcccgccggggccgagtgggagtccgcggcgagcgcagcagcagggcccggtcctgcgcctcgggagtcggcgtccaggctcggagcgcgacacggagactaggtggcaggtgaggacgtccccgcgcacggccggggtggagcacgggagtggcgagcttcaggtccaccggctgccaccgaaagatgggacctgaagacaggagaggtcgctcagccaagagccccggggaggcggtggtgtctcggcggggtcagcaacggtctgtggggggtcccctgcagcgcgcagccggtttccgcctccgcagctcccagccagcgcggacgccgccctccccggcgcctcctcgctgcccttccctggccgaagccctcccctgcagcctcctccccacctgccggccctgtgttctcactgctcctctctgctctgggatccgcaggatgacgtctgtcctggttcttcttctgtctttcaaagtcactagtctccagttctaaatccgagcactcttacccattctaattctttcagtaactcagcgaaacggatggggcccttccttccccggagcactcctccagggactgagaatctgcagagccaggctcagcgctcgcctgcagagcctgcggtctgtgggacccgccagcaagatgagga

SEQ ID NO: 45680 - DNA, 2059 bp, Homo sapiens
gccaggctggtctcgaactgctgacctcaagtgatccgcccgccttggcttcccaaagtgctgggattacaggcgtgaacaaccgcgcccggcctgatgtgcatataattttattatttgatttttaatatacatgaatagcatgcagttccaactttgctcgagacttcacaattaccattttaaagggctgcaaaataatcacatttcctcctcaacagccccactttacagatgaaggtagaggaatgctaacttgcctatgctaacccgcagagctctgaatcctccggatagcgcccccgctgtaatccacccagtgcttccctccagacccttctccctctcgtgcgcgcggaggtttcggtttcctcttttacgtaggccgccccactcgcttgaaaacaaagtccgcgatcctctagcccgcaagagagctccgggactcagaccccgggcgcgaggtcccacgagcggcggggcggcgctctcgcggtcctcctccccggcaagggccggggcagggggaggaggcagcgcgaacagtccacgccctccagccgggcgcgctcgacgcggacggcgggccagctgccggagcgcggcgactccaggggacccacagctggggcgccagagcgcggccatccgggcggggccgacggagcgcggcaggacttggctggacggcgcggccacggagaagggcgcggtgagcggactggcaccgcgcggggaacattccggaggccgccgggctcagtcccggtgacccccctggtcggggttcgcgcgccctcccccagcacgcccgggcaaggctgccgcggcgtcggagtaatccccaaccctccgccgccgcttcttccctcacccgggcctccagacgtttgccgcggaaacgaaagtaacgctcgggtgcttgcgtggaggccggggcggccgcgggcttcccggaaggagagggactctgcccggggtgcgcgcggcgggcgggccccgccggtaccggaagtcgggcggtgggcggggccgcgggcgctcccggaagtcaggggtgctccgctaggtgtctctgcttatccggagtccgctggccgcctctgtgccagaggtcggggcgctggactggtagcgggcggagacctgcctttgggccgcggttaccgcgtgagggtggaataggcagtcccacacgccattaatgttgttttggtggagaaggtgggctcctagtgccctatcattaagaaaaaacagtttgggctcttcccttaccagccctttgaaagggccttttactgttgcgcttgaggccgcagcaggttccaaaaacaaaagcatttctgcgtgatcttagacgactgaggggacgaatgtggtaaccctagcaggcttctgtcactggcaggtgcttttgtgaagtgctgcggaccctcttgagggttgggaagaggataggctgcatcctccttccctaagcatttgacaaagcctcacagggatgcgggggttgcgggggcagggggaggtctggggttgttagttctttctctcttgctgaccatttggctctcccttaatcagagctcttttttattttgggcaaagcaggaggctgttccaatgattaattcttccctgacttacacttgaagaagccaaggcaggaagtgaactttgaaatgtgcaatgtcttagtactcatctgcattctgtgactgctaggaagatggactgagtcaagaggaaattgtcttgttagaaatgtggaatactgcgtcgggcacggtggctcactcctgtaatccgagcacttcggaggccgaggtgggaggatcacctgaggtcaggagttcgagaccagcctggccaacatggcaaaaccctgtctctactaaaaatacaaaaattagccaggtgtggtggcgggtccctgtaatcccagctacgcgggaggctgaggcaggagaatggcttgaacccaggaggcggtagttgcagtgagccgagattgccacttacactctatcctgggcgacagagggagactctgtat

SEQ ID NO: 45681 - DNA, 629 bp, Homo sapiens
ttgcattgttctttttatattcttcagattccttcttttgttcataattacttaaacctattcattttctaatgcctttcagttgttaatttactgaagttctttggtgcttactagtgctgcttgctgtagctgcagggtctgtctcacagtgaattttttcttttgtgttttataattttggaaagggagctcatgttaaatttgtatttgtaggaattctgtctggcctggcttgaggttgttgtttgctttagcctataacctcaggatggcatcagcctgtgaccacttcctgtgtaaaagttcatagtttaggcgatcctctcaattcaaagtctgtatctatttcaagacaggcccaaggttataaatttgcacaaactttttttttttttttttaataccttgtgcccagtccaagacaaatatgtttgtttgccatgggctgctttttttctagttcatcctttcatcaaagggttgcacattgagcagtgccgtgttaaggggggattcttcattctaccttcttttcttgtattccttgacctcagctgggctttaaaccttgacttctggatggcgaggttggcactcccctgtgtgagctactgcctgcctccggt

SEQ ID NO: 45682 - DNA, 1886 bp, Homo sapiens
atgtatctgtttttggacacttaaattgcctccacccttttggctattgtgaatagtgccgctgtcaacgtgagtgtaaaaacatttcttcttgtacaccctgttttaaattcttttgggttatatacccagaaaagaaaatgctggatcatataactgatttgttgaggaaccgcagtattgttcatcacatggctgcaccattttacattcccaacagcaatatacaagggcttcaatttctctacatcttcaccaacactaatttctgggggttttgctagtagccatcctaatgggcgtgaagtggtataaacaaaatttagatcccatcatctccgaaaagcaaatacacttcctagtactagtcagtactaaataggtgcacagcgtttagaactttacttgatccaacatagcagcctgcctagagccggagccccgcccactccggagtcccgcctggacgccgacgcagcgagggcgctatggctggcggcctcgcctcctggaaaggccatggtcgctgaggcgacgagcgagggcggggcagcgccgacggggacactcatcccgggagccagagccagcaccgagaggggacggtctacgcgggtgccggcggttccaggactgcgaaaccacgagccgagtttcggtcgcccatgggaaagcacccggcagggcgtggcttcggggcggggcgggcagagggcggagcaggatggagaggcgaggtgggcggagcagagggcgtggcttcggggcagagtgggccgggtaccgcgcttggtcttagcgcatgcgcactcccggcagctacgcgacctgtgaccatggtggctgtgctgggcggccggggcgtgttgcgcctgcggctgcttctctcagcgctgaagcccgggatccacgtcccacgggccggacccgcggccgcgttcgggtaatggcggccacctcgccccggggatccccagcatcggcgcgctcgaggggcggcgggaggggcgcgtgccgacagcaggagttcccggcgcgcgggcacggggcgtgggcgcggcctggctgccctgtcgccctttgtgccgcgagaccccgatcctgggggccagccgcgcttggtgctcgagcccctcgatcgtgcatgcgcctcggtcagcctcagttcaaggagtctggagccgtggaggcttgggctatagagtgcagccccttcagtgtgcagaccagagagacccagggagatacatttgcctgtagtatggactcacccgtgacggagcacggactagaatcccaacgccctcattagtccattgctctgtccagagtccacactaagggcataaggacaataatctcttctttctcttatgtcagaaatcagcctgagcctgagtaccgctaaggctttaatcacgggtcccgagagccctaagtcttctctttgcttgctgatctcgtaccttaatgtgcaaaagaatcacgttgggaactgaaaattcagaatcctgggcctcactcccagaggatctgatctacatgtgtggagatgcccaggaatctgctttattctcttttgtcctcccacctgtccccccatttcaggtaaaacaataacaaaaaaactggattaatttctgaccttctgtcttgaaaatggatactcttggtcccaagagatactgggcagaaatgtggatagagcggcatgaagcttgttttactttattctctacatacatccctacacacatgcaaacacacgtatacaacgaacgtacacagtgcatgtgcgcagttgactgttgatgggctactttcataaagtcagtactagataggtacacagcgtttagaactgtacttgatccaacatagaaact

SEQ ID NO: 45683 - DNA, 611 bp, Homo sapiens
aatctttaggctattcaccttagcttagtaaaaaaaaaaaaaattaaaaatctggaattttagaattctactttgaataacttggaccaaatctcataaatttctttgcagatattatagagatccctctcatgtgtaagtcattgttttaagaagaatagataacccagaagcatatctgtgaattaatttgtatacagtttcattaattctttcctttagaaaaggaagattaagccaaagaggtttcaaaagtgctgaaataatacagaagcaaaggaagacccagggcctctgtctttctcaaaatagccaccagggggaggtcggaggcaggcctgcactccgccgggaaaggaagcgcgcctcctttttttttttttttggtggagggacagagtcgcactttgtcaccagggtagagtgcagtggcgcaatctccgttcactgcaacctctgcttccctggttcaagcgatccgcccgccttggcctcccaaagtgctgggattacaggcgtgagccaccgcgcccggccccttttttttttttttttggagactgagtcttgccctgtgctcaggctggagtgcaatggcgcgatctgggctc

SEQ ID NO: 45684 - DNA, 1458 bp, Homo sapiens
ggcatgaaccaccgcgcctggccaatttttgtattttttgtagagacggggttccgccacattgcccaggctggtcttgaactcctggacttaagtaatccacccacctcaaccttccgaagtgctgggattacaggtgtgagccaccatgccgcccggcctcacaatgttttattttctcattggtttggctggttttgtttgattttagatccaccaacatgtttgcccatttgtttactcacctgttctttcttctcaaatgttccttctaaaagcatttatcttctcttcttcctgaagttatttttagaagttatttaagggcagcctgttaatggtcaactcagtttttaccaacaagtgtcttttctttcatccaccttttctgtaagtctgtttagctgagtgtggaaatggaagtggaaaatcattgtctcccccattctgcagtcttctgccttccatccttgctgttgagaagtttcctgtccgtctacgtggttcctgcttcggagtgatgtgtcttaactctctggctgtttttcagattttctccttacctttgatatattgctgttttaatatattctgtccaaatgcagatttcattttacttgtcctgtttggaatacattgcgtttttgtttatggattctttgattcattctgaaaaactctcccacccattatttcttcaaataggcatctcgttcattcttattctcttcttctgagacgagcggacttttgtaaacctcgtctttccatcttccttatctcttctgcatcgtcgtgtctctctgcgtggtgttctgcataatttcttaagatttgtcttccaattttctagtttttttattaactttataaaaatcctgtttgttttgtgacctttggttaggagctaatatttactcactcttaatctgaaaataaacaaagcagtgagcataaatcgagagcgctttccttccgggaagatttgcatttgttgctcttgggaaccacaggatcataccaggttggggccatttttagctcagcttgatccaggagtctcaggttgggccccggcctgcctgcgaacactgcgtctccacccagagcaggcctgcctttggagctggcttacttcctttgctgtattttcagggttctgtttctcatgtgcagacacactcatacacactcacaccccggtttccattaaccactgcaacttcagcaatgccacagaattctgttttgtgaaagatctagttattcccctgcaagaaggcctttcagagggtatggtctgccatacggccaaaagtagaagcatgtgcagggacgttttgctagccatcttcacactgtcttgcttgcttctctctcccttaccctccgcccccaaatgttttcttcttcctacatcttctccccacctcttcaggctgtctccacgtacctcat

SEQ ID NO: 45685 - DNA, 3661 bp, Homo sapiens
aattcactaagcacacagtgagtgcctgccaggtgcctgacgttgtccgggactctgtagagattgttgctcatgtgagttcatgccattagtgttatatttcttccatgtgtaacgtgtagctctcaggaagcaatatttaatatgctcaagagcattagaatctttacttatcacagtgtatttaaagaaatatagaaaacattggcctaaggaattgcatttgttgattcatgttaatggttgtttttagctattcttccctactagtgaatcatctataatacagtttgaagtttggtacttagccttttacacccatatttcttcggtagcagaaattagaatgaataatttgtgtgcatttttcaatgtccatacaaatgcaatgcagaaaaaaactcctcttttgcaaacattgtcgctcttcctcaggtgaccctgttagggtcatattttcttttatcttgtatctttaaaggaaagcggtaagtgcagctctaatttcatccacttggtaagcattgatttgtgggcctgtattgtgggaggcactagtgtaggccctggggtacagtggggagcaaagcaaagtcccttacactgcacacaggtcctagtgggaggcaggcactcagccctgggtccagaaggcaccgcaaagcagcaaccagggctaagccgagcagagggagggagggaggcattccaggcagacgagacagtgagcgcatgggctcagaagtggctcttgctcagaatacttaaagacaatactttagtatgaaattaaacctttcttcgcctacacttctgtttttcaggcatccgagatgtttccaaatggagtgagagaacaagaaagcctctagaagccctctatgggtatgactactttgccagaacctgtgaaaagtgggtggatggcataagacagtttaaacatctcccagatggtaggttactgggcttgaagggctctctgcctgttatagagggtgctcgagttcctccccagtgttctggaattgctcagtgattcatgaatctgcccatcgccctcacacgctcatgtgtgagcagaacagagaatactagttcttgtgtactgtgccagttcttgggcagtcaatctggcttaacggagaggtaggactgcgtgtccaaaggttcacattgttgagtctttaatagcagactgctcttttttccttctaatccttggtgtgtgtgcgatgacaaaataattatccagaagccttaaaccgtttctattttctaattccagaatgagtaattcgaaaataaataggccacaatgtgtacaatattttttcctttttacacatttagatgtgtctccccacgaggacactgttaatctttaatctcaacggaattaatatgaggaagaaaatattctgttttttccatcttcagaactaagtgatatgactgtaaccatgaacaatgcacaaatgtctcctattcttttttttttagatggagtctcactctgtcaccaggctggaatgcaatggcatgatctcagctcactgcaatctctgtctcctgggttcaagcgattgctctgcctcagcctcccaagtagctgggaccacaggcgtgcaccaccacacaggcacattttttttgtattttagtagagacagggtttcaccatgttggccaggatggccttgatctcctgacctcgtgatccgcccaccttggccctcccaattgctgggattacaggcctgagacaccatgcccagcctcctattctttatctgaaaaattaacaagatttccagttaaagtaagaattgacatctttaagagaaattctgaattatagtttattttcatacagctgtttatgtttataatctcatttttttttaattactgagaaaatagagtagctaagatctaatcttggagtgcattgttacaaaatggttgtgattgaaggaccaatttgatccattaggtaatcatttcctgcatgaatcatctgccaaaactttcacaatgaaaaggacatttggaaatgttactcttctggtttgagttgaaaacagcaaatatatcaaatgtatgccttataatgtttctgttcagatgcagcatccacccatggagacaggccctggaaatctctgctcttaaaacaaaaaaatgccatgaaacgatgtttgagacagttctccattaaagagggcacatttgtaaaatgtaaacttggatgttttgttgaagagagtagtgaaaagacaggaagatttaaaggtggaaatagggttaaatcagcaattcaaaaatacgttcatgatacagaggctgtagcagtgtataaactgtctcacagcgagggccttcgtgatgcgtcccccttctgtgctgactcatttggtaggagccctcttttccgactgtcctctcaggtttatggatgcttggtatagtgtagggattcattgcattgcacggctctggagtgcgatggccctgagtgtgagttctgcctgtgtccccggcttgctgttagaatggatctgggcaggtaacttagcttcttgaagcttcggtttcctatctgtgacctcgaaaagctgttgttgtggggattaaatgaggtattatctattcagctttggtgcaggatcaaagacagagtaagtgtctagtgaaaggttggtattactgttattacagaagtccttaatgaacaaacatttttatatgctgaatgagttaaaacatgtaactactgtgtttaacagatgtgaaattgtttaaacagttgctggcaccaagtgagcactcaggcatgttgactttgatcatcacgtgatgatgcagctggccggtgtgtgtcatctcgggacaggagagggaagtgtcagagacctggagaagtatttccctagtcagcaggtccgcttctcacttagcaggcagtgacttcccactgaagaggagggaaaggcctggggcccgtgcagggcgggggagcactgccccgtcggggcagctcccagccttctcagagctgcagtgccttcctcttgacacacacggagagggaatggagaaggaaagagctagcttagggatgccaggaaccgcagacgcaactctctttttagccccacaacagccccggggaactgtgattgttcctgtttgtggctgaagctcccagtggttaaggagccaccacagcctcacagaggcaggaaactgcagtacagggactagggcccaggctgtccatcattgcctcaggaaagttctcataaatgggggtaagtccttacagtctctccaaagtatgttagtcaggagtgtcacagatgcatcagcgataaggagaagctgctttaccgtgcgcaagttgtataattaattccttgtgaggttcatatgctttgagggctggccggggcccctacactcatctgaaacgtgatttccagggaaaagctctacaggtgtcaagcacctaccactgttttcacggtgggaaccgccactgtggaatatagtggtggggtgtttatttgattttcctactattttatgcgaatttaaatcaggctgcttatttactagtagaactcagaaacaggcaaacaaacaagaaacagagaga

SEQ ID NO: 45686 - DNA, 2054 bp, Homo sapiens
atgattgatgggtcgtggcaggccaaggacagggggacccactctgtggctgcctccagggatcaagctctcttggcacagatcccaggcactcctgcaacagtgcaggtttaagccaccgatctacatgctggcactgaccaccggagggactgggcgaagggcagcaggagcctgggagggcacctgggcggcagtggaaggagctggccatcgtgagggcgctggctgcattgtgaatttgcggcggggaggctgggtgggcaacatggcggttctcaaagagaccacgtccttgtactggcgcccgcccccacccatgcaccagacccgctgctgcctcccacacagcggtcggtaattgcagcccccacccagcgcagtcacctgccgcctcggggactggcagcaagactatcgcgttgtatgtcatcatgtcaagacagtgcccgagcaagggaatttatctaacacccttgcctgtacgacccaaagggacgcctctgttacatctgccagtccagtgacactgcatgttttcattcaaaccgtagagaaaaatatacaaattaaattcacatgaagctagcgcaataaatatgaccgtacccccgacccaagtttctgagacaaatacacccaggggaatgccaaccgcgtcccgcagaagggctgtgtcccagggaaatcgaaaggcccccgattaaacgcacacacagctgcggcgctgcgggcatcctggcgggtcatgcagcctcccggaccccgcccggcggcctcgccgcggaatgtgccacccggccagcccggggccgccgcggcctccagcccccgccccggccccagcccgcaccctcggtcccaaccccgggcccctccgtggcggtgagcccaccttggcgccgatctggttgccgcactggcccgcctggatgtgcacgatctcgcgcatggtgccggctgcggagcgggtggcgctggccctcggagcggtgcgcggcgtggaccggcgggctgggctgcgcagagacctgccgccgcccccccagctcggtcttttatacccggggacccgccctgcccggtgacgtcatgacgggcggggctgtggccgcgggggcggtgcggctgggactgcggcaccgcgagggggagccggggcgcggtgcgaggtgtgggggcgctcgccctattgctgctgccgctgggtctagggtgggcggccggcctcgcggtccggcggtgagtgcggtgcccgggcctcgggcccagccgcagccccctgcccgatccacgggcacgggcgacccctggcgctgggtcctccgctcacgccgcgatccccaccccgagccgcccactctggacccccgaggggggctggggaccgggggccccggaaccagggggaggggctgcctcggaacagggtcctcgcctcctaaggacgggaagaggcgtcgagtaccctttggagtagggggccggaaattgaagacccatttgcagtgggctctccagcgggtggcaaaggtttcccgcatcctgggcagggtcctggacgccgtttgtgggggtggggtgggcagcgtggagaggagtggggggccgcggggagccgacgggcagctgcctgaaaggaatgccaggatggcggggtgggcggcctttcgcccctgcaggggaggaagatggcttggtcgggggcgggggttgggggggctatcaaagggctggatttgtcacatgtccgctttgggctcctgcgtccttgtaaaggccttttaaatgtggaaaattctgcgggtgtgtgtgtgtgtgtgtgtgtgtgtgtgtgtgtgtgtcagagaggaaagacaggaggaatatatctgccacgttgatgtgtcagctgatggccctgccccttacaccccttaggtcgcctgatcctcacagaagctgtcggagctaggctggccagttcggtagaccctaggcacggtggctgccgagcattgaaacgtaggtaatctgaactgagatgggctgttaagtgtgaagaacacactggc

SEQ ID NO: 45687 - DNA, 1725 bp, Homo sapiens
gtgaagaaatactatatcttcttctgctatgacttagacataatctcacaaattctcaaaaatatgtaacctactcccaactgtcattctccccataatctgaggtgtccagagcataccgaattatctacagagcaaactcatctctgcttcccatgactaaggccgtttagaggactcagtgccctcctgccgcgttccctgactgttgaaaagcacagggcctagagttgatggactgggtgcaaatcctcactgtcacttcttagctgtgtgacctcggcaagttacttaacctctctctgccttagttgcctcatctgtaaagtgacagtaataatagtacccgcttcctggggttgtgataaagactgaatgaatatgtgaaagcactcacaataccacctgccccacagtgttatataaatattagctattataacgggttaatcccgtcctccccccactccctccctccctccctttttttctccctccttcccctccctccctggagctcttctggaatcaggactcaactccagagccacttgcgaggctcccatgcggcgagactgcggtctccgctggccgcacgctcttctgcatacagctccgcactacactcctctcccctaatcccgaggctggcgctgcagagtgagcgagcgcaggatcgctaagcgcgagccgaggcgccatcggaacactcttgcccccacccagacgtcgagtctgcaggtccagggcagagggcgctgggcggcgccgggaggcgcgaggcacccgggagagccggctccgtggcttcctactacctgaccccctgaccacctagttctggagccaggcttcttcacccttcgccaggtctgggctgccagggactcggggtggggccgccacgctgccttctccttccgtccggagcgccggggcgcgcgacccgctccgtttcacgctctaggcaaacggtagttcgggaaaggctgagcttcgccccctccccgcggtgagagcgcggcgcggcggggcggggcctcctgcgggcgggagaggcaccggggtccaggggccgcggcgcagggggagggcggggctgtgccccccggaggccctgcccgccccgccccgccccgccccgccccaagacccgggttccccctggaggccgccaccgcccgtccctgcccgtcgccggcaaggcctgagcctctgtctcaagatcggacggcctttgcagcgggagcaccaaccaaccccacaaattcatgaaatactaggcgggagatgcgctcaaaataggacgtgccttttgttttttgtagctataagagaatatcgaagtacttttttttttttttttttttgagatggagtcttggtctgtcacccaggctggagtgcggtggcgcaatttgggctcactgcaacctccgtctccgcctaacagccctgtcgtacaaaaataacaatagggaacatctgaatagggggtgggctaattttgttaaatttactttttgatgcccccacgttttgttgctagtgttaatgaaatgccaccaatggctggcttaaatgtagtgctgccaatgtatatattctgtgtctcttctcagttaggaagaacatttgttacttccactacctaaagtttgcccggcatggtcagttttaccagtagtcaccacaagcacactgctaattagttttccagaccta

SEQ ID NO: 45688 - DNA, 1080 bp, Homo sapiens
ggagttgaaagaaagagactgcaaatccatcattatttccttacacacacacacgcacacacacacacacacacacacacacacacatcacctcttctcatagctctccatttagaaatattggaaagctaccaatcctagcatttatgtaaaagagccaaatgcccggggcatgggggctaggaagcggtcgcagccccatactgtgactgcggaaaggacacagtggaggaagctcccgggatccgccaagatctgcgccttctcagctttgtcgctccccagtttctattccattgccctcccccttccccccaggccttccctcctccgcctgggaagccagcggccccggcggagctgcccggcactgtttagtcgcaggggctgcggggtggcagcctcagagccctgtccttccgcagccgtgggccccgcagggaccagccaagcagggcaaccaaaagctggaaccagcagcgaaaaccccgagcccacgaacgcagcgcagtgcgggaacacttgccctttgttcctcagtaaggccgggtgttttcgcatccccggaggttgtgaatttgagttataatggcctcggtcgggactgagagagccgagcttccacgagagagctttgcctgctttgtcctacaaatcggcggagggagtagcatcctggcttttctagggcgccatttccctgctacaggcaatctcccctcccccacgctgtcaatgatttgtgggattcttaggcaggcggggcaggccgagcccagggaatgcacgctgagtcctagacacagagccaggccgggtggaaaacaaaaagagaagaagtgattatgaaataataagacggaccgtgtgccccttgcaaggtgcggcctgcgaaatcaacagacttataaataaggtctggtggaagcgcaggagcgcacgcgggaggctatggcgggggaacctctgtgagttccgcggcggaggctagaacatcgctgtggctgcgggaccctcacccggcgctgaaaaccctccacatcagctcctgctcggaaatgtctccgcagctcaccagtg

SEQ ID NO: 45689 - DNA, 1644 bp, Homo sapiens
gcccgtggactcctagaggtcactgtcgcactctgctactcaagtgggtttccccagcccgtccagagaggtactggtgtgcgggagaggccagcaagacaaccagggacagctactccgcccagggccggcagccgccccgcctcgaccacgcccccaacccaagcccgggatcgcccctccccgaccacgcccctcacccccgcccttccggggccgaaagcgaaagcgcgctcggtctctcggtgctcgctccatcgggtctggcggggctggcagcggcgaggacccgggtctggcgctgtgggccgggagccgtggggcggcatggaggggctggttgtcgccgccggcggggacgtctccctgcacaacttcagcgcgaggctgtgggagcagctggtccacttccacgtcatgcggctgacggactcgctgttcctgtgggtgggggccacgccgcacctgcgcaacctcgccgtggccatgtgcagccgctacgtgagtgcctggcggccgagggtgcgggcggcggggcgggggcgcgggggcgccgggcctgcgcgagctgcagccccccaggcttctcttgggtccacagggcgccctactcccccgaagcccacccgtgggatgtcttaggaagcccgcgggcgccagggcctgcaccacctcgggagctgcgcgcgggccccgggcccctctccttgtcccgccgccccgcagctgcgtcccgcactggtctctgtaggtcagaatgtcttgggtctgtcctcgccacacgctcgctgggggacgcgtctgcctcgtagctctcctgccatctggattttgagcacactgataattttttggggactcttgcgtctccactggatgtctcaggcatttcgcactaggcacacatcaggctctcttctccaaacctgctccctcctccgcctgactggcgctgtgatggcagctccatcttcctggctgtgcgttcagagcctcgcagttgtctttgattcctctttcttcacactccacgtgctgagtccctaggcactgccgccagtcaaagcagacaaaacccaagccgccctcaccttcaccctgccgcgctgggccaagcctgggacattatcatttcccctcctctcccgcctttccggctttgcgtgtcgccgcctggtttctcctggtttcctgaggcagctgtaagaaagtgccacagaccgcgtggcttaaaacaacagaggtttattctcaaagatctgtagacaaggtctctcactgtcacccaggctggggtacagtgtcattattatagctcactgtcacctcaaactcctgggcttaagtgatcctccttcctcagcctcccgagtagctaggactacagacatgtgccaccatacctggctaattgtgtttttttgtagagatgggggtctcactattttgcccaggctgttcttgaactcctggcctcaagtgatgatcctccttcctcagtgagcccgactcttctcataaggacatcagtaatgttggattaagggcccatcctactccagtataaccttgtcttaaattgtatatatatatatattttttttttttttttttgaagcaaagtcttgctctgtcgcccaggct

SEQ ID NO: 45690 - DNA, 1188 bp, Homo sapiens
agcctctgcagtggcctggaggacctggggtctacccgaaaggcactgggaggcactggagaggcttgaagccggtggtgatgtgatcagatcatgtgtgacctggtggcagggaggatggaacaaagctgggagcccagccagccggccagggcgcgagagggtgacagacacgaggctcggagcaggtgttggctgtgggattagatggggtgatgggaggaagattccatgcagaaaactgagcctgggcagaggaagctggaagtgggagatgtagcaactgaaagacacgctgccttcccccacactcagcagccctgccaatcgtgctgccatcaacacatctgacagctgggggtggaagagagcagagtccactgtgaagggctgcggggcagagccaccacctgaggaccgctccccaaggaggtgaagcctctatcctctttgttaagtcacatgtcaccaactgcctctcacccagcctcctgcctgggactctggaaaggaaataagcaccagcaaaactcataagcaaagaaataaatttttaaaaaggatctaataccactttccaaatataggagggaaatgaatcagtgtaattaggatttgagaaaacaagctattcccagacaatattttaacgtgaaagaagcagagtgtgatgacttaattagggaaatgccacaaacaaattgtactgtaagcctaagagcattaacctgctaacgagtgaggtctggggaaatctgggaaagccatctggaccgtccaaaacgagcaagcatggccccgctggagaaacctggattgagtactcactactcagcgcagggaagtttgtatctatccagagctctccctcatgttagagcagcgtggcaaagccacccctgctggactttgcacccctgctggacaagtcctcgctcaacttcttagcagctgtgtgacctctggaagctgcttagcctctctgtgctcccgtttcctcatcggcaaacggggctaattatagtgcctctctcataggctgtcatggagaaataatacacgtgaagcacttgggggctaaatattaaatatgaattaatatttgcaaatcacttagaaaaggagctgaaatgtgagtgccatgtgagtgtcatcgtgtttctcgtcactgtccctggataaaaaggg

SEQ ID NO: 45691 - DNA, 483 bp, Homo sapiens
ctcgacctctagacaggacaccaggcatgcccatatactcactcctacccatatgcaccacccaccccttcttctggttctcactccagggctccttgagcactccgagttccaggcaacctactcacactgtgagacagagggagactgagctaagtctcagcttatctattaaacaagacaaaaaccaacaataaggctgactcagatcatatagcaatgaccctaccagaaagccccttctccacgtgggagttctgtgggccactgcaacacgggtgagtcatgcatcctttctctgtctctattggacaccacccccgggcaaggcccatgtctaattcatctttgtagctccaaaaccaaaaacagtgtctattttcaacaaatgaccacggcccctcttatttgcaagaatctattcttttactttgaccttgagtcaaaaagatgatcagaaaactttaatctgtggcacccaag

SEQ ID NO: 45692 - DNA, 1143 bp, Homo sapiens
tccatcgtgcctgctaatttttgtatttttagtagagatggggtttcaccatgttggccaggctggtcttgaactcctgacctcaggcgattcacccgcctcggcctcccaaagtgctgggatcacaggcatgagccactgcgcccagcgtagatgttggctttttaaccaacagcaggcatgtgacttttttttttttcaatgaaaaaaaagagttcttccaacacccaaagggcaaggcaggcagaagcacaagaaacctgaagttgcaaagaaattcaaaatttctcagcctatttcagataaaaggaaactcagagaacacccaccacggttggcagagtcaaatgctaggcagataaggaacgtgtgaagcccgccgggtgctaggggcggagcctgtggcacatcgcccggtgcttgcccagtttaaaggcctttaaattcaattagaaaacaaaacactgtctaggtcacacagaacatgagcagggtcagggactgactgcacactgccagtctgcagctgctgatccttgtccaacctgcttattttattcaaggggaaaataaggtcacagagttagttggtagcaaaagcaaattgtgatttccacaccaggggctctccgggcctctcaccatattgcctttggagaatacaagtccctaggattacttttgggtttttgtaaaaatggagattacaataaaaagaaaagttgaggctgatagaacgtacagcagttaaaatcagcttcctcctcctctaccaaatcagaaaatcctttcgtgttctagtcaacataatggcaccagctaatgaaacaaagggtcagatcaggccatcaactggaaaggggttttcaagaaacaggtctgtgattgaggaaaatactagcaggtgggagcagtaagaggtcttcctctaaacccaagcaaaacggtgcattctcagcagcggcggaggctccgaggccttctaacaccccatgccatcttgctctggtgccatcttgttcttgggccatcttgtttttgacagagcttgtctcacacagtgtctgcctttgaatttcctgcccacgtggacagggccatgaggactctaacactacagaatgctagttctcagccaagtcc

SEQ ID NO: 45693 - DNA, 1454 bp, Homo sapiens
agtcaaagaaagtgatgatataaggtaaaacgcccgccggtcacattctctctagggccttcaaacagcacgttagtataataattcagggacacatttaaacagccctgtgggctggcctggggacccatacgtaaccgcagcagagtctatgacaaattgcccctttagttccaggtaaccatgagataaatgaacttttgtaaaagttgataattcttgcaaaagttgggaacatcttgcataagaacggcaacttggaaagtgactcgatttctaaccacagtatgaggagctttgtaaccgatcctttgtgtaaaggccaaaaacgattttcaaggtcccatgtgaaaaagcaggagacaattgccgtagcaaatttataaagtgacagagtgcggcccttatggaaaacagatggggctactgggaaaagggcagccgcatgacgtgctagagacatgagaaccgagagactgtccttaggtacttgtgggttttgatgggatctgtctggaaaggatacatttaccatttgggaaaacagaaaccagggcaatatgagtttacaggaatgatatttaaaggactcatgtcttcaagcttatgctccttctttcaggatcaggttgaatgaggaggggccggtctctcatgttacacataacctttggcattcccatcaccaatgcctgctatggcaccttcccctcccttcacagggttgaaggtggcctgctgtgaagtcaggggtcacatggctcctgtgagctcctggctctgaaggacacacattcggaacatacagcatttaatatagagaaacaatcctcacacagaggttgctgagaggctggcccgagtcacagatgacctcagaagctgttttgagattcattggaaagagggtttctcagaaagccctccctccgatcaagctgagaggaaaaatgttaaatatgaaggattgaaatgctaaaaaaaagttatgccattgaagcatactttttgttgtagttgtttcaaaagattttgttccaaaagcctaacttttatacagtgcaagaggctgtttcaaggtgaggtttagaggacacacctgaaactttttagaatggcagatgtcagacctcactagaaaactctgaggtggatgggttttgttctctctctctctcttcttccaactccttgggtccagaacatgaaaacccagaaaaaaatcacagtattactctacttaggatgtgactctgtagtcactggttaatcactgctctggtgttagatgacattcaaatgtaaatgctgtgattaccaaaccatctcagacttctggggtaagtgttcagccagcacttctgattcacgctgggctgcctttgacagagttggcagaaaagaaaagaagcaaaagagaagaaaccacacgcacaattcattggtcatctgtt

SEQ ID NO: 45694 - DNA, 990 bp, Homo sapiens
gcctgtgaaaataaagctgaccctaaacttaccggctctgcactaccctcccgctggctgcttcattgtcctgggcaaatcttcagccccagagacagtagtgtttattttagaaccaaacccgctggccaggacaccatccacgtgaaacatttcttcctaagcctgaagctttgttgtaaccctgttgtcttcctccttattggctcagcagtgagatgggctggcttgaacctccaggtcttgaaacctgcccaagataccaacaaccacctgtaataaggtgcaggatcccgctcaagcccttcagagcatctgtggatgtgttacctcatatgccctcaccaaatcctataaataagaatatcaagtagtatccccatttccaagatgggaaatggccccttcaaaggtcaggtcaccgacactgtgatgcaggtggtgtctctaggagaggcgcaggcttctagatcccaactgtcgtggtttgttctaaaggctgcagcagcctggaccataaagacaattttaaagcagtaaacctagcaatacagcctggaagagaaaaccaaaacagagccaaaaaaaaaaaaaaaaaaaaaaaaaaaacccaaaacaaggcaggcactgtaatgaaatgctcacatttactccagtgcccacatctgcattcccagagtctcagaaatccagcaggattccaatgccatggaaatatgtatcattgtttttgccaaacaaactcccttaccttaagcaaaggtcaagtacactgtaaaactcccagtgcaaacaaccagctggaggacttatcccagcctctgtaaagtctttgctaataattatccagacagctttcctaatttttatttttaaatggggttgtggctcagcaatagtgtaaggattaatcgccttatcaattagcatgaggaaaggactgcaaatacaaagtaggtgtgttcttcctggctttctacctgctcaatt

SEQ ID NO: 45695 - DNA, 1857 bp, Homo sapiens
caaaatacaaaagcagttgggtctcccctctaccaaagtcagttttcttttcctgcagccctggctggcccatcctcaccaggcgcagcagcaatgggtgagctccggcagcacagcacatgtgtcacagcaggattgaatggtcagcaattgtctgtagggctctgtcccaggggccaggccaccgccagaacaggacctaagacagggcccaggcttcctcctcgggggactgtgacaccccaggacacaggctgaggagaggctgtgagggagaaggggaggggatggaaaagaatgagcaggaatatgagtcatggttttgtccccgcccatggcctgctgctcaccttgatgtgacaggctgctgcctgcggctggccctgggcccagtgtgggcacctggcagtcacgcccaaactaggatgtggcaccttcagcactaaggtgcctgcttgcaattctccagaggacaatgccaccccaaaaagggaaaagcacagcgttccagcctggtccttcctggcttcaaccgctgccacgttctggagagaaaaaggggtatttttctggggtggtggtgggagctgcctccttggcctctgctcagccatctactacatggttactccagtgcccctgcccccatcctggtcctctcttgggcactagctctacattccaaaaggagacaggacatggggcagagccagggactggctgaccctcacaggcatgagtttcctctgggcatggcaaaggcatgaaggacattcgggtgtagttgggtgggccccaaacggtactgactttatctgacctggcccatgggcccacacaacagaaggctctggcatggtctgacatttgtgcatctcacccaatagagcttttgccttccctctctcctggggcactttcacgaacctctttgggatgagtcaaaggtaatagaaagctcattatctgcacacaaatatgcaatattgtattgcttggaaatgaacactaactgtccttatggtgccaccaaacacttgtacggggtttcatggcttctaaaacctctccatgcaggtgagtgcattcgattttcacggcaactaggtaagatgtaataggcacaattcccatgttacacttcaaggaaccaacatcagctctctacagtaaattactcaaagttacagagctaagaaggtctcaactgtaggacctgaaccttggttttctgactctaggacaaagattttttatatttgttccctccttaaaaaaaaattcattcccttctttaaaaaaaagtgaggtcacaccatgtgatgaggtcacacctggcccagatgccctgctcacaccatgtgatgaggtcacacaggaggcatctaaattcaacacagaggtgagggagggcattgggaagtgatcctattgctgtgtttccagggtcagcgagaggtctcacgcgtgcagggcacagctggagggagcagttcgctcccagctgaggcagccacacaggagcaggaggcacctgacaggagaagcgcagcatggagagtggcaggagatgagctactgttgtccaccatccgggacgtgcaggttaagacttggaatctggcctggggacagtcagagcagctgagtggacatgaagctgaagagtgaggcataggtttgggtttggaaagctcactctggcggtgtggtggagagggggtagggggacggcaaaaaagtgcagaggtccctggaatgatctgagccccagggagccaaggggacattaaagggccgagggaatgaggcacaggtgtctgctgtatagtttattaaccaataaactgccctatg

SEQ ID NO: 45696 - DNA, 1508 bp, Homo sapiens
tggggagatgggttaatacaagctcagtccctagcacagttcctgactcaacaaatcacttcttcctttattagtattattactaccagtagtatatgcaaactaacttttcctgagttattgctattcaagctatctcatgtggacaatacttctatgcgatctatgtaattgctgaagttcacaaaacttcacagaccactctcataagctaaacatcagtccaaaatatcagcctcagagagcgacttaaagcacagagcttaataattcacctcccgacctcatccccagcagaagccaccatgaaccttggacaggcaggatcctagcaatggtgggtaagacctagttcaagcaagtgacctctgtctcctaccccatcctccactcaaaatgaaaacttagttgatatttgtcagtgttactcaactcccctggcagaaatcattttcctccagaaggaaggacaggggggattaacaccaggtcttaggcagtgagcagatgaacaagaacttacttatatgcaaacatggcaatcaatcattgcaagcaccccaccaactcctgacgagatgccttctgtctccactaaacatctgctagcaaacctttagagggaagtgtgtgtgtattttaaaggaaatgcgaaatgctcttttccctggagctttctgcttccctgaggttataactgcattagtggcaagagcatcagtctcatggcccagagaaggtcaaagtacatttccaaaacagtccagaaatcaaatttttgaggcaggataaagggtcagtctggttcagttagttgggtattcaaagcctattctttggccatcattgaaaacatctctgtctttttgcttgtgattaactgtgtaatgggaaatgtctattccaatatgccatcatcttgggcgttagcaagctggctgtgacggcacctacagggttgttctcccattgccttaggaacaggcttctgcagtacctgtatctcattccttggcagcctggtcgtgactgagatgcatctgggtctcagagagtgcatagcaggggccaggcagctactctatgactttacagtccggagaggaaaacactcatgttcccatcacagatgaggagcctgagggacgtaagttaggttgcccaaagtcacacagctcatagtggtggtagaagggcttacagtgaattctaggtgaggttttccagtggcttctatgtggaagaactcctaactatttgttagcacttaaagactagtcacatgaaataaaagaggaaccagcctccatcaatgcacccagtgaccccaactgggactcaaatcagtaataacatttccttctgcttagtacagggaaaaaccccgacactggactctgtgcttttctcactgggtcaagtctcattttcctgaacactgagtcctctctgctgtctcagcctcattcagaaatgtccatctctctgcgtcttcaccagcggaccga

SEQ ID NO: 45697 - DNA, 1998 bp, Homo sapiens
gaatatgcaagggaagggcaaggaagtctgaagcagggtaaacaccatcgggccagtaaatcttgtccatctagtgtttcaaagtagggtatgaatgcagtaacaggtaacagggatttgaaaatgtggaataaaagtggcaagatgcacgaaggtctaagcctgcaggctcctcctgctggctgtgctgggaaggggggatgggcgtggctgctgacagcacgtaaggtggacagagcagggcatgaggagaagtccagggagatctttcttacacttgagctttactgtcttgtgtggaaggaacacatgtgggctgtggagttcaggggccagacaccagcctggagctctgtcgtgtactggtggcgtggcctgaggaaaccgtggcttccccccatgtctcatgcacagggccctcagcatggactgcagcctcccagctcagctgggagcagcaggtgagaccatgagcatcccagggagctggagcacagccggggcgttagatatggagcctcagggtgcgcaagtcctaggacaatctaggccaacattctcttccaaattctgacttgtttttatttcacaatgtcgatctcaaatctctttctcttcattatatttcatcgccaaacatttatgaaatacttaaaatacactaagtgagagtcaggattcttccgtaaaactccaattagccaaaagcttgcccagtccgtgccttcagcctatgttatcatgcaggaaagaattaacccatgagttctgaggctgctctgcttaggaaggcctgcctgcgaggctggttcttggctggcatctgggaagttggattccgaagggttaacactgtcccctaactgatcttccctaagatgtctcacaaacaatgtggattgtgccaagcaagtgctttccttctgggagtctgggatgttggcatgcaccaggcagcctgtgcctgtgtgaccagtcccacaaaaccccccgggcactaagtctctagtgcgattccctggtagacaaccctggacatgtgttgtcacaatcccatgtgggggaagtcagcacatcctgtgtgactccgctgggagaagactcttagaagcttgtgtctggtttcctctggactttgccccatctgcttttcccctttgctgattttgctctgtgtccttttgctgtaataaatcatagccacatgtacaactatatgctgagtgctgtggttcccagttattcagccaacctgggggtggtcttggggacccctgacacagccatcctcagccaattcattttagaatactgttcttctggagcagtgctttgtgaggcataggaaggcctgggggagaggtggagggctctgactatacccaccctaaatcaaaagaagaagctgggaagaaaaagagaagaagaagaaaaaaaagaaagaagaagaagaaaggaagaagaaaaggaagaggaggaggaggaagaagaggaggaagcagcagcaacagcaggtcacctattgttccattcagtgttgaccaggcaccaattacacactcaggggacagtgacactgtgatcgctgcccttcagaaacttacggtccagtaaaggaggcagcaatggagatgatgatgatggcagtaacagtgaacagtggacactcatctggtgcccactacgtgccaggcactgtcctaagcactttgacgttaactccagcaatcctcacggcaaccttgggaggcaggtacttttgttatctccatctttacagatgaggaagctgagcacaaaaaggttaagtatctgcccaaggtcacaaggctagttatcagcaacacatcctctgatttcaaaacctcactacttaaccattatatcatactacctctctctggacatagagagaggtctgcactagcataaacacaggcccaactttacctacatctttttcttttgttaaatatcatttatgacatcctctccagc

SEQ ID NO: 45698 - DNA, 934 bp, Homo sapiens
cgacatcctgtagctcccatttcagtagctctgtgcctctttcaccccagaatgtgccttcttgtccttctgcccaactaaatacctccctctcgagtccttccttccatagggagactttcctatctttcaaagttcatgccgttctttcccttctcctaaatttccaaagactttcagccacccagcatcaatccttacatcattcgcttattttacaagcatttcattcagtgtatttaggcacagttcactgtattaggtcatttggacaaaaatggacaggacagacaattatctcgtagactagctggagtgagaaggcatcctgtaagaaaggcaaaagtgaagtaggtcctgcaggggtttggggagtgaggctggcctcctggctgggagggtgggggagatgggaagaagatctttcaagaaaaagggccttctgagttggtccctgagaaacagatagaatgtggctatgcaaatggtagatggaggaagaagggcatttcagatggaggagagggtccacatgaaggtgtcgggggaagggctgggtggagagctccaattctgatctagtagcaatattgtccttacttccaatcaggtgagtcatctagagcagaggttggcaaactgcagcctgcgggacaaatttggcccactgcctgtttttgtaaataaagctttattgtaacacccatttgtttacatatcatctgtggctgccttatgctatggtgacaggattaagtagttgtgacaaaaaacatatggcctgcaaagcccaaaatatttaccatctgggacattacagaaaaagtttgctgagccctagtctagtattatagccagggaaggtgtagggaggaaagggctcttggccaaagaagggcattgctgctgattactgatggaatgatggaatgga

SEQ ID NO: 45699 - DNA, 987 bp, Homo sapiens
tgtgggcagcatgaaggcagaaagcaccattatggctttaatgccttcccctcccatgcagctgcatccacaggacctgaggagtaaactgtgcccctccaagtctcgcactgaacgtgtctaggctgcagatcagtgatctcaggctgtactaaagaaagacaatgagcagtggagaacagcactgggccaggcagaggctgtaggtggggaaacgagtgaggagactattgacaacatcccaagatggaatgacactagcacagtggccctggcagggaagtacttacacctcatacaggcagtctcagctcctccagagaacagccgctgcagaggggatcgtgccccttccactgcccagcagccaccaaaagaacaacagggcacttgaggtatcagcagttctgccagcctgaggatgttgctgtttcacagctcctgggagcaattcctccagggaacaggacacccaggagtcccgaggtgtctgctgggcagggcaatggttgttatggaatctgtttacccggaaaccaccacgacgccacatacctaagaatacctagggcacttatgactgattcctacatgcccgcaactcctctttaacatttaatatcaccgatggctccgaacactttgtactttttgctcagctgacctggaagcctttggtcgttttccctcctagctgggcccatgtttgtcaggtgggtgcactgagaggtcagaagtcaacatggcccgaagtccatcaggcatgggtggtgagaaccaggaccgttctcccaggaatagaagggtgaaagcacctgcagacctcggcccgtgattcagcacttactcctgaaagacttgagggtatttttaaaactttttacaaagcgaccattgctgctgttgctactgaggcaacagggtaattgtttcctttgaaaagccatcacttcctctcctattttatgtggttcttatctgtcgact

SEQ ID NO: 45700 - DNA, 3876 bp, Homo sapiens
cccaaacaatctctgttaaagacataaataatagaatatgaattctaagccagagtagcgcttgatatctgaacaacactgactccataggggtgagtggcttacccaaactcaacaaggtgagcaggctttagaaacatttagatgaaagcttcaaactgaaatgaattggtctgggtgaacaggcatgatagccttgactataacccctccactaacctatcttgacatagttaagtaagatagtagtataaggctgaactatttcaaaccacaataataaggaattggtaagaagaatattccagggaataactaatttggatgcatcagctaatagtatttccatacatctgagtggcccaacaatggcctgaccaatgaatcaaacatttattgacattatcatgaaactaggcattccggtagatttaaatcaatatgtacaaagtcctgtgaaaccggactctattttggaacttcctatttactctctacaaaactctatacacccaaagtcaacactaacatcctttcatgctagtactaactcacattaagttattaaaaaaaaaaatcaagctattagcaaggacggggaaaactgcagtgagtttgtgtatcagccacaagctgtgttgcactgaagtaacaactttttaaaatctcagaggctgaaaatgccaacagcttatttcttattcacaatacatgcctattgagggctggtgggtctctgcttgtcattgtcacgtggggatgcaggctgacggagcagctaccattgtgaatgctgctggccggcatccaggaggcctagcaggtctcttacaggtaactgaatgctccagcccagaagtgacaggtcacttccactcgcagctcattggtcaggaccagtcacaggaatctgcctaacctcatgggcattttgaaatctcttcaactttttgaaactgcttcagagatgcctcgtatgtgaaggcactgacaccacgtcctgggtgctttgtgtccttaggggaatggctgatgtctctaggccactttctgtgtctccttcatcagagcccgagaaccatcaaaaggactaactgaagtcccttcccgtggctatctctctgccaggcatggggacaccacatctccccagcctgctggggcctctctgtggggaggtgaggaagagaagcctgccttagtgaggtccatctgcccattaaccacagcactgtagtacagtgggggctcagccatcttcaactttatactctgatctttttggggacctttccctaggacaccttttgtctattctgccataggttgggcaggatcaactaactacaggacagcagaatggggctgactgagtagcctcagtggtgaggcgtttcaggaccagtccccaataaaaattaacaacagccaggcttaaaatatcagcacagccactgtgataaaccatgtcgcagagaagagtggggactctccagccagacacgctgtgctcccaatcccagctctacagccttccagccaagcaagcctggcccagcgccctgccttctctctgctccatttaccatctgtgcgagggggacagtagtggaatttatttcttacaggcttatggtgagaatggaatcaggagaaaagagctagaacaatgcctggcagtgcacagtaaagtccctagttccttttcttatcagcatcctcttggcctccctcagccacgctcctttcagactcatttgctgccaccatgagcaagacacacccctcacaatgattttgtgagacaggcatgcaccctgcttaaagaatgagaagactatgagtgacccagattcccatctgtctgccccaggcccatgctctttccctgcaatgttccgcctcacttaccctgatgtcacgatgacaagggggtccactttaacataaggggaataactcagtggaggtggatcctccacttgtacttagagctcttcaaggatgctgctctgctctctcagttcaacaaagataagtcaatattttctccatgagaatctattctgcatgcttgacagagtgacagggttgagccaccaactcttagtcctcagtatgcacagccagccaggctcaagcctcagatgctggagatgaatcagggaagaaagtgtcagatgaaggacagtgaggtgaatagctaaactctgtcccagcctaaaattcaaatctcatggtagtatttttagttgtggctttgtaacgtagtttacaatgcataacatactgacccttaagatgcacttacgccctagtctgaaaattgctacctttctccctcaacttttattttgcctcaaggccttatgaggtatcacaagctcagctttatccttgcctgtactattaatagactgggcgagtccccctgggctctgtgatcaaagtttcccatctctgacctagtagcaacattgtccttccttccaaccaggtgagtcatctacgacagaggttggcaaactatagcctgtgggacaaatttggcccactgcctgcttttgttaataaagctttattgtaacacccatttgtttacatatcatctatggctgctttatgttatggtggcaggattaagtagctgtggcaaaaaacatatggcctgcaaagcctaaaatatttgccatctgggacattacagaaaaagtttgttgagtcctagtctagtattatagcaagggaaggtgtagggaggaaagagctcttgccaaagaagggcattgctgctgattactgatggaatgatggaatggtaaactcactcattgtttacagacagactctcagaccaaagggtatgcacttcatttaacaaacattttcttatgccagatcctaagacataacaacgagcaagataaactccttttggagactaaaattgtgtgttagggtgaagatgggggtgtaagggaaagagaaggaatagagagatgtataaaagcaatgacagcccaaatgatagcagcatattcagacagcagagaaacaaacaaatgataaagctataaagatcaacacaggcggcatctcagaaataatgctgagtgaaagataacgtatggaggaacacacacggtatgatttgacttattaaaaatgcaaaactaaatgatgtactgtttatgcatactaacagatgaggtaaaataataaagaaaagggaacaaataacacaaaattctggctggttttttctctgagggtggggctggggagggacacccagggtgcctgaaaggcaccaaagccgggtagtgagtacatgaacgtgcacggtgtagaatcctttatagctgacatatatcttattagtatttttatatctactccgtggttaaataaaaccaaaccatgttgaacacagagtcagtgtgacgagcgctatgattctgtgactaggacagtggagagtgctacaggcacacggaggaggggcctctgactctgatgtgaggggtcagaagaaaatccctagaaaaagtggcgccaaccttatctgaggactttatgagcaaacttcaccctgagaaaaagtcacaggagagtgttctggcgaaagtccagtgatgacacagattgcaaggttttcaaggaactgataccagctcagcaaaacaggcagagcaagtgaggtgggggcgggcgacggggctgagagggccccctgaggtcctactatgcgcctgaccagccacagaaagcctttattctaaaagcaatgagagcctttgaaggatttatggtatggagtaaagtgacatgatcagagctgcctttttacaagattcttctggctgtggcaacatc

SEQ ID NO: 45701 - DNA, 1761 bp, Homo sapiens
aacaagagcaaaactctgtctcaaaaaaaaaaaaaaaaaaaaaaaaaaagcaacaacaacaaagtgctggggctgaatggcatgacagaagcacgatgcgaatacgcttaacattattgaaatgtacacttaaaaatggttaagatagtaaatgttatgggatatgttttctatcacaattgaaattgaagtctatgcagacaattagagtaggagactgtgaccagagaaacaagctggtgagcgctgaggaggcagtcagggaaggcctctctcagcagggaggtggggcgaggaacagagacaatgtctccacagagtgcttggcatcctttctgtctactgctctcttactgcccggcctcaccaccatttcaggctcactacagtcacccctcctcccactccatgaagccctaaactcctcagggtggtggaatcactcatggagatggcctagagcctgtgcaggagaaagtacagggatgaagttatccttcctgacttaccgaaggatcagaatcacccctgcaaagcaggcataaggggaaagggagctggtacgtgcatttcaggctgctgccagctgcttggaatccactgcacagcaccacacccgttagtggagaacggccttgctggaaccggtttcaaagattcgctctcattgttgccttttggctaacttcgcaaagctgatgtacccatcctccaaaaataagactcagccagtcaaaggatgggctaaaatacaaaagtgacatcatcactttgcatttcaaaaaaaggcctggtttgggatgaaatgaacagagttctcctggcacggcatcactgggccagttgccaccatccgtccgtgggctcatccggaacagcaaccagcggtgagccacagtcaggaaaaggaatgaggctctctccataacctccaggcctatgttaaacttcacatccaatgacaccgaggaggaaaggtaccgaagaaagaaagcagaactgcctggaaattgaaacactcagccatctcaggtaattggcctcaatcacagaatactactcaattagattttaaaagatgcccctctgtcagaatgcagagagatctaagtagatcctgcatccctcttctctgccccactctccctctctcctccctccccaaagtccaattaagtccaagtgccaacctaacatgagaaggctaagaattctgttcacatctaccatgaccttagtccacaggatctctcatgagaagaaagccacacagttggagtgaactctagtgctccccggggcctagagttctgaggtacacttcgggttcacttgcaggtttaaatgttacctaagaataacctaatgcagagatgtacacactggggccactatggttctatttcactatggatcagttcaatgcaccaaaagctggctgccactcagcatctctgagcctggtatgtatcagtggaccccaagtggggctatggagtgtactaaacatcatcactgaacatttatattctaaacatcagtctcaggccctacaggcttcaataatatgctgcctatctgccaaaccactggcttccaatgcggaagctggagttctgcccagaagccgcacccagagatctgagggaaccatgacacttactgttgatgttggcgcctctttttccgtgaatttggtcaactgcctgaatggaatgaagagaatcataccctgactcattagagtgatgaaaaatttct

SEQ ID NO: 45702 - DNA, 1102 bp, Homo sapiens
ggagcaaatgagcaaaggagaaaattgtgcttccgggcaggtcatgaaaaactaaaacttaaactctttgtagcagagcctatctggcaggatgcgctgatttgagaaacagttgttgacaacaaactttcatggctctgcaccatttgagttatatttctctctgtgctctcagccaagagtctgtcttttcaataacagcaagtcttggcaaaccagtaatgattttgcttcccactagatacatttggatgttttcaagaagcctaatgttttgctttttttttttttacttgttttcaaggtgactgatttatttcctcttttaatttgcttttaagaacataaaacaaaacaaagtcagcccagtattgctctcttacactcctgaacaattttttctggtcgactcagcttttagcttcaggtcccatcctgtctgtccaggtgtggaaaaaaaaaaaactcccagggagtgtaataggattccagccagcaaacatgtggtaagagaggcgaatggagcaagcaggaaaggatttccagcaggggccagcaagggcaaggttgttgacatgagggcagggtctggaaccctggggaaagggaagctgttaaccattaatcttaccctatcacagcatctcttcccagctcactttatagatcggcactggcgcagcagccacacagcgaggaaggatggaagtccaacaacactaggtactagtgtggacttgagactggcacatctaggggggtaagaggaagcacccctggtttcactgcccccactcccaccccaagaaatcttcaacactgaaggaggctaatggctaagaattcaaaagccatagaattctaaaactggaagttacgttgaagctcaatagttttccatttgttttgttttccattcattttctccacgagttatcccaggaagcgatcgcacagctacacaaaacttggtttaaatctcatcccttactttatagagagggagacacaagctcagagagatctcacaatctgtcacggtcaccgtcagtcaactgtggagtctgcaatccagctcagatctcctgattttcagatcttt

SEQ ID NO: 45703 - DNA, 2023 bp, Homo sapiens
ggcccacgtatctgaagatggggaaaccgggtggagacaaagagacgaccgagcacgtattcatgcgaaactttcccttcacccaaatgcagagcaaatgtttgctccccagaagcccacaaggtagctgaagccatttctagttgacatcggcaatctccattctcttcattccacactttgacaactcactctgtggagccatttggctcagtcaaattttttttttttttttttacatatatagcatagtgctgatgcttaaagatcctgttgactgaaataagttgcaaggaatattagttcagggaaatatcaaagtgtaaaaatatatgggatagtgagaaagaaaaagccatccaacaccagcacattagaaattactcaatcacttctgtcatgtgaaaaagggatcagcaccccacccagagcaaactcaaactctgagtctattaccagttaagtcaagacttggcttctatttttgcaaagtaatcagtaactgagtcagctgtgaaattcctggttgctccttgatcttgtgtaacatttatccaatcatttaggctgtttgggttgaaggagggttattacaataagaacatctttgagagactttttcaagaaaattgttcattgttggggggaaaaaacccttcatttgcccacaggaactaaggtttggtctgtcagcaaaaggtattgttcattatttcaaactgggaaagtgtagctggtggggggcagttagaagtggagaggggaaaaggtagagatcaagttagaagagacacttttaaacagtattttttatttaaaaaaattctctcccacaggacttactacatccaacatcaaatcaacttaaaaaaccaccatctctcatggctccatttgaagaaagacacatccttcacagtgctatattaccttgtctgtgatattatggatcctggttaggaaaaggattcataccacaaccaatcacgtccgcctatgctgagaagtgtccatttctttaggctgaaaataagactgtactttcataaacaaataggaaaatgtgatctattgcttcttttcttggtccgtgcccctcgccttgctaagtcagtttttcgactgcctgtgtgtgtgtgtgtgtgtgtgcgcgcatgtgtgtgtgtgcgtatgtgtgtccagaggccactgatccagtccaagtgtatttagaaattagttcagtggctcacaaaggtcttagaggccactactgtgctggggaaatccattgagcttggcttgttctctcttgctcttgccaatgtgcactctgcttccatgcaaacactccttaggaagatgccagtaatctctattttatgtactaattacacaaccacatctccctttggcgacttgagggaaacaaacatgtaaagtgtagagtatttaactgggatgtactttagaaaaactccaaagcagaaaaaaaaaaccttcagcagccttgcaaataaagcagaaaacttccacaagtcagcagcatttctcaaaatgaagagtccacccttacggcaagccatacaagaaactaaaactgcaaaaatcattactttccctacttacattgccaagcacctgcaagactaaaaaaagaatgctatccagttctgttctgagaaagcacaggcctttccagcagatgcattaagtgagataaaaaccttatggttggaggaagaaaagaagttggggccattacaaatgtaacttccaaataatcaatgtcccaaagttttaaacttccctttagagttaagaagtacttcaaccctgtgacctggcttatcaataattttcttcaagtaaaacaaatttccaagcattacctaggcataaatactactgtgtataaaatgctagcaagtacattaatatggatattcagtgactccgctttttgactcagctttattgactgggagttgctgtcttaacttcttgtcaccagcctctgccttctcctaagactgccatgtgt

SEQ ID NO: 45704 - DNA, 1745 bp, Homo sapiens
aaacaccacctacaaataagtgaaacctaactatattcagcagagttaatacagccaacagacaagatagatcaatgaaagaaatgtctcaccctcctaaaaagaccaaatactagctaatgctgtcatttacttttccagtaccaatgcttaggtctcagttccagaccacttaaggacacaactgtggacatgagaatgtggaaagtttggattctgtgtggatacccaattatgcaccagatagaagcacacaggatgtcaatgcagacaattctgaagaaaaccgaaagcctctccatatcaggaaagaaccgatcgccactcctccaagcagttacgcaacctcccgtgtcctttgatgtgcactgagcccgagctggagatcaggattgagtgaaatgtttcacggcatcacctgaaaagcctctttcacaacacttgaggcctttaatgtttgtgtttccacaaaactgccagcccacacgagcagcatgcacagtatctttcccagaacctcccaggcaacaatacttttgctaaattctttcaagactagtcgtgaaggctcctacttacgtaaagcatacaaggtgagaatgattccagccaggcaaaatccttcaaagaacctgagtgtgctgaacattgtcacattcactgacagtgccacagtcagtccaaagatcagaatgaagatgatggaaaacagcagcacaggccgccggccgaccctgcatatggagagggaaaaagttaggaatcattgtgaaacaagacaatgacgctagatgctgaaacccggtgtccagcaggcactcaatatatgttgaatgagtactgggtaaaaagtcctgtgccatctatacccacttcactagatcctaggctactatgggtaaaaagggagatttagcccaaccccctaattctcgagataagggagcagagatcaaccaattacagagtaagagaattcagacttgagcccaattcctgttgctgagtctatttctgagtgtatagtgatataattcaaggcaaggggaacaaaattaataattctccaaacaggaaccttgatacacccagcataaaaagtcttgagaaatcgttgacctttgggattggatcaaaagtcaacatggtcaccaagcaaagcggctttgtttcctctccccaggttgttaactaagtcagatacctgatcctacacacagcctatccgagccagggccaagccatctgtcaatttgtttcagctacacgacgagaagtaatttttaagggatcacacactaaggtaagacagcgtgaactttaaatgcccagtgacctgatagtgagctgacagtgcagcccctcggctggactgagaggcagggagcccaggctgtgatgattctctggaaacggccacagataccctcaattcgtgggttctggagctggccagtttcagatcagtgaccactagggggcgatgtgcttctagagtgcctgggaggacagtagagggtggtccacaagaatggggaagtcaccagttcctgtggccccatgctaactttccatctttccttgattaaccgattagaaataaaatggcaacaataactctccatcaaacacgattggcttggtctaaaggataactcagagaaatgggggcagagtggatgctatttgccaggagaaaaaagggggaaaaatccagacctcctgtccccagtaccacaaagggt

SEQ ID NO: 45705 - DNA, 3196 bp, Homo sapiens
tgggagaggaggtgctctcaacacctgtaaccactcatctcccagttgcatcatgcctttgggagcctcagtcgggcacaatcttggcaggagaggaacacatcccgaccccaggttgctgccggggagaagggcaccagctgctgtcttgatggcagggagtcatctgaaatgctttcatgtctcccccaagacttcccattgatgagtttacttgaggttaaaggatgcaaatgagtatattatgcttctatgagatggccaggaggcagaagaaattttaataaagcatttaggggactggaggaaattgccaatactgttgtgagttcagccacctgagcaatgaccagacctggccttgggcagccatgaccccattaaggtgctagctaataagacattcagtgatcagccctatccattaacagtgccacagtggaaaatgaacacagtggagggagactgagtcactcacacgcctggtagggagaggaagcctggttagaagtattgctggctccacagttcccagcctctgggcttccccctggggagggggtgcaggaaacccagagcaaggcagccacctgctaccttaaaccctcctcaactaggcacaagaatagacagcatatctgaagcaacaagtaaaccaactggattcccaggcccagcaagtttaccatgataagggttactcatgcctggggatccgcctgcaacaccgcccttgccatcctggaggcaccgccgtttagcagggtagggtagcgctgggggaacccatggcaccgacacccttgtttgacttctgcttctggtattgacaaaaatgtgtcgggaaaagaaaatatgttcagacacagtataatctcctaaagaatttcagaagtatgaggaagctttgaggtcacctggctcttgaaatttgttcacattgctctagataagatatggcaactggtcatgtcactgaccagttgggtaagcaatgtttaaagcaatttataacttttcagattaaagaaatatataacaggagtaacgttataaaaagtacaaaaccagaactgaatgtaacgggttttgtctctgacgttaccctagtcacctccctccccatcaaatcaatcaccaattccagcaggttctgcctttcacatatatcctgaacatcccatccgtgctccattgcccccacagacaccccgatttatagggatggggcaggcgctcactcatgtgattccagtctccttctggtgtgggcttcctatagtgtgggctgggaggccaaaaatcatacttccagattctggtatacctatggtttcaaatgtgattttggtcctgccaatcaggtgcacaccccaaaataactttctgtgtgcaaccttgttcgaatttccggctgacctgagttaggaagagagttcagaggggaggaagggaggcatccattttgctggtcagctctggcaagggttgggtggtctgggagccaacagttctggaggtggctaaggaggtgtgatcttggaaccagtggttgggacagtgaccttctaattcttcagcctcctaatggaggcacagttccctggacaggctagctctgccaggaatccttccagaggcccgtttacagttgctctagcaactcagtaagcactattccctgtattcagtccctatctcctgaaataccagagtggcttctgtcatttgcaaattgaaccttgttctctggtcaaatttccttgggatggaatttgcagggggtaagcagacaagataaggccaagtcaccatccatcctccctctcctgaactaatacaagagtctctctgcattaactctaacctccctcaaatccattccctacagaacaatgaaaagcatcctttaattaagcttgttaacacctcatcagcaggtttaacaagatcataaaagcactaaagtcacagcctcatttcataatcttaggcttgcttgctttgtcatttttccaagaccagggacattcatgatgatgccatgtgacgcttctgagccatgactaagtggtgagacaaatgactccagagtgtgtctacatttcacacacgttagttgctatgtgttctagcaaaatgagaaaaaaaaaaaaaaaaccaaaaactgtggagtcagagaacctatatagtttaaggataagctaaagaaaataccattaatattattttgaaaggaataattcaattgcttgacttgccagagtggagaaacattcatcaaggagactcagaaaatttctaaagaagatggaaaataaatgggagataaagaaaacaaccttattttccacagtaatgaattctatgataaaatgtaaaataagaacataaaaaaattggaagcaaatagattgcttctttaattttgaagtgaagataaaatctccaaagagaaaaactaagggggaaaaactacctaaggaaacaactggtagattttgtaacagtctaatgattactactttactattaattactattttaaaaatctacacatcaaaaatacaataagcaaaattataaagacctaaatttgtaatatatatccacttacatatcaatatacaccaatactgcaaccagaaattgagttaagcgcccacatgattaaccatatatgaaacacaaatagttaaacacttgggaaatgtttgatttcactaatgaagacggccaggtgcagtggcccacgcatataatcccagcacttttggaggccaaggtgggagggtcacttgaggtcaggagttctagaccagcccggccaatatggtgaaatcctgtactaaaaatacaaaaattagctgggtgtggtggtgcatgcctgtaatcccagctactcaggagcctacggcatgagaattgcttgaacctggaagacagaagctgcagtgagcaagactgcgccactgcactccagcctgggtgacagaatgagacattgtttcaaaaaaaaagaaaaaagaaaaggaaaaaaaaagacaatattttgtttttcaaaaagaaaattttaaaaaaatttctaaagatgaaggagaaacaaagaggtacaaatctgtacaaggagcataaactaggcactgtttttctggaagacaatttggcaatatgcagcacattactttaaatgggg

SEQ ID NO: 45706 - DNA, 3878 bp, Homo sapiens
atgcctccatagtctgcttttaagaactatttttgttctctcctcccaccgtgcatggctgagtgtgaatagctgtttcctgggtcctcactgccaaggtaatggcactctatcccatctcatcactttcaagttcacctctactttgaccccaggacacagcgctcttcacacatactcactttgatccattattctccctctgctctagaaagacacttgaaatacttaacaatgttgccaaatcctcagtctgtcagacatacacagtgatttaaatagtcattgttcttaatttttctttgctgctaaaccaacaaagaaatattgccctccgtgaagggaaaacagtcacagaaacacctttagaaagcagggggtaggaggtgggtgggatcaaggtgaacccagctagaaggaccttccccattaccttgcagggcagcaggggcagctcagtcagacagttcccacaggacagagcatttctggccaggttggtacaagattaaaacaatgattatgatgatgtaagagtttatcttacacatccatgagctacaactgttaaccaatgcacacggggggaggaggttacatgcacattgactatttaaaactgtccaatttcatacatttcgacaaagcatttaaaactctgccagaacagcccagaatgggtagcgggtggggtggaggagagtctgtatttactttaaaatgtgaattaattagtttagacacaaggagcaaaactacaaatgtcttgatatctcttatatgttaagaataaaattacagctgtctaggggcattgagtgtccaccattgcccactctgtgtttaggccttcacacttgtctcacaactcccttctgctacatttcacaccacgcaatacctctgcaagggagctttagctacaggactcagaggacaaggtgcatgtttcagctaaagcacacccccgttctcagtgcctcagcccaaagcagctgctgtgtaagagcggtgacggccggggaacacccaaatgacatattctccgcgtccttcctatactgtagtgatgtttactgaagtgctgagaaaacatgggaggagacactggggtagcaaagcctaaagtcagatatctttggggaggactaagcatcggctgcgggttggggatttgcaggagtctttgcttctctggctctccagttctttagtaggctttacctgtgtcaaaatcaagtgcgagatggaagactattgctttgtgggagacccagggacaactagccgggcagaacagggctgtggtcccgactcccccagcagaccttgaacgacgccagtccgactcctccagagggggctggtgacaggtcagctgcctcgccccgagggtgggggaagggcgcgctttccatccgcgtactgggacaggagtttgggtgcaaactagtaaaggctatggtgctccctttacacccaagtaaaggcatgtggtttgggggacggaaggagattaagccaatgcggaatgccctacacacactctagcaccaccactttggggacttcggttctcccgctggctcgggcttggacctcggtctgcagggagagggttggagggactgggcggctgcggcccttaccttgctgaccacgttctggacgaggccggcgcggatgccgtagtcccatgcgcggcagtcacagttggaggcgttgtcccccttgtccggaggggatggcaggggtggtgtgtcgcctccgtccgcgccgctgctgttgctccggttgcccgcagcctcccagggggcagtggcgaagggggtggtggggaggctggtccagttgcccatgtccccgccccggcctgtggtggtgacccctgccagctcggtgcctttgccggccccgcggcaccagaagttgggctggtccaggaggaacgagtccgagaactggctgaagccgatgaacagcgccgggatccaggtgagcagcacgagggtcttctgatagcccccgcccaggcccccgaggaagggcagcaccgacccgtcatagtccagcaacaagaggctcggggccgcagccgcggagcagcagctcgggtgcgggccgcctccaggatgcagtgggggcagcggctggatctccgcgccgccgccggggcccgcgcgtcccccgaggggcgccgaggccgccgcgtccccgggcggcagggagccgttctcctcggccggggccggctgccgcccaggcccgccgcccgccgcctcgcgccgccggtctatggccatggcccgggcccgcggctcccgcagaggcgcatagagcgcggcggaggctccgcgggcgccccgggcacagcgcgccgggccaggcgcctgcagccgctgccgccgaggagggcccgcggctcgagagagagcgctcggcggctccgggtgcgtcaggccgcccccatgtcacccgccggaccccgcgccccgggcgctgcggccccgctcgggcgccgggcagaggcgggcagaggccggccgggccctcagccgccgcggctcatcagttccgcggcccgggcgccggctgccgagcccgccgctctccgctgctccgcgccggacgcggcaggaggaggagccggcgccgcgcccggcccgcgcccttgccggcggttcagggccctgcgggcggcggtgcgggcaaaggctgctgctcccggggtggccgcgctgtatttctccgacttcgggcgcctcccggaagccgcgagctctggacccagcctgccgagccggccgcgctctccagctcctggagccggccccactcctcctcctcctcctcctcctccccctcctccctgccccccggcccgccccctctccccccgccgaggtggaggtaaccgcggcacctgctgcgctcggctcctgctcgcgagcgccccctccagcccggacgcgcggccgccgccgcccgggatccacgggaggggggcgggggaaacgggacaccccgggcccgcctggctggaggatcccctgcccgttgcccgtttcgcgccgggcggggcgggggaggaggagacgcgcgtagcaggggtcgccggccggcgacgggtcccggcaaagtcggcgtgcgctgagaacgtgtgggccgggtcttctctgaggctgggctcccgcagccgcgcgggccccccacccactccgcgcgcgccaggtctccgtgacctctgtctcttcagaggtgcccggcggtcccgctgcccgcgccccgctcccagtcccaagcccgagggtcttcagccttcgggaacaaccctctgcgctttttccaggagcgaataaggttgatttttgtgtccgtggagcagggtcaaggaggcgcctttgccaatttcaggtcgccagtcccccgcagtgtctggccacctgcgacccgccgcacccactcccaaatcgccatttcttcccccactcctaagtgcatgcgatgtaagcacgatgctgggatatatctccaacacaagttataatacacacagtataaacgtgatggcattccccaccccctccctaagatcttgtattcacgtttggaacgccgtgtgcacaggcgcacacatctatactctcacacaagaagacaaacctctccctcctctcctgctccagcgccaaccttgcccagccagcgctgtataaataacaccagccctgcggcaaacggctacattagcatatttcctcctgcacccagcgcacgcaccaaagagaattatccggcacctttcaacccagcgtccccacattttggaggcatttcatattctgagaagtttattaatggaagtcttaaatggagca

SEQ ID NO: 45707 - DNA, 1157 bp, Homo sapiens
cccactccccatcatctcccccactctccatcatctccttccgctctctcaaccacctctctgcagtggttcactgcaggccagcggagtggaattcatggatgctgagggagcaagtgtgtctgcagagatttccttgaggtcaaaatacatgcttttaggagaagtcacgttgcttttgcaacccagtgtttcacaatgccacattgctcattaccttttcaaaatctccctgtatgaagctgttattttttttttctgtcctctgccactgagctgtcatagaaaggcattatgagagctaatccctgtaatccccagggaattgtccgttatgaagctccgtccaggtctatcttgctgtctttccctggcttacccagagcacctgccttggtgtaatcctccatcgctgccacatggaagtgttttttcccttcctaaacaagttcctcttctggtatggctgtcagtggaccctgacacagccttttggagcaaagcacttgacggtgtccagaattcacatggtagcacacaggttgcacttccaggaggcaaggaggtagctcttgaccagaaccctggaactctgctctcccaggtgaccttggggagccatagcccatctcgggcatccctgtctcctctttagagagagaaattgaacacagtgatctctgaggtctaagcagctctaaacctctgtcttggacagctaggacagaatttaaatgagcatttattgtttttcacccacctagttcttctagttaggttacagaataaggcaattaagccaaacctggacccgggcagtgccagcctggggctgcagctgtctttagtgtgtagcctggctctagacctggcccccgagcagctgcttcttgacacttccaaaggacagcgctgttctgtgcccctcccaaaggtggtcctgcaggaccccaagcctatgtgaatttctctccataactcgcagggtggcagggcacagcacaggacccacacgccacctggggaagaggaaataggaaactgaccacggcaaaaatgaacaagagccaaggatacaccaagctgcatttccagccagagggaacgtttggcctgggatgggctctgtggatgagtcagcacgggagcggcaaacg

SEQ ID NO: 45708 - DNA, 2236 bp, Homo sapiens
ggcaagggggaaatccgtccccatgatccaatcgtctcccaccaggcccctcctccaacactggggattacaatttgactggagatttgggcggggacacagatccaaaccatatcacagcataagggtgtttatcctcttctttggttcatacatggggagtatagaagcacaaaagaggcctattgcttaccaaaagacactcgacaactgaacaactcaacagcccaacccaggaatcatcttgaggcaccaagagtcccaagcatgtcacttccctctgcagactgtgcagcccctccagcaggctcgtcacagctcatccaaagctaggaagtagggcctctcagtcagagaatggagctattcagtattgtcgtttggatgcttatggatttaacatgcgtttccactgacaggatagcagttactcttgtttacagtgttttccaaggaaaaagctttatgacttaaaactcaagtgtttttctacttgatgtcattgcggccacttcttgcgcccagccttagaggaattgctggatgcagaagcgctgctgtgtgcaccacactgtgagctcacgcagagcagagacttttcttgttatgtttcccagcccctgtcattctacctagaatatactaggtgctcaacacatatttgttgaactgactggatcagttcattcatattcaaaggataatagttggatagcactgaacatattccaaacagatttcaaagccaattccaaaaggaggttgttttaacaagggaaatgagataaatgaatactgattgtgataaaggcttaacacaatcaaggtttgccttgcaattacatcatagtccagtgaggggccagggtggccctcctccaacagcgatccgggtctgggctgctgctgtcagggcaccacccacaggtggtcgtctgtgaggtcctcctcggagtgaaatacagattatgaaagttctaacttcagctgaaagtctcttgtgtcttatacaaaaaatgctagatttaccatgcaaatgttgattttaaaatgactatatttatactaggtctgggaagccgaattaaaaagtgtcagtgcattccaaactgcctttatcaagtcatttcattctttaaaaaatttgtcacatagctagacatcgagcatgacaatgtgtggaatgtagaaagcattacccaatgaagttaaggctctatctggacaaacacatagttttttgatgagtaaaaggtgagagtctcagctgggatgagttaagattcccacaggagccttggggatggattctaactgggatcttactgggtcctgatgtgattgggaagcccccaaaggtgaggacgccaggaaagaactaaaggaccagcaggattttctggacagagcaggctgggaagggtttagaagtggaacccctgtagagagaatggcatggggaaaggcctgaggcagagatcatggcaaatcctgagatctgaaaggtggtttattatggccggaccatgcaggcggaggaggttgctggcagagacagtaagaggtgcctgccagatccattggaaggaacgtaagccaagtgctgggactttaccctccctctgcaatgccctaccctgttcactagagtcacattcctcccttcctcctcagactctgtcttgggtcctaacctagctcttgaccttctgtctggcacaaacgtgatcaatcatcccaggcagatgttagcagagagatacactaacacatctctccggtgttcagaaaaagacaagctgccaaatatttgccacacatatacctgatgaaggattagcaacgaaaggacataaagaattgctaccagccaatatgaaataactcaacagaaaagttagagaaagcatgggacaagcattcagagaagtgagaccatgagtggccaataacacatgaaaagatgctcaccccattagtaaccaggaaaatgcacagtaaactacaagattcagggtgttctctcctcctaggctatttgcatgtttattaagggatgttgaaggccaagaggcctttctgatccaagggaatggcattcgtatagtgacatttcttgtcttgtgtcaagctagtacagaagatattttgggcaggatgtcccttacttttcaaatctcatcaagcgagagacactacctccttttatggttaaggaggcaaaggctgcatgctt

SEQ ID NO: 45709 - DNA, 1167 bp, Homo sapiens
aggggtgaattttatgacatataagttgtatcttttttattttttatttttttaagttgtatcttaataaagctgtttttaaaaaaagttttaaaaatgatgtgagctgaggaatgacgtgcccaacttccaccttaccaatacccctttgactggttgttaaaaacagactgctttgggcaagggtggaagaaaatccagttagaagggcaacttctgcatggctgggattgtctttcttttgccattatttttgcataataatttatgtaggtatagaattgtgggtttagagttactttctcttgagtactttaaatatttttttcattaacttctagcatctgttgtttctaatgagaaaactgaatgagacagtttgaaatgtatttgccagaagaaaattactactgtctactggcttggtgtttccaattaataagtagatattaatgtgactcagcaaattgctgtatgtcaggaggtttccttctttattgtacataaagatcattaacgtacatattttaacattttgtatgaaactttcaacttttctgaccatttttaattgtatttttttaattcttttcattttaagtcctttgagatagatagcatttgtttcatcattttcttttaaaccatgaggaaattaactgactcatcggagattgtttatccagttagtgttcatccagttagtggcagagccaacacaaatgatcaggtcttgtagctcctgtctgtaccatctttcccgaagactcaggttatacaagatcaggccttgtcctacgtgcttcagtgttcttcctttgatgctgacaccaacaaaaagtgttgtgtaagaccagcactctgcttcctgccatgagttgtgattatgatttcatcacaaaatatttgacctccccattcatcatcttggattaagtcacttcatgtttcgtaattctcttttgtcatctaagacataacaatatgagtaacctacctattctgtgaactacagagtcgttgtaagtgcaaaggagttggtagtcatctgaccagcatgtgtagactattccttcacattccctcacccccacacataggtaatcgcagtttctgagggtcaatctcacacttgctcctgcaattttgctgtgtaccactgccccc

SEQ ID NO: 45710 - DNA, 2336 bp, Homo sapiens
ctttctatcctacctgttgtactcctcctttgtgactcaagtgctttggcttccaaatggctagtggattctttccaaatgttgtcacctgtttaccataagcaacgatttgaaaacttgttttcaaaactgcacttaaatacagtaattttagatcatctaaaacttttggtttttatattccaaatattgttgatggcatgacaattctgggggttcctgtccgacttggtttcactgcctgagatcgcacggatgaataccgcaggcaggtgaagagggttgcctattctgccaagcgaacctgaaaacggaagcagagccgcttcgctcgggtctttcaggactgaccagcagggggcgcgcgcactctgcggaaaaagcaggatggcgttcactgcaacgcacgcttaaggaagttagcctcagagttcacagccccggaaactgttctaatttctgataaataatcactaatacaacctcaactttaaaaatttcatcctacacaatttgtgacatgagaatttcatccagatgtagccaaacaattaagaatttgaaaccaaaaaattggtaacacaattgtacataaattccggtgggccaactggacacacatttggggactgagtatcaacagggggctgccagcgtcacttttcttcctaaaggagttaggtctcgaaagctgaaaacacagcgttgtatctgtcaatttggggattagctgctttctgcaaacacaaacacctgatttgttcttggaatcagaactgaacgcgctggaggcagtacaaaaatctgacagtgagagccaacgttaacaaacaccgcttccggatctcagaaacctgggtccagagtcccacttttttgggaattggaggctttgggctcaacacttgcggtaactggcccagcttcctccagggaggaccttggccatctgactctagcgggagggcttcctgctgctgcaattctgaaactaaaggcaggatgctggctcgggtgcgctgggaggtcacacgttaaagagcgtccactacccaaagaacaggcctctctgagcactcagaggacgcggttcccacacgcacacaacagtcggccccggggaaatgctctgcaaagtgagctttaacaaactgagtcaaaccataaattacatttatattgtttcctttccatttaacaaatgtgcccatcagcacactacacagatgcagaggtgaaggggggaacgcagcctcatcttgtatgctgcacgggagacacacattctttaaaggttgactataatacacatcttggaaactaaatatctaaaatgttttaggaaagcctttaaaacttcctaagtacctgttttctaaataggcagtcaatgctgaagcagcagcgagttaagaactgactagctggttattcaatgcataactaagcaacccagggaagttctaactccctgggaacctgaggctgctcttcgctatccgagactgacacgtttccacctgtggagtgtcacgcagtataactgtacaaggagagcgagattgcggctgtgtggacaccaggacagaaggcctcccccacacctccacgctgcaatgcatcaggggcgcccagcggctggtccacagccacctctcctctacatcttttcaggagtgaaaagctgagctgagaatgcaagaggaagagatggaagtggctgaggaaaaacagaacacccggaggacccaagctgggggctgagggaagtctctcttcctccctctgcagcagtggctgccttctgtacctgggaggtggctcctagagcgactgggaaagaaatgtttgacttaaacttactgagctctgctctgctcttcccgtaatcctgccttctctaggctttttcattattttccccactaaaagccaaatcctcttcctaaattttagactcaacattctccaacagccatccacttagccagtccgtcctgcagcatcacaggttcccagggggagcagcccactcaggcaggaaggaagcacttcagtcgctcttcccaaagcacccatggctcctcctccaccaggctggggataccacggccaacaagatgggatcccggcctcctggcacgtcatgctagccaggagggccaacaggaggcaaacacagaccacagactgtcccctgcctggcaaatccaggtgccaggaggatgcacagcaggggatcccccccacactcccgggcaggaggcggcctgaagggtgagcggatataagggtgaaaggggttggggaaagagggagtgagatggggaaggtgg

SEQ ID NO: 45711 - DNA, 6468 bp, Homo sapiens
actccacaccccatgtctggccttgcagtgcccctgtggctctccctcaatgcacatcagcgtttgcccacttctcccacctgctctgctgcaccagcccccagcacctgcctccacgcctcccctgctctttcccagcacagcagcccgagtttgagtcaggccaaatcacctctctgctcagagccctctctgaataaaagcccaaatgtgaccacgaccttcctctctcccttcctgaccaacagtctccacaccagccaccgtacctcctcactccccaaacccaccaggcacatgccagcctcagggcctttgcacctgctcttccactgcctagaatcgacttccccaggcacccaatggcatgatccccgctttccttcatgtctctcttcaaaagtcacttgtcctcgatcaccctgtctaaacgcaaaacccctccccctgctcctgtaagtcggagcccctttctttgcttacttatttttccttttgaacatgtatcactatctaatgtatttgttacttgtttatcttgttactattggatttctcccaaccagaatataagaatcatgagggcagggatgttcttggtctcttgttcactgctgtgccaccatcacctacacatgtggtaggcactatgcagatatttgatggaatgaatgtaaaagcaaaatgttgattgtacagctactaagaatgaaagatcacctgactactcgggaacacaatctgttgctgcagtggtgacctggttggctcagacatcacaaagcctgaaactatagaaataacaatcgaaaaagtctaggagcctcaaaatgccaacaaggaaattcaacatgtttatgttttaaagcataaaccttcctagatgcgagagatgtaaataaagggtaaccctgaaccatgttaggtatcgcacagaggggactgaaatgaaagacttgggcccactggtgttaagagtctggaaaacacaagaacggaacaccttggtaacccggcgacaatatccccaggaaacagctacctccctcccctagggctgcgggacaagaaagggagagggggcatatccaatctggatggagaagaaggtcgggtgggagagtgagagtgcgaggaaaggggagagaggacagaagctgggcaagtcctgaggtcagcccggtccgacctcacccaaacagaagtccaggagagagcgctagtgagcactgtgcctccaccccaggcagggattgacatatccctgcagatgtgtcaccgtgacacatacaaggcccagggatggcctccaagcaccactccacagtgtgtgtgtgcagagagagaaaaagcacattctcccccactgcagtactcaagggaccaagaaaagggctcagcatccctttaattgctagcagattcaaagctgcaagtggggccaaggctcccacaccctccaagggtgtgcagacacttccaagagtcaccagcccactgccagcagaagctcagaaatccagatttcctcacaaatctcttaaatggaactagagaatgcaaatctaacccgtcccagaaacagttcaatccatgtaaactggggaatgtgatagggaatgatgcagagaaaagccggcattgcagcacagcaaagcacacacatctggctgccttttgtgtttatagtttgtatatccagataatctttttatgcaaacaataaatctgcatggaaataaggtgcaatctgcttttacattactgggatatattttacttggcaaacaatttccctggacttaaaaggatcaaagaaagggaaaggacttccctggcgctgcacaacaaaactcaggtggtgctgggcagggaccaactaactgcccctcagaaaaccaaggactagaatgaaggcagggcttatggtcccggttctggtcccaggctcccctcttcaccccctccagggtgtgccagactgtccccagcagagagagcagctccaacagttccacggtgtgctgtgagaaagtcctttacacccagccgctggacctcacactcaccgcccaccagccctgccaccatcattctgacccctatttctgatttctgttccccttgaggtacttggaggtagctatcatatcccttctgagccttttctccacggtaatcgctcgcgtcttcaacctttcttcactcttttgagccactcctgcgtgtccacacagcttgtgaccgcgtaacagacccagcacaactagggcgacagcaaaagaggcggagccagggtgtgtgcagggcacgcccctccctcctgctccaggtgaggtatttccaccagcgtggatgcaactgaaaccacgccctctttccaccgtctggcccaaccccagccagaagcagctgatgggacggtaacaatgacaactggcatttatggagaacctgctcttgttagaccctctaccatgcctttcagtcctcacaaacgtcagagaccacaagcacaaagttacaggtggggagccccacggggatcccgctccaaccagcctgcctggggtcacggagctcagacgcctgaccacagtgaagctcagggactccagtgtatttaagcctcgttccaggaaaggtcattgaataaaccgctgttccttcacgatgctttcctgatttgggcattgatttgttaaatttaaaatatcataacaaacagcaaatccaaggaaaactgcttccatgcttgaaataacacccaactgtctggagaacagctataaatgtgaggctctggggagcagagggaggcctgaaaggcgggccttctcgctcagggccccaactcgctggctgtgggagcccttccaaaagatgtgtcatgagaactaagctaattatccacgtaattctcacactggggttggggccatcgccaggggaaagcacaggttatctcaagaacgcagccagataggaggctggggagacttggacgggccaccttctgcttcagtaacttggccccaagctttcaggaggtctctgcttagaggaggactgcagaaaagaaggctgctgggccactgtcccaatgttccgagctacaggtggtcacccatggaggggggtgggacctgctcggaagtcctccagtcttcccgccccttctcccctcccggccctcccaggcggcccctctcctcggcctgccccctccaccccgcaattcttcccgtctcaattccagtccctctctcttgcgtcctcccggcttccaccccctcagcctggcctccaaaagaaagatcgggcagagcggtaggaaaagggaagccaccgcggtttctgaaaacaagaattcccgcgagccaggacggtcacgaggccggggaggaggcggcgcagctgatcaaacgcgaatggggaccagccctggcgggggtgcgggggggccctggctgtccgcggcagccgcgggcggggcggccgctccgaggagggacggaagggctgcgtggcacctcgcgctcgaagaccaggggcgcgccctccgcggggagaactcggggcggcggccagacccgacgcgacccccggctcggaccctgcagttaactgctcccagacgctttcccagtgcgcccgcccgccggccctcgggaggtaccgggcagggggctagggccgggccgaccctgtgagccgctcagccccgggcgcccccgccctcctcggaagtgactcgtcctcagggagagtccggcgcccgccctgccggcctcggcccctttcccgccccatttggctcctccgccgggggcgcccccaggctgggcaggctggctccccgtccccctaaccccgccgcccgggcacccctcgtctgcgggcgcggggtccaagtgtcccctgtccagggcgggcagaaaggagaagtcgcaatctcggttgaagtctcttccccgcctccttcgtgcacttcaaggctgcctcggccccgcgcccctcccgcgtccccggccccgcaccttgccgcagcggcccctgcgccagttcggaccggtcctcgggaaaggcgtcgcgcaggcgctgccacaggcggcccaggtccgccaggctgcggtgcaggtagagcacgctgcggtccgaccactccgtgcggatctcgaagaactcctcttcgtcgccgcgccggctgacgatgagcctgcggatgccgttcacccagcagccgcgcacgaacatgttcacgagcgacgtgccctcaaacaccgccgaggccatgtcgcacgcatgcccccgccaagggctccccagccccgccgcccgcccgcccgcaggaggcgcgccccggccggggtcgtcccgggtctgtccgtggccggggtcgtccggggtcggcccgtcactccaaggaggctgcgtatggcccgcgttcggggcagcggggcggcgcggcggcgagtggctcgggccggccgggcgcggctttataaggcgcttcccatcgcgggcggcgcggtagtcgacgtcgaggttaggccgcgtccgcctcccgcccgcctcccgcggaacgggcgccgcgggccgctctggaaaggaagaggtccggctggccgcgcccccgccgcctccgcagagaccgcgctgccgcggccacgagaacccccggagccgggagccgggccgagtcccaagcgctcgcccccgcctcgcgccccccgcgcctcctccctcgcggccccggagccgcaggtcggtgactggaccagccgggaagggaggcggggcgggccctgcttgccaggcgctcggcgcagacttttttctctttccgtttcgcgatcctcgggacctcccagggctaggagctgcgcgccccacccggcccgcgaggggatggcaactacccggggtccggaggcggggctgcgagtgtcggggcggggggcgcgggccgggtcgagcaccgccccgacgagggcccaggccagtccggcccgccccgggttccctccgtgcctcaggtcccctccgtgccccgcgtcctcccgcgcattccggtcatgcctcagccgcgccaaggcctgggacacggccggacagaccgcggggcagccctcggagaagtgggaagaggggagaaaacagtggcgaaaagaaggtctcctgggaaggagcgccctgggaagctggacgcggtgggtgctcttgaggggcctcaggagtggacttggggaaaccgcccgccctgaaaactgactcagcggcgcgttactgaggccgttcctagttggaagagaattaatagcacttgtttgagaattacaagttagttccagaaatgaatcgagtgacctcacagcccgtaggcaggggtgggagagccagggtgagcccctcacctcaccccgcccccgccccggcagcgctctggaaagcctcaaagcccagcgctgcgcggaaatgttagaggcccaaggcaggtggcctgtctggactcagacccgacccagatgtccccccaggtccctaccactcagtcccacctgcctcgactcagtcccgacccagatgaccaccccccccccgcccccaccacgaccaacttttattccgactgcgccagtgacttgcagatagcatagcttcaaatttcctcacctggtctggggcggtgaacaggtcaagatggagagtgtcaagagagacttttgctttgtctatgatgtttttatatacacttgctaattaaatgaacgcatatgtttcctgtgtaattttgtataggggaataggggccgtgggaactggaagtaaacagccagtgtgccagcagctcttgactctaggtggtgggaataagtgccgttgtaaccacagtaccagcccaaacggggcttactctgtttgtaacaatgttgagttaccttgcaggtataacagagccaaaaactcttaagtcacaaagcccaggcatgcaccatagaaaaagatttgatctctaacaaacatccagaaccaactattcgtctccttggaacgaagaagactgggacatgactggaacccgaacattcgaactctcagaagggaagggtctcttggcccagaagataggggctaaaatccacctcaacataccgtaccataaatggccaaatttgaaggccttcaaacagatcctgcccagccaacatttctaagtcctttcctttgccctctgcttccttagaacttgccccagaccccaaatcagggaggaagatttgaacctgcctcctgtctccttgctggctggtcttgcaataaagtctttcttttctcaaaggcagtaccatggtattgcttccgtgtacattgagcagtgagcctgaggcaggaaaatagggtcaggaggcagggaacataaggccaattcacacttcggctgtaacaggaaatatccactccata

SEQ ID NO: 45712 - DNA, 3694 bp, Homo sapiens
tatgtacaactattatgtatcagttaaaaaatgaatacaccgagttctactcgtcatggacattcagcaaggttagtgagtcaagccgttgaggaagccgctttaagactgtgtctgtagagtaatgagccaccttaaaaacctggtcaagaaaccatgtactttgaaatccatcagttttagagtcagagataaaccactgtttgaaataaagggttgttttcaaatgtattatttttagaagaattcagaacatctaaaactatgttagaaaccaaacttacttcgtcctgtcagacaccttgatgacccagttaacaaatattcctaagctatgcttatgtgttcagttctatgccagaaacagagatattagacatagcctctactctcaaggaacgcacaccttagctgttaagcggggcagaaaataagaaatacatgagaagctaaataaacacatgtgtttgataataatctaaagaaaggcacagaagctgagatggagggagcagctgaggctcattagtggctgagcattggaacagggatcaaccaacttctgcttctgaggggccaacgtgaccattccgagggccgcactgactctaaaacaagcctcttcgccccgatgaactacactctgatgtccagtggcccacaggctgttgtttctttacgtttgttttgaacttcccttaaagaataaatataagaagcagggcctggtgcatacctatcatccaagctcttcaggaggctgaggcaggaggatggcttgaacccaggagttccaagatgcactgagctatgattatagcactgctctccagcctgggtgacagagtaagaccctgtctctaaaaatgaaatttttagaagccataaaactttctcattcattcctcataaaaatgaagccatgtaaatatgactcttgggaaagagcagatattcaacgtggtagaatatgggatcttccatagagtggctgatgcaatgaaaaacatatacaattgtagcagtcagttgtgcccctaacatttgcggggccccaggcaagagcgcacatggaggcccacgcaccataggtttaaatatttaaaagttgctcaccaaactgataaatatgtccatatcctcctgcctttgcaaatataccttcatcatgacctgaagacaaggttcaaatgtaaaatttctgggcaccgtgaggttaacagcacagtatgtagcagtgcaggacgctcctggcctctggcctgccccctcctcttctcaccccagctcctgagtgggctctcatgcataggctcggcctgcttagaccacatgcccaagctctgtgcgtgactcacaacagctgcctgtcttcacccctcaggcccacgggtggtgtcacctgcagtgtggtgctccccaggaagacagatcctaaggaatcccttcatgcaggacctgaaagtgagaacagagcaacttgggcaggaaatttggggtcccagttacctggaatgtggtctacagaaagacacatgagctccaggtgacgtcctcaccccagtgggtaggggctggattggggccctgtaaagcctggggccagggcagagctgcctctcactgggtctgggtcagccaagagccaccatttgtggaatgcactctgtgctgttctctgtgctcacgtgttgtaatttccacgtcacagagttttcagggcgcttgctcaactcacagctgatagtggcagagccagaattccatcactggacggccgtctgactccagaatccgtgctcttcctcacactggtttaccatttctcattaaaggctgggaagcactggattggattatctcacgagcccacttccttcccagtgatactcttcagccgtgtgagcagggcaggcccagcatcgccacctctgcgatgaggaggtggtccagacagtctaaggttcagacctgctgacttacgttacacacgctccaggctaagttctgttactaaacactccgaatctgggtttattgaccatttgtgaacacgggttatggtgtcctcatctgaactttctccggatgatctccctgagtcagtaggaatgttgaaatgactccatccaggtgaactttcatcctcatggaaaatatgtggttctctcctgctgctggcaactcacagtgtggagtaaacacattcccttggaaatgcttgtaattctaggtttttccaacatgaaagtattttatcaaaataatgcttagtctaagcagtgtttttttctgagtttcgacatcttagctctatggatcatattttgactagggctatggcccagtgttgatcccattccttcactgctgggtctaggagcagtaactgaattactagaaagcctttcacgcttcctctatgcaggccagcttgggaactttgataaagaaccttgggaaaaagcaaccactgtagggctcacagcccctcagcagtaaggccaatagcccctgactgtgcctgcatgccgcaaaggcacataggataacattgagctaaattaaatttataatgtattttctatccccaatattactcccctaaggtctagttaacgggcaaaggactgagtactggatggtaggatttgggtcagctgggtaaccacctggcacagttctgaacagtgtggccgcaggggcgagtttcatatgatggtccacagaggagcgatttcagtctgtatgtgtttccctgggcagtggcaggatgggttcctgtttactgttctcatttgtccggttgtgaaagagtttgtttcattctttttgtttgttaacatcttcagccctgcagcaactaacctccgggctcttcagatagtcttgtgaggtgagagcggcaagaatccaatgtggtcattttttaaattttaatctcaatcttttttccttttagaatactattcagtaacagtttagagccgtagaccagcatgcctttagcaaaatgacctcatgactcggcatcccaagttgtgagttctagtcctggttgtgccactttctaactttcacttcgcgcctcagttttgttaatgtcaattggagatagaagtgtttgccttgcatacctggagagatgggcaggcatctaactgaggaccatttcgacagtcatgagtgggttaaccaaggtgacaggaaggtgagcaagacgtagctcctgctctcaatggaaaatcaacatgtcaatggctaatgatggcctggtgtgtgggtgaaagaaattgagactttgaagtactttccatgaaaaattattattaagcattaatagagtaggttggaaggtaagatgaacccagccagtctgggactctcagaagctgaattggcccaagttagtgccaggcacgaagaacagactcacagttcatctgatggcagcttctagggctgagcttgcaaaacacaaatctgtgtagtcaaggttttgcctactctttttggagttgttcataagcatggtaccaaaaaaaaaaaaaagattctgagctcaaataagtttgggcaatgctgtatactgcatgccccttgacaatttctttcttttttttttttttttgagatggagtttcactcttgttgcccaggctggagtgcaatgacgtgatcttggctcactgca

SEQ ID NO: 45713 - DNA, 2977 bp, Homo sapiens
tgtgtcttttttgcatttgctcagagtgtccacattgacacagttaccatggtaagagcttccttttgaaagcacagtggaatcagcccattcagagcgtgttgtagcaggcatgtgattctttcctgcttccatagacaccaatttcattgtaggctccatgtattgttgtcttcttcctgagaccttgggttggggccagctgagcgggttttgatagcagctgtttctctcctgattattttttgatttctttgatagatgaggctgcgagtgaacacttacatcacgtgcagaagtgatatgagagccaggagcagaaccaaacctcctcctggaagattcttatgctatttaggccttcagagtagaccagatggctgacactgaccctttagctattcagtagtctgtagactaaaactcctgccataggctcacttgcctcagatcttaatttcctgatactcttctcatccttaaaccctttcttctttagttagtcagtaataacaatagtcacctttaataagtacatactatcaaccttcccacaagctatatgctttatatacattatttcatttaatccttctatctcctctgcgaggtattattacccccattttatcaatgagaaaactgagatgcagaggggttaagaaatttacataaggtccctttgagaggttgacattattaggatcttctcctatgtccatgctttatctcccagacagactctttgaaagcaggaaccaagtaacattgatcagtctcacacccacagtgttagaatgccctgatttgtatcattggcctatttccattgtgtaaatactcccatcatcactcacttcaggctaccagtgtgaagtcactgggagcagatgtgtacaatgggctcccacaagccggggaaagccagctatggcagcttgctggcccctgagatatgcatagttacctaaggggtctagccccaaactctgcttgtctgttggggtgggatttggctctgtcattctctaacagctgttaaaacatagtaccttggaagaatctgctaatgtgggtggcggatacttcacccaaatcttactctgtgccctctcagggtaggacactcaagcttagtcccaaagggaacacacccctccgcatgaggtgatgtttaggcagagggaagctgtgtgacccatggcgtcccttctaaatgaaagcaaaacagctaaaacaaagcctttttgctgtgatttggagtaataaggtgaggaatctcttctaagaatgattaaccataaaggcatgcaaaatatgtctgaccgaacacaaagtttaatgatatcgtattcttcctgccaatgacagaccttttcatcattctcttatgtctgagatgctcttgtttaaatgaaaacaaaattcctcttgtttaagatctgatcacacttaccacgcttaccttcactaacaggaaggtgttttaaaatgcttacagtaagagatgctggattctgtgtttctaaaacaagtgtgcttagaacagtaagtaaatatgtacattgtgtggttaggagagaaatggatttctagttcttagtaaatctccaaagagttccaaatctcttaagttaatgaaattggaaacaatatttggcagctcagtaatagaatgacctcataggtatgcatgcttagattagggaactcattcattctttcaacaaaattttattgaatatctcttaggtgcaagacactccgtaagggtctggggatataaagaagagaaaaacccaggccaatgactggagatgaagtggctaacggatgcttccaggggttggcaagcaacaacctgagggtacaacccagctgcagcctggggtttactggagcgtggccacacccaccacttatgcatctgctgtggccacttcaactcaggcacccagttgagtagcagctgggacagagaccgcttgtccatggagcctaaaacactcactggcccttgagagaaagagttttccagcctctggtcttaggagagagaatgtaggcccagactatggtgctatggggagcaaagatgaggagacggagtgggatgaactttagaaggtagaatctgtcgggtggggagcagagtgtaggaccaaggataatacccaagttgtcaatggggcctggagggagagccctctgcttccaggccacttccttcccaccccgtgagccctgagtacacagcacgcccagcatttcctgctgcccaatagagcaaactatttatatgcttctcaaaaaatccctttatttaatgtgaactttttttctagaggtcttgggacagtaagtctaaaatgaacacctctctttttaaaagtaacagttgactggaatattgtcaactgctttatctcatgctgccatagcagtaaaggggaggccagccacttagagaaaataaagaaatgttggacttggtaagttaaaacctgtaacggtgtttttcatcatcatgatcatgactgtactaatccaaaataaggcactatcagataattaatctttcacagataaaaatttaacaaagcagtagctaggttacttgacagtaaatctttgctttatttctttatcttaattagagaaataacgatgggttaggctaaaggcaggtgagtcagtctgctaggggaaaggtgaccttgacgacttgttaactgttcatctgctctttaacccacccagaggtcctaaatgtcacacgcttcatgaattacgccacgtgaagttcatcagtgccaaacgaccttattaatgactatttgacccaacaaacatgattgaggccctctgggtgtaggcactgctgtgcccatgccctgccctggggtggcagaaataccaacaagaccaggcactgccctttaaggagctcacaaaccagcatgagaggacggagctt

SEQ ID NO: 45714 - DNA, 1743 bp, Homo sapiens
gtaaatttttatatatctcaataaaccttttttttgttgttgttacaaaagaatatgtatccactggaaaaaagaaagaaaaaagaaagaaaatgaaataaaaatacaaaaagcccaaaagaggaacattagaatccccacccccaccccgccaatgttgaggtctgtcctttcagtatttgctacaatctaattgggattatgctgtgcatgtttgataatcttttttctaaaactgaagtttgagtgtcttaggagtatcccatcatgtgaatgtaccaaaagttaattaaccagttccccattttgagggaattcatcatttccattttttcctgatacaaataatcctctgctgcatcagtacccataagattagggtatcgtgcatagacccataatgttccctagttggtgtatttggtgaaaaggtgtgaacacttttaggactctttttgtttttttttttttttgagacagagtcttgctgtgtcacccaggctggagtgcggtgatgcgatcttggctcactgcaacctctgcttcccgggttcaagcgattctcatacctcagcctcccttgtagctgggatatcaggtgtgcaccactgtgcttggctaatttttgtatttttagtactaacgggagttttgccatgttgcccaggctggtctcgaactcctggcctcaagtgatctgcccgcctcggcctcccaaaatgctaggattaaaggtgtgagccactgtgcctggcacttttagtgactaagatgcacacgtcttggcacacgtgagtgtcatattcatccctcttgagagattctatttttaagtcattgcaactcatgtgaagtcgcgtctcaggaatgcaggagctgggcgagctgtggaatgttatgtgaggaatatgtccaagtttcttgaaagtttcacaaactgcttctaaaggcaatttcagaaggagggatcttcagggttgctctcaacaatcaacaaactaggtacacagcctcacaagacgatgacctctttgacaaacagttctcatgtagacagagaaatcccacacatttgctctgtaggagaggaaaaaaataattttctctctgcccttctgagtctcagctgggagggactcctgtaacaaaagacagattaacaagaaaaaaacaagcagaagcttgctaacatgtatgtctcatacgcacagggagacacccagagacaagagtaactctcaaagaggtggcttagagttcaggctgaaataccatcttcacctgaaacaaagaaggaagggtatatgaggaagttgtgaggatggaccaggaaaagcacaggaaacagggtaaggtttgccatacaaatttaaacccgtgccttctccattgatgacagtctcttgataatttacggccgtttctcctcctcctactgacaggggaacacccttacaaatagggatttccattacaggtataaatttcccctacaaaagggtaacttctctgttttcagagcttcttctgtgtcagcagtttctcaaaataattcttttttttttttttttgagacggagtctcactctgtcgcccaggctggagtgcagtggcgcgatctcagctcactgcaagctccgcctcccgggttcccgccattctcctgcctcagcctcccgagtagctgggactacaggcgcccgccaccacgcccggctaattttttgtacttttagtagagat

SEQ ID NO: 45715 - DNA, 1267 bp, Homo sapiens
catctccttaggagttataagtagaataaatgaaagcttcaagagggaagccaatggcaggatcccaggtgggtggggagggggaggcggatgaaagctgattacaaacatgtccagtagcaagtgggagtgggcagcctgagccaggaattcccaaaaggttgagggagttgaacagaaatgggtgaagggtcagaacccagtcgctgggtcagattatagtaatgtcttcctgtgttagaaagagtgattcattattttcaaaggaatggatagaagaggccatccttccacacatctgggacccagtcttctttatggtaaagaaaggttggacatcactctttgagccctttcagcttagagtctgtgagtcggaagagtttgtccatgagcagagacactagaaccaagccacatacaaacacgttttcatagtgtttggagaatgtattgcttgcatattatggcttcaaagtcaaaatacaactccagaggacaaacaatttagtagattcatgaaaaagcaagtgaacctgctgtaggattggcaatgcattgaggaggccagcctagtgggctctggcaggaggaagagctcagcagacagggcagggggcagtgtctgttcagcatgatgctatctggggctgaccagaatggcttcatgagtgtgtctgggtgtgcacatgtgtgtgtgagtacgtgagtgtgcgtgcacacgtgcttgctgcagttactcactacagtgcttgtttttgccaagttctcagctcccgagctggtgcctgtgaagctggtgcggtctgcagatgagttttctgtttgggctcctggaggctccagctgtgccaagctagggtatggccactggtgactaagcagagaagcatgtgtccagctgggtgtgcctctctggacagctgcagagagaaataataggcttctttgcctgcaggacaagccccttgtcagtctgcaaagaagtggctggttcctcagccagccacagggagaccctgaggtgtagagaagaacctctccaaccctggggagctaagggaatgttctgtagcgtcacaggggagattattcaggctacccaagctgtacagcatggctggagggaacatacagacatccctcagcatcccagggggattggttccaggactccgtgcagatacaaaactatgggtgttcaagatgcttatgaaatcacagagtctttacatacatcctatgcacatcctcctatatactttat

SEQ ID NO: 45716 - DNA, 2668 bp, Homo sapiens
ggggttgagactcccactcacttggtaattctgaaaatgtaatctagtgtgtgtgcacttgtttattatttaaaatcacatttaatggccaggcacagtggctcagcctgtaatcctagcactttaggaggctgaggcgggtggatcacctgaggttaggagtttgaggccagcctggccaacatggtaaaaccccatctctactaaaaatacaaaaattagccaggcatggtagtgcatgcctgtaatcctgtctacttgggaggcagaggcaggagaatcgcttgaacctgggaggtggaggtttcagtgagtccagatggtgccacttcactccagcctgggcaacaagagcgaaactctgtctcaaaaaaaaaaaaaacatttattcagcaccgattctatggtacaaattagatgcaaaaatgagctggccttgccctgcactcacagggcctacagacaaggagacagggaactagaagtcagtgtggttctgcaggaccctctgaaatctaacctagctgcatgacccagcaaagtctgcaggaaaactaagaacagaggcagccctgctgatgcattatttagccagattgccctccccacagccgccagccaagcatgtgttctgccaaggagagacaattaggtggccgcactgtggtagggcagagagctcttgcagctctgcatgaaatgggcactgaggtgagtgagtacttccctctcctgttttagaccaaggatcagtcaactttttctgtaaaggatcagacagtaactattttgatgtatgtgtgctgtgaggtgagtgctgcaacgccccccaccgctctgtcgtggtagtatgagagcagccgcaggcacaggtcacggaggggcgcggctgtgttcagtagggcagcattcatagaaagaagccagcagcgaccgacgggccctcgggctgcaggttgcggacccctacttgagagccaggccagtccaaattcccagttgccctttattcacggggaactatgtaaacatcaagagactattttccaaaactcgtttttaaaaaatctcaagcacataaaaacacattgtgcttctcggtgtttgtttttcagaagtgtttttccactggcattttaactgaagggatttgtttcttctttcatttctcctgtgcttcttggcgacagagtctacataccgacatttcaccctttcctcaccctcgagagtaagacttccaagattaagtttattgtactcgggagttggccaagcaaccacataactcctgtctgctccgaatcctcaaggcagtgccagctgcatttttccaggcccggacagcatgccagaggggcaacgtcacagcccaggcagccaggcctccgtttcctgtctctttcctcctgaaagacacatgaatcatatcagctttatcatttgactcggagctcatttccctgttccacaaacgcctggagttagaggcagtgagagccaagtacaatgaaaacatgaagtcctgagttgctttctccccttaagaatggaacacatgttctcccatctcaaaagaaagcacctcagctggcttaatttggagtcttttggcctgagcacttggctcctgggtcagacactggtgatctcatctgaaaagctgggccctgcctgtgcccaaggcgggcaaggtcccagccatggtggcagcagggcccttgtgtgcgtccacccctggcacacgtggactgtgtgcttaggggcaggtttctcctgcaagtaaccctagctgagtgtgaatgtagacagcaatctgtgatcacatcacaacctttccctgagcgtcttaccatccttgctctggagtgaaagggctaataggaaaggaaaagtctaacaaagaatttggacacatgaatttgaaactaaaatatcaatgacttgtaaatacgaggaagggatcgggtgggtcagagacaggagctatccagatactgctcttacctgctcacaaacacatattgctaaatttattgagcacttactatgtgatagacccagctttaaaaaggactttacttgcactaactcatttcatcttcacaacaatgctgccaggtagatagagttgttgcagttttacagatgaggacattcaggtcccaggaggtatcttgcctgaggtcggacagctagctaaggtcagaacccagattgatggcaaggattctgaacgactgtgagtgtttgtgtgctgtgtgatctaagagaataacacgataataagcagattcattattaaaaagcatgtatgtgtttcagaaactccctgtgtattttagtataatcatgttcggcatgataagattagacatttatgtttattagagccacactaatgaaaatatacaactggccaggcatggtggctcacgcctgtaatcccagcacttagggagtccaaggcgggtggatcatgaggtcaggatttcaagaccagcctggccaagatggtaacaccccgtctctactaaaactacaaaaattgaacgggcacggtggctcacacctgtaatcccaacaccttgggaagctgaggcgggtggattacctgaggtcaagagttcgagaccagcctggccaacatggtaaaaccccatctcta

SEQ ID NO: 45717 - DNA, 1763 bp, Homo sapiens
tatatacattaagttctaggcactataagaattatctcacagagatgcatatataagaatgatcattatagagttaaaaaataaaaacaaatgtttaacaataaaaaactggtaaaatatattttgatatagtcttacattgaaatatatatcggaaccattaaaaaagatcaggtaggccttttagtgttaccatggaaagaagtatgctatattgtttgaggatattaaacaacatacagaatgatcccatttatattaaaattaacatatgcattaaaagtctgaaggtaaatgccaacagttaataatggttatctttcaggtgtagaactgcatagaggctgttttatgtaaagctttcacaaaattcaagcagtacaaaaatatttttattttaaaataagtgaacagatatcagagagaaatacaggttgggtaatctgtggcccccttgatggtagaatgcgttcctcttgccctgggtttctgcatgtcagtgaagtgtccagcaggtgacagtcctgttgtgttagggcagggtggaaggaaggaggaggaggagcatgagagaagaaaatattttccccaaccaggacactagaaatggagaaatttcacagggagctccaggggagcataaggggttgcatttctagcgttcactgtcctagagttggctcctcaaagcctgtgcagttgccattgctgttttgccaggttctgcctgtaaggcccagtgacagcctccttccccactattgcccaacccagggtttcttgtaactgatctcatccctcctctgccctttggacttgactttggactaatttgacaacacatcagccagccccattatgaacagctaaagtctgatgtgatccatgagttagggcctttgctgagttggcatctctccacttccacccccgccacaagaaactggagtttggagtctctagagaagaagccacaggaggaacaacgcaaacaagctttgggctcccttgtttcacgtcttgtgatcaacttagatgagttatgagaaagttctcttggttgaatcctagccttgcacaactcaaaaggatcagaaattctcagcaagtaatttttccagataaaaaatgaagcttagaaaacttacgtaacttcctctaagcctataacaaatttgcagtaatgccaacatgagaacccaattctcccgacactgtggactcccaacctcacgcgggactatttccactctgcatgccatgtctttgggtgccgcatttccagctgcaggattccagagcttcagggatttgttaagagtcaattttgacaccttcactcaaaatagagaattgaaagtgaaaatgtagcactgaatgcttttactgtaatgcctagtgttgtcagtgtcagtagtatcacagtgtcatattatcaatgtgatatttgttcgttcatctattcattcattcatcaaacatttctgagcatgtacatcatgccagaccctgcagcagaaaaaaataaaacaacacagcagtagcaaagaggccatatgacccagcaatagttttaagccttacatccttattcagtcagtctagtcctgtcccctagacccctggcctttggtcttggcaattcttgtatagagaattactatatcattgcaaaacactcagtttactgaagaccctctagcaatattcaattgcaatcaactcttgtaggcaaaccctgtgaatatggtagctgtgtatag

SEQ ID NO: 45718 - DNA, 5950 bp, Homo sapiens
aaaaaaacacacacacaagaaaaaaaagaatgaaggaatgaactactgacatatgcaacagcatggatgacaatcaaatgcattatactggagtgaaataactctgacttaaaatgtacatattgtatgattccatgatgtgacattttggaaaaggcaaaaaatataggtatgcatcagagtcagtttgtgttgctataaatacctgagatcgggtgatttataaagaaaaggggtctatttggttcacagttctacaagctgtataataagcatggcatgagcatctgcttctgcggaagcctcaggctgcttccactcaagcagaaggcaaaaggaagctggtatgtgcagaggtcacatggtgaggggggacgcaaaaggagagagggggagctgccagcctctttttaacaaccaactttctcagaagctaacaggtcaagagctcactcatctcctcccccaggaagaacattcatctattcgtgagggatccacccccacagcccaaacatctcccactaggttcttcctcccacattgggatccattgtcaacatgaggtttggagggtcaaatatccaaactacagcggtgtggaaagtagatcagtggttgccaggggcagcgatggggaaagagtgtgactcaaagggataatacaagttttctgggatggcagaaccattctgttcctgcttatagtggggatcacttgattttgtgtgtgtcaaaactcatagaactgtataccaaaaacattgctatttttgctatatttcaattttgttaaaatattctgtgaagaagtatttcatggcaagacttcagcaatacctcacatatactcccataggagagcaacagcagtcatcaataaatcatcctccctccctcccataccccaggttaaactattaatatcaaccaagacactgggacgtgctagccaggaagtcataggccaagagtttcttctgaataaacggcaacacaacaaaacatagggccgggagcggtggctcaagcctgtaatccctgcactttgggaggccgaggcgggtggatcaggagtttgagaccagcctggtcgacatgatgaaaccctgtctttgttgttgttgttgttgttgtttgtttgtttgttgttttttgagacggagtctcactctgtcgcccaggctggagtgcagtggcgcgatctcggctcactgtaacctcagcctcccgggttcacgccattcccctgcctcagcctcctgagtagttgggactacaggcgcacaccaccatgcccaactaattttttgtattttttagtagagacggggtttcaccgtgttagccaggatggtctcgatctcctgacctcgtgatccgcccgcctgggcctcccaaagtgctgggattactggcctgagccaccacgtcctgccaaaaccccgtctttattaaaaatacaaaaaattagctgggcatggtggggggtgcctgtaatcccagctacccgggagactgaagcaggaaaatcgcttgaacctgagaggcggaggttgcagtgagccgagatcacgccactgcactccagcctgggcaacaagagcaaatctccttctcaaaaaaacaaaaaaaacatagcatagacccagggctgtggagtcacggcatgtaacagagtccaggatctaaccagctggtgtgttgcacctgccccgcctccaacgaacggagccgagcaccactcaaaggccggaacacgttctttggacctcagcaggcagaatgcccaacgctggagcatcagcaaatgagctcacagggtgcagtgggtgcttttgaagctcgggtcaactggaataaataacggattttctgccacgtgtgccctgaacagcacctttgaaatcaaagtgaaagatgagcatgatttagaccttgccaaaaattacaggtgtccaggcatttgtcaatacttacataactatataccaaaaacagcaaatggtgctgctgtatgtacatttaataagaaatgaaaaaaagctttagggtaaagcctagctcaaagtgtaactagggataaatgttaagcaaccagctcatgtctttttatttatttggccccaaattaaagcaatgaatggcaagaatatataccacgaagttgtttcttcttttgtggatttcttaccacaatcaatggtgcttctaacaaaaaatacaagtctgcagatagttaaaagatggagacggtgggccgtaggtccgacctgttaggagccgcaacaagaattgtcctgtgtatacattgcacaactctcctgtcactggggcagtatcttccatgtttacaagctgtttaaagaataaaccctaaaagtgatgagccaagtaaaatacagactggcaaccacagatgataatgcaattcccctggggctggtgggtccctggaggatcacgatagctctgggaaaattattaagtggtctggttttccatgaagctgggggtgtcagtgggtttatcaaaagttccagggtgctccagggcggtggttccctgggcaggtagtcacagtcacaggggagaccatagaggggtgttctctacaaaagggctgaaagtgaagggaacaaatgtacatagagtcaaacagcacattctatctctgtttattgttataacgttgtcagagacaacataaataactgatgaacattttaacaccataaatgagataacagccagcacctctctgatttgttttgtcttcagggttccccaagagtgcttggtccttcacttgcttacccaaagtcaacactaggttcaggcattttctaaagcactttcctatcttagaatttcaattcctgaacttattagacaattgttcatcatctgcttcaagtgccaagaagttgttgcctcagggtggcctccctctacgagtctcattatccaggaatcctgcagcagtcatcctggaaagcagctccaggaacagccttgcctgctgcaaacccggctgtcccttggcctgctggcctctgtgacactggtgatgttctgccaggtgctcagtgttggctgtgagcagtgtgcactgtggccatccctgagcccagtcaaaggtccagcagagcagcagctgctgccccagcagaagagcgcttcacccaggatcactccaagttgggaggaaaataaaaatttcaaggcaatcatcaatcccaccattgttcccttcccaggacctgaaccacctgctttcagtttgacgaaggaagaagagcacagaggtgtttagataccaatcatctttgctaagggcagtattgaaaacaagaggagaggactgccagagagccagagctggcttcaacacacatttttaaattgcctccatgggctgcagctgtgaaacgtagtgtgcgaagccacatccgtagcactttccaaaaaaagaagggtcctggaaaaactggccagtgtcatactgtaatgctttctacgtgtttctacataaaacaacactttcatcttctacgttcctttaagaggacagtgggagggggacattcctgatacatttagtacatgtgctattctaggcaggcttctgactttttctcatactcttttctatgtaggcatgagctcctagccactccccttggcccctggcttctgtcatgcccctcttttccctggtaaaaattctaaaagctatccctcaggtgatgctttgccacttcaaaacaaaagatgttccaccctttgaaagagcatcagagcttctctccctatctgcccttctcctaaaaggtgcctgtgggacactcgctaccttcacccagctgtagtaagccccatactggtgaaaacaccccataattttatttttgagaaaactgtaaaagacataaaagcatattatgaaaataacatttgctgtacgtttctaaaaaatacttttcatcaagtgaaggactctagttcgcaattaatattttatctgcagggattgagatgttattagtgtggtaagttacacacatagagatttctagtgttgagctacctttgagaaaagcctattttgtccattttcatgtatgtattcataaactgctgaattccatttgttaatattttgtttgggcattttgccattctatttataattaggattggcgtgtactttaatttcttgcatttttcctatctggcttagaaattgacagcatccataatacactcttcttcaaatgacctggccagacatttcaatctatcatatgaaaaattaaatcttcatccaccaaaccaaaaagtcagtagataaaatttaaaattgattagtcacaacatagcaatgtaagaattattagaaaataaggaggtaaacaccagaagaagcaactgaaaggactggaggtggttgcctccagggaagagaaaaatagacaggaaactgcttttttgtttgtgaaaataaccctttcaggattacttttctttttaaaccaagaatataaaaccatgttccattcttttaaaccgttttatcaaacatgtattactttgatacaaatgaaagaaaaaaatgaggtcttacagctcagagacatttatggtgcagcatttattttgaaattgtgacatctcttaggtttcatttctctctcacgtggtgtggattttttcccccagggaacacatatagaagtcataggtttcttgttcaagcttttcccttctagtatattttgtacttccttgtctctgaacatgtgagggttcttccccttacccctacctgattgcatgccaaaatattggctttccaccaagcaaaggttggaagacatttttaaaccctttattcgaaagcgtgcaataatattatctagatatcctttgaaggacttctggtctggtggcggaattctgaattcatacactagttcttttttggcacctggttgatgtgaggtgttgtggctttgctttgacaactggttcaggatactgtggtggtgttggagggatcattgagtggagatgctatcggggcacgccctacacccaggccaggcccaccatcagctgtttcatttcaaggctgactctggagaggacagtatatctgccacttgtaggataatccgtttaaaatagaattcagactggtggaaagcaacatgaaaaccgaccatgacaaaaggtgttatttgcgggggtctgttattgttgcttgtattgaaaactaagttctttttctcttgttaaaatagtttaagttttagttttgtgagatttttaaaacactgatgctgtttgcatattttactttgtgactaagcctggaggagggcacatttttttctaaattagtttgtgtatttaatcggcatttctgagtcactagaacagaatgctgctccctctcctctgttgtattattgctattgatacttttatttatttatttattttttaacaatagaatgtaccacatttatttaaatcaatgactatgatgattatataaaaacaagaataataccgggcgaggtggctcacgcctgtaatcccagcactttgggaggccgaggagggcagatcacctgaggtcaggagtttgagaccagcctgaccaacatggcaaaaccccgtctctactaaaaatacaaaaattagccgggcgtggtggtgggcgcctgtaatcccaactactcgggaggctgaggcaggagaatcacttgaacccagccggcggaggttgcagtgggccgagatcgcaccattgcactactccagcctggaagacagagccagactccgtctcaaaaacaaaaacagaaaaaaaaacttaaatggaaaaaaagtcatcaaatgggatgcaaagtttgattaaaattgctaaatatatacagat

SEQ ID NO: 45719 - DNA, 3024 bp, Homo sapiens
ctccatcacacttgctgcttcaccttgcactttatgttatagaggtgacttccttcctcagcctcatgaaccaacctctgctaccttcagacttttcttctgaagcttcctcacctctctcagcttcacagaattgaagagacttagggccttgccctggattaggctttggtttaagggaatgtcgtggctggtttgatcttctatccagaccactagaactttctccatataagcaataaggctgttttgctttcttatcattcatatgtttaccaggaaagcgctttcagtttcattcaagatttttttcctttgcattcacaacttagctaactgtttggcaaaagaggcctagcttttggcctatcctggcttttgacatactttcctcactgagctgaatcatttctagcctttgatttaaagtgagagacgtgtgacacttcttttcacttgaacacttagaggccattgtagggttattaattggcctaatttcaatattgctgtgtctcaggcactagggaagcctagggacaggaagagagatgaaggaacagccagtcagtggagcagtcagaacatacataacatttatcagttaaatcaataaacgtctttgtcttctactgcacacttcggagtgcccccaaacaattacaataacctcacagaacgatgatcacagatcaccatagcagatatcacaatgaaaaagtctgaaatattgcaagaattaccaaaatgtgacacaggaacacgaagtgagcacatgctgctggaaaaatggagccagtaggcgcttgacgctgtgttgccacaaatcttcaatttgtaaaaacaaaaacaaaacacacagtatcccagagctcaataaaataagatattcttgtattctggtgatggggcaacaatgagaaggctttagattaaaaaaaatgctaatttcctagattaaggcaagtggtggggaatgggagaaaaaggaaagtgtgaaaggctcttctgtaattgattacctgtggaggaacgtcattccaggaaaaggcctaggtttctggcttggacaatttgatgagggctcacaccgtgctgttctcctctggatatgtgggtgccatatgtaattatcatatgattcacgcttcttggtaaggttatgctcacaggcattgttgctcttaggcgggaggaggctgaaccgcagtatgtatttcacaaccagcttttccaaactaggtcccaggaagcactggtttcggcgagtgttaccagatctcctgcaggggagaaacggtcacgaaacatgaactggtctgccctgctcttggagagttacagtggaaactggcatgttagaggctcacagtaaagacactgctacactttaactcagtgtcccatggttattagagcttagaacccgggggaaactgctgtatagaagaggtcaaacaagctgagtgcaggttttgtcacgaaactggggggcgagtagggttctattatcaaagaatggttgtgttggggccataagaaagaattacaggcagtggtgcgcaggtaatgttcacgagacgccacagcggggtagcatcagaggcgggaggaggagggttggagagcagggccgtgttgcaaggctctctgggtggccacagcagcttgcgctgcgcccacattgcttctgcgtgtttacagttgggcacgagaaggctcagcacgcacgcacagcaggtgggggcccgccctgcccacagcgtgaaaacaggagccccggccagccacggctgggcagggccagaagcgcctcctccaggatcctccccgcgctggcccgccccacaggagcaccgcccctaccaggagcccggagctcttcccagggcccgcctccccgccagggggcgatccacctccacttcctgtttccgcagccgccctaccaggagcctggcactctcctcagggcccgcctccccgccagggggcgcaccgcctccacttcctgtgtccacggctgtcgcgagagcccggggcgagtgggcctctgctcgtgggtggttctcgtggaggtcagctcccgcgtgtctccgctcgacagggtgcttgggcaggtaagggtccgctcagtagcccaaccctctctgtatgcagctccccaaattcagcgctgcgctcaggcatggcagccacccgttacgtggggccgttcgcatttgcatttattgaggtcaaataaaatgctggaaattggtgcctggtgacactgtcaggttggtggttaccctagcaggtcggcccagcccctgaacgcttccatcactgccgaaagccctgtgaggaggcgcagagctgagcattccccgccgttgcgtgggcccccctctacctgccgcgtttttcctctttgctgcagagcccatcgggtaggcgcgggccatggcgcagtacaagggcaccatgcgcgaggcaggccgtgccatgcacctcctcaagaagcgcgaaaggcagcgggagcagatggaggtgctgaagcagcgcatcgccgaggagaccatcctcaagtcgcaggtggacaagaggttctcggcgcattacgacgccgtggaggccgagctgaagtccagcacggtgggcctggtgaccctgaacgacatgaaggcccggcaggaggccctggtcagggagcgcgagcggcagctggccaagcgccagcacctggaggagcagcggctgcagcaggagcggcagcgggagcaggagcagcggcgcgagcgcaagcgtaagatctcctgcctgtcctttgcactagacgacctcgatgaccaggccgacgcggccgaggccaggcgcgccggaaacctgggcaagaaccccgacgtggacaccagcttcctgccagaccgcgaccgcgaggaggaggagaaccggctccgagaggagctgcgccaagagtgggaggcgcagcgcgagaaagtgaaggacgaggagatggaggtcaccttcagctactgggac

SEQ ID NO: 45720 - DNA, 1314 bp, Homo sapiens
agaaagaaaaaggaacagacattcagaacgggccacagtctgcacacaggaacctgcctgatgggaaacatggggactggatgaggatgcagcaagcctactgaggattccttcccagaatggcatccgccaagagcctgtgttttctgctaatgctgacgtcgggcgcagtgtcttcctgcctcttaagtctcctccacaactgcatcccctgggccccaccagccccagtctacacccttctgactcaataaatgctaatatttaaccaggagataagggccttggtctgcttgacacgttagttttgttttttaagacagatatctttcaagaaagcatatttctgactgtatcaaccatctaacaccactgataatatctgatgctgtaggctacgaagtgacagagttaaatactttgatcttccaatcccccttccgtctttgcacaatcatttccttctttgtgctaaatattaactgggtcagatggatcattctgatctgtgtcactcagtagagattcaagtcccgccttcagatggaaagtccaaagaagccaagatgaatctcaagttcaattataaataaccagcaaaaaagggaaaggaaatgagatcaaacttaagtcattttcttcaggacaattttctcttctttctttttcattgtgtacaatttcacatcatgagaacttctgttgcaaatcagatccagttctgcctttgaaagaggcatcaaaatacagctcatgggaagaagcggcgtctcacctatgaggatgaacttgaggaccagctggtggctgaggagggagggttgcttgagtacaggagtccaagatcagcctgggcaacgtggctgagaatttagtgcattgttcttcttctttttaataggtagtctccctctgtcacccagactggagtgcagtggcgccatcataactcactgcagccttgaactcctaggctcaagcgatgctcccacctcagcctcctgtgccgctccccaccccaagatgcctaaacttcggtgggcatgagtcacagggggagctccccaaaatctacaattctgccaggttcccacccttagatgctcagtccagaagaacttcaggtgatcctattgaaaatgagtggggcccagtctttgagaaacactttggcaaatcagagcagaaaaccactgcctttagcagcccattagcctcagtgaggacaaaaagggggttgagatgtggagacatatagggagtaatacagacctctcatttaagaagtttgtgggccagccacggtggctcatg

SEQ ID NO: 45721 - DNA, 1914 bp, Homo sapiens
atatatatataatttcataaatgtatatttttcttccagaaaattcgggcaatagggataagcagaaagggggaaaaaggcactggtagtcctcccactcaaagacttagctccaagagtgcctgacagctcctgcttcccagcagtcacacccttgtgttgtgacccacatggggtcagggatggctgatggtatatgatgaaagtgaccaaaggtgacttctgaggctagatcatgaatgacactgcagcttccacctataaccagggttttcaacagcagtgctgttaacactgaacactttggaccagatagttatttatcgtgggggctgttctgcacattgtaagacgtttagccgcatacctggcctacccatcagatgtcagtagcaccctttgctcaatagtaaacataaaattatgtctccaggctttgccaaatgtcctcaggatgagggagtgtaagagtccattctcacactactataaagaaatacctgggactgggtaatttataagaaaagaggttcacttggcccatagttctgcaggcacaggaacagggagcgtggcagcatctgcttctgggggcctcagggagctgttactcatggcggacagcaaagcggaagcaggcaccaaacatggcaaaagcaggagcgagacagccgaagacgccacacacttttaagccagatctcatgagaactcactatcatgagcagggccccaaaggatggtgctaaaccagtcacgagaaattcaccaggatgacaatttgtcatgagatttggacgtgcacacagatccaaaccatattagggggcaaaactgttctcagctgagaaccacagacctagactcttggcttgctagctcgggggaaaacagccagcatgccatgtggcacaagcagcacggtgaagaagagcacatggagaggagctgaggtctccagacagcggctggcacccgccggccgtcatcgtgagggtgtggcctgcagagtggacccttttgcctcgccaagcctccaggtaaccgccagcttcatgagacaccccaagacactcccacattccttgcctgcgaaaacgtgagggatcataaataatgattatgctttagaagccaccaagttcgtgggtaatttgcttaattgacttctttgttgagtaattactcttgtttgaatactgagtccaaattccttttccttctttggaaacatttctctagggtctaggtcaaagagtgaaaaatgggatcagctggattgtgtgcttattacataaaatcatcctgtggaattaaattatttgtaacatttcaattagtggatggagaatacgttgcaaacaccagccgctgaggtgtatggtggaacaagagatgccggccctagagtgagcctcaaccacagcgttctaagttttgtgaactgcgcttctgtctccaaagcaacaagatcatcatttttaggaaccaactcctctttgcctggccaggtccatagatgaattaataatacattttagagggtctcagctccttgttcagccacatgtaatgagtaaactgaggaacagtagactcaagtgaattatgcgaattcggattgattatacatgggtctgaccttaccattcacaaaaccagatcttgatggttgtttcccaaccaggctgaatgtgctgctcctgcagtgagtcgtgtattgagatgggaagtcaactttgtcaatccctagagcaattggttggagcctgctgctgtgtctgctcccactgctgtggattaaactgtggggccagttggccctgacattttggaaagatagcttggggtctttgttgttgtgtttaaaaaatatatatatcatttgacgatgaagtaaattccctgcaactc

SEQ ID NO: 45722 - DNA, 1060 bp, Homo sapiens
taagtagcaaaacaaatacaaattcaagagacatcttgcttaaaaaaaaaaaggtggaggggaaggtggtatttatattgccacgtcaattttttaatgcactttaagatgaaagaaatgtccattaaaacagggaataataaccagtccctaaagatccatttgcagctcttttcacttcctccagagtgaaagaaattccagtttcatgatgtcactgccttagccagatctttctgaggatgcagctgctcagatgcacacaggttctgtttgtgcagtttcctcctgtgtttcccagaggcgaatgaggaggacgggccatggcaacattcaacaagctggcctcacccagcacatacacacctgccatctctgcagttctgaccttggctagcctcactccactgtctagctttaagccccatcttcatctttgagcagtggctggaagttacagctgcagcaaatgtgcagaatatgaaaagaatttagaatagaattagaccagaaacgatgttgttaaatccagccatgtgctacagagacctggcaaggttgcaggcatgtctaagtgtacagaagcaggtgacatatgaccgaatgtaggggccaggactaggagctgacctttgcaagacagtgacttagcaagtacaaaatcaacaaaaatcatcctgacctctctacttctaactcctgcacccaagctaacatccctgctcatgatgcaacctcggccagctggtaaggaggccccaaaaattcacttgaaaattcaactccaaatttattcggaatcttttttttttagtgggaaaatgacttgtaatcctgaaaagagacagcattaagtgtagaaatgatgaagatgaatcaaatctatttctgatatcttggggttaggaggtaatctgtggatatttggccttttccttatttgttacatttaagaggattttgtgtgctggagtgtcagtcaaacttgtaattctaacttaaactgtggagctaaaaagttgatgtagactataattttatgttgatattttaagagaat

SEQ ID NO: 45723 - DNA, 6046 bp, Homo sapiens
ctcacgcttctgtcatctgcagcttccttccacggtggcatccttaatgcccttctgtggtgcccctttagcaaatgctcaaagggaatgttgaaaatcaggtcagctgtttccaaagacacccagtggcttttttcctggcctctgagctctgcttagctgcaagaagagacgcaaaggggcggcaccagccccacagacgcaaggattgcttgggatagcccagggcttccactctccactagggctgtgaatctctcactgggctgctggtgaggcagctccacatgactcaggaagacactcttgggctgcccaaagcattttagggggcctacccagcctacaacaggtgcagctgccgggcgacccagcctggcagtcctcagggccaggccctatgttgtctccagacacaaggagacatttgagactaccagggtaactaactgacgctcagctgaaggaagctgacagcattgccagccagagtctttatggacccatcggtcaccatctcttggattggtttgccatgtatacgggcttgtgtgcaaacacacacacctattcacctggttcccatggggatttagtgtaaagttctgtggattctttctcccacttacaaagcagcctgtgtgcagacgagtggacctggagatctgatgatttacactgggaccagcccaggggagggaaagcggatccagggacccagctgcccctgaaagaaaggctgtgtttgcagtgctcggggaacatgtatgcatctttgttttggggacaaggaagggaaggtgacttgcaaggagccctgttgcctaaggcttagggagaaaactgagattcgtttttctgtttccaaggaaagaaaaaaatccatcaagcaaatgattcaaggttcacctcccacatgctctctggataaattgcaggatggtggtttatatgcagtattgggcctcgctcctgagccacattgagctacatattaagcaccactacttcagtgggatcaaacagtcctgtaaataacaacctcatagccagttactgacatcaactccatccacaggctttgggaaattacctccagccacatcagcgtatttctttttaatatctcagaaaaaggtatgaaattgctcattcccagctcatattacattgaccagtaatagaaagatactgctttgctctgcatgtggcagaatgtggtcccctctggccctgcccagccagctctgtgcccccgaccaccaaccctgagtgcagagcccgtctctagcctgtgaagtctgtctttttttggagcctgtagctttttgagagaatgaccagggggcacttgctttgagttgtgggagttttctcctttgtttgaaggaagggtcctactgttttctctgaggcctgctgctgccttggagataggcttcttgcttcttaacagctaagcagttggagaaaaaccaacgatttcttcctttcgcagcagtgtgtcttctctgggaaattcaaagcataactcttgacaacagtcctggatacctggtgccctgcacccccctccgtggtcgtgcagacactgaatcctccctgaagcacaacaatcctgccctaactcccttccacccaccaccacaggtggccaactactttaaaagtccatagctcaaccatttttacaaaaactacagctatttggaatttctgtgtttaacccgcatgaatttgatatgtcttctccagacaagggaactcttttctccttcagtgtgtgtgtgataggaatgacctgagacatagagtcagaagccctaggtcccagctctggccccactgtgaacaagctgatttctctgaaccattgtctccatatctgtaaaacgtgcatccccaaaaatgcctaattcagagagggcaatgaataaaaaatatacttgaaaagtatgggagaatgcaccttataaattctaaaaccaaaatatgatattaccaaaccatgaaacttggccagaaagatgtaatctgttcttatgatgaatttaacaaatggattgctgtgatttttatggacccgttaatatggtttccacaaataatgaatagccagtagaaattgatacacaaaggattcaaaattattgattggctgtgcagtgagccagggaaagaaagtggcagaatttttcttgatttataaagaaaaaatgagggaagaagaaaagatgggtgagcttaagacaaacataagaacctaacagaaagaatatgcacaacttggactacaacaaatagctgggaaatgagtgacaggaagcaagctcaccggctacattcttatctgggtcacaatggaaaggatatgtcttctgcatcttcactctccctctctgtctctgactcctattgtccactaggaaaacaagcgctggaagtcaagaactttctcaacactggagcccagtgcccaaatccatggctggcaggagctggacttcagtggccagtggctgaaagacctgcaggccactcttgagaaagggcatgaagtggcctcagacacctccagtatctcctgttcatgggggtccctgctctcccaaatggttcagatgcttcaaagtttaaccagtagacataagaggaatgttctggaagccattcagcactgtccacaatgtcgcaggatgagcagatctgtctgctagtagaaggaaatgccgttagagtttgctgacctgaacccagataccaagtcaacccaggtcttatcccatcaagttgacatccgctctacacagatcaatgtttgcaagaatcatctctctctgctctctctcttcttccttcctccacattacttgcagtcttttctagccatcagttctcctggagggtcctggctccacctggagatctacagcaaagtcctagaggtcctgctgaatttgcttttccctttctctccttgtggcagagcagcggcaggagagctagggatgttctcctgctatgctgatgctactcacagcaaaactccttcggtgttatgctaacaagtttctgtctcaactccatctttccgcacactcctctccctgctaggtgcaaggagggggaaagaaaacaatctctccctatgcactttaaacattccctgtgatgtgtcaccagactttatcgcctttcaggcactagtgagtcactttttgaggcagggcccccgctctaatgtccacagaatcccgaagcagagatgctgccaaattcacccccactggtggctcactgccaaggagaaacaggagctgtcttttttcagaggtctttaaaaatagtgtaggaggccaggggtacattaagtgacctctggaggtccagtctgggctcaggaagttctgacaaattcaaaaatgtaggttttaagagacttggggggctttacacaacgaggccctttttagcatttgctgctgcaggctgatgggctgaattaatcactgttcctctaatcaactaaggaaaatggtctttccttcaaaaacagctgtcagcaatgactataaattggttcattttatgcagaaagatgccctgtgataggctgtcagccaaatgaatgctgacttcaatgtgacttgaaacagaatgttggaagtggcaatatatgaatggaacaaaacaggacaatgaagcagcatctccatagtcacagcgaggcatcatgaaggatatacagggagtacattttgagactgacaagcaaaaatcataatcttaacaatgttgcctaatgtttagtgagcacttattatgtcctagactctacactaaatatgtcatttgtcttattccacctaccattaaaatatttccgagcaggagtgtttctattgagacctgccagaacattgtcaaaatcataggcccaaagagcctagcttgaaagcatgctgtactctagcagaggggcctggaaatgcacaaatcacagagacaaacacaaatcagagcggcagaagccaccttggtctgaagctggacttaggagaaaaggctctccacttgctataataggtctttagacaatttcacaccctccaggtctctggcagagcttagaggctaaaattttgtttaaaaacaaacaaaagcagtttgccttaagtgggcaaatggaaagggagattttttacttgcaaataaggaaatgatatttagtaattttctaagcatctgtctgtcctatgttttgctttagggacctataacattcctcagtgcttgccaatctctagtttggaagccaaaagacactacctcataggcagtgagtcagcaaatgagagtgggtgggaagccaagggagtaagaataggtggaaagggctggacagactccaaatccaagctctgtcactgacgagcttcaggacttcggaaaaattacactaactcctttagcctacctcctaatctgtaaaacagacataacgaatgctaccttgcagagtcgctgtgttcatgagataatgaacatacattattcattgcccatggatgtgcctgctacatagtcaagattaactcatggtaactattatttaaaaggaccactggatccaactccaagatttactataaagctatggtaatgaaggcagtgtggtattggtgaaagaacagagaaaaagatcaatggaacaaaatagaaaacctggaaatagacttacataaatatagtcagctgatcttcaataaaggaacaaagacatttcaatggaacaaaggtcatcttttcaactaatagagctggaacaacttgtccacaaaagagtcaaactctgtaaatatttgaggagatttgttctgagccaaatatgagtgactaatggctcatggcatagccctcaggagatcctgagaacacgtgcccaaggtggggtcagggtacagcttggttttatacattttattttattttgtttttttatttaataaagttttatttttccaaatgtacaattggttgaacctgttcatgcatcttcaccagcagctggagcatccccgcccttggtatttctggtgtaaattacttgaactctgtgctttgaaacagtttgttaagtcctttactaaggagctcctgaagggctgctctggccagggaacctcgaatctttagtctcttagagaccacagctggagctctaagtttatagttgggaacttccttacagagtttgtcataagtagctttgtcaaacaagactaagttattgagcttgtcccgaactttgcctttggatcacttcttcattttggctttgccccaggatttgttcactgggtctttgtctttcttgcccaactttttggcatctttcttcttcttgttgtccttgggtgcccttgtgaagctcagagagcagcggagaaccgattttacacattttatgagacaagagacatcaatcaaatacatataacacgtacattgattcagtccagaaagacaggacaacgggaagctgaagggcttccaggtcacaggtagattcaaagattttctgattggcaattggttgagagagtcaagttattgtctgaagacttaggaatgtctgggttaagataagtggttgtggaaaccaaggttttatcacacagatgaagcctcctggtagaaggcttcagagagaatagattgtatttctcatcagacttaaagaatctgttctattagtaatttcaaaagggaggaggatgtaatgaggcatgtctgacctccgcttcccatcatgacttgaactcgcttttcaggttacctttcgaacgcccttgctaagaggagggttccattcagatggtttgggggcttagaattttgttttcggtttataaaccgggtgttcaaatgcatatatatccccataactatatatatatatatatatatatatatatatatatatatatatatatatataactatatatataactttatatatagtctttgcacccttcacaaaa

SEQ ID NO: 45724 - DNA, 699 bp, Homo sapiens
tagcaaagaaaggaaagtaccgttggaagagatccaagtggacactttgaaggtcaagtgtggcatttgactttttgactcggggttttatatgttggcatatttccagggtcttgcatcccttttccatggttcctcccttagggtgggctgcctgcacgtgtggtggcctgttaatacttgggaggtgagcatgcgcagtgtgtttactggagttgtatgcatgcttgcctgaggcttccttcccttccctggcggaatgtcccaggaaggtccttcttcgccattttgtttcttaatgtgcatgcctgagcctactcaccgaattcctgagctgccaattaccaatttcaagtattttttatatattgtgaaattgcctctccctgggcctgtgaccaattatcgctctagtgtgacagttgtgggccatcaggaaattgcctctccctggctccagctgccaattattatttttagagaggcactgtgacaactgcctgactatcacctgatgatcacttgacattcctggtaggtggggggagggagccctctcctgccccactcatgcctggctagctacctactatcacatgtgcagcatgttactgtgctgaatactatagtcaattataacacaatggcgagtatttgcatatccaaacatagaaaaggtaatgggttggtcttggatgt

SEQ ID NO: 45725 - DNA, 1223 bp, Homo sapiens
aggccaggcgtgctggctcatgcttgtaatcccaacactctgggaggccgaggcggctggatcacctgaggtcaggagtttgagaccaccctggccaacatggtgaaatcccatctctactaaaaatacaaaaattagccaggcatggtggcaggcctctgtaatcccagctactcaggaggctgaggcaggagaattgcctgaacctgggaggcagaggttgcagtgagccaaaatcgcgccactgcactccagcctgggcaacgtagccaggatctgtctcgggggacagggaaataaatttaacagtgtatatttaattggtttgataaattgtacgagcaaataattggtcagtacatagatatatatgttagttaactaaaaatactaagtagttacagaaagtaatgacctatattttcctttatgagactctttttaataagagtttaacttaaataaatacaatacacctaaggctagtatagggtggtttttctagctccaccttttaactgttcttagcctcttcaggacacaaattttattttgtttattaaaaccatgtgaagtggcattgttactatcccttgccctcctttttataaaaaattgaggaagaaactgaggctcagaaagactgagtagtctttctagaccacgaagctagttaagttatggttccaggatttaaagcctgacaactgaccccaggatcaacatttaatcactaggctatcactgtgatgtgagataatctatgtactaaaaagccatatcagaccatataaaagacaggctagacagtaagtaaacttgtaaccatgccctctgtttgcccttactctgagaagatttctattaagtttgcaatatgaggcaatctctgctatgacttcatgataaggaaaaaatcatgctggtcctttgctgccctcttatggaagatgtacatagatatacaaaaaattcccagccaataactgcagtctaactttgccaccataactaaactatttcaggtgtacctagctttacatgatagataagattctagaacaatgcaactggtacataaaaggtactcagtgaacgtgcagaactgcaatgaaaactttctgtctctttgatatgcactaagcgcttgatcttataaaaatcctatgataaattatttaaatggcaaatcgccctccaatttaattgttgtggtatacaga

SEQ ID NO: 45726 - DNA, 1658 bp, Homo sapiens
tgcaggcacttccactcattatttcatcttactctcataataattctatgcaatcagaaccattatccccatgttactgtgtaaaatgaggctcaaaaaagttaaactctttgaaattgcacagtaagttgtgaagcccaggtctgcctgacttgaatgctcacgttctaaatactaatctagctactgcctcatcacatagtagttacaagcaacagtgcaaagttgaaataacctagacatacaataacaaaggaaaaagagtgtagttataaaaatgcttactgaaactagaattatgtatgtaaaaattgggagacatgttacatgaaagagcaaactatcatattctacacgtgagtacaagaaaatttaacatttcatatggaaaaaagccaaaataaaccaatatattcaagttggttcagtgtgggtaatggaactctgggtgattttcattgttttgctttgttatcctttggtttgcaccaaaattgcttcaatactaacaacaaaaacaacaaaaacaaattacgttctcataaactttgttttgtaacaaaggaaaattctgcccagtgttccaaacacctcaaagttccaagtctaggtctaaaccagagtcgttaagtattctctgaaaagcgatctactcttaattgacatctggcgactctacatggaccaatggcttcctccgcaggatgttatgatctttattttgtttgtagcctacggaagaatgagcctattaagagcttattgagattgatgattgcacagtgtagcttgaaaggtccaaatttaatccgtttcaacgggaggaacaaaattcaaaactgttttcaaagtatttcgagaatgtgtcccttatctggaagtaatacttaaaacgaagcaaacaaagacggtaagagaaagtcacaaatgcaagctcgcgcccgaagccagcctcgggcaggtacactttggtgtggtgtggcggcggcagggcgccaagcgccgtggtttttacggtctcgtcagcaagcagggccgacctccgctttatcggacaggaccaacgcaggatccggggcgcggcggcgacagggccccgaggcagatgcccgagctagaactctggcgcctacttactcctcggccggcccggctgctccgaaaaacgacctcacaggaatggctgcaagagcgccgccgccggcaggggctgaggagaacgagcctggggctccgggcccagagatgagacgctctggctgggaagcaaggagcatcggcaccgacggatagaggccggtggccctcaggttgagcaggcggcttcggggcggggagagaagggaccaaggcccaccgcaggcctcagatcctcccacgcctccccgctgctacccaacgatgacgcaagtacgcatgcgcctccccagctgccgctgggaagagcgcgctccccagggccccgccccctccaaggatttccggggaggcgggttccactgctgacttaccggttttactcctctgctcaaaaggcgcctgcccgaggccgctttccgttgcaaaggttcctgaatttggggaggaagagcagcaagactgaaatattgggcatacgtttgttgcttcataaacgtttgctgaatgaataaactgat

SEQ ID NO: 45727 - DNA, 1939 bp, Homo sapiens
tctccaaatcctggcctcaggtgatccgcccgcctcggcctcccaaggtgctgggattacaggggtgagccacagcgccaggcgagaaatatttttttaaagaggaattaaagaacctaattggttttgagagttctccaagagccagtaaatgttttccccacaatattccattctaccccattactgtagagtcgttatagaagaaaacaaaatcacataacgcaacttgggccaaaaaacattacacgttccaattacggaaataacgaactgaatcgtgtcacccttgaactatgtaaaagttgaaaagatgttcagtgttaaatgtagtaacagttccacattaaaagatatttacgttcgagtttacagtatttaaaaatgcctttctacacactttcccgggaagttaatgccacttcagttgagctgtctagcgagatggttaagcatttactgtgtctctaacaccgaccaggggaaaaatcatcaattcgtttgcccgagtttaagagaattttcacctaacttctaatctccacagccaatcagttcttggaaccgcacacccgatgccgacatccctctcttgttggctcccctcgttagcgggattcaataactaaacgtccatttctagcattgactgaagagctcaagcttgacactcgacctcaatccttagcagcaccgcccaccatgctcccggaagctgcgacactacgccctgcgctagtcccgggacgtggggttttatatccggattcttagcgcggactcagaacccagctcttccctacacggtcggcacatgcgcggcagctcttttccttcttcctccacttcccctaccctccaccgtccgggagccgccgccaccgccgccgaggagtcaggaagttcaagatggccgccgcggagacccagtcgctacgggagcagccagagtaagtagtctctgtgagtgggccagaagctggagcccggggactgccgagtgggagctgcacggggtggcgggaaagttcgggcctaacggcgagagtcaaactttgctttttccggcgcgattcgttgtggggtgggaggcatggggagcaggcggccttcgagcttccttctcccagaggccgtggctgctggggtgaaggcggccgcggcctgccgcgcgtcgttgccccgggaggcgtaggcgcgagcggcctctacaggtccggtgcgcgtggcggctgccgcggcagtgaggtcgcgctttcctatgcctcttttggggacccatctgagctccctggccgcagctcttagcggcatctgtgttggggacacgagggtcagtggcagcaggcgggccaagccctaagtcttttcttcctcatgcggtacccccagtcgtccttttactggtgtcagtttaggacctgaaagcagagagcggaggtgctggggtcacactctctggccatcccagagctagtctgtggctagcgggatacttgatctcgtcaccttgtactctttagtccagcagtcacccagtattgttttgttttgttttgagtgcctaccggcagcttttttaccaacttgcaaacttgaggcaaagtaagatagagtctttggttttgaggcctggcattttttttttttttttttttttgcctgagtttataacccttctttaggaggacgagtggaaggagtagtgggaattgctagctactgccaaaccactttatgtctataattaagctaacattaagaatccatgcggccaaatgaaaaatgaaaaaaaaaaaaatacgagtgtatgctgcaaaggttaaccattggttaacttaaagcagtattttgctgttcatgtctatgttaggaaaactcaaacaagaaccttaacagagagaatggattttacggcaatgttcctatagcgaccgtt

SEQ ID NO: 45728 - DNA, 2467 bp, Homo sapiens
actggatcttgctctgtgtcccagactggagtacagttatagctcactgcagccttgaaccgaacccctgggctcaagcagttctcctgcctcagtctccaatgtagctgggactacaggcatgtgccaccacaaccagttaatttatttaataatttttttgtagagatggagtttcactatgttgaccaggctgatttgtacatattgtccaaattctattaggttggactttttttagaataagttacataaaaatgagctatgttggtattagttttaatgaagtctgacctgtatcagggctgttggaacataattagtaaagtggcattaggttccctaactgccaaggagaaaaaacctgagttttgtgatatttttaggaagaaataatttaaagtctttgttgactctccaattttaaatagtgaaaggacaatttgatgttataattgttttaagtcactgcctggacaaatataatttcatgttattaagtagttttaggtacagcattggtatttgcttttgcaaagatgttaatgaattcctgggatcaagggaatctgagatcaaacaaacctacagagactaaataacatacttatttgacttattgtatattaattaaattgttagtaggcctgtttcataatagttcaaaacccaagtttttgttttgttttgtagatgattcgaaaaggtgtgttcaaagatcagcattttgatcaaaatctcaacttcatgtacatagaagttgataaagtaacagagagggtaagtgttttaaatgcagcatgcaatagttattttattgttaactgagtactaaatcatacgagctggtgaattaaaaaaaaaacaaaaacccaaaagtaagtatttcctttttgctgtcgaccaattcctaaataaaacacatcagaccatggaaaagatggagggattttaaaatgtttttctagcataattaatttatttttattataggtcatatttaggccctcgtcacatcttctttggattactttcttggtctggcttcccatccagctttcttattgctgctagagtgatgtttctgaaaacatatctggtcatgttcctatccctgcttaaaaacctttgttggctccctgttacctatgaaataatatttaagttcctcagaatgacaaatccaactgctttcttcagttttcagacctctcttcagtacattcagaacccccacctttccacatttggccagaaggcgtgctggttcagacctttgtgcctttgctaacagacctccctgagcttagtcatttcctgtgctgcctcacccccaaccccctaaaaaatgtatcatcttcaagcctcagctgaaatacacattctgtatgagccttttgaaaactcccagattgaagtaatgatttccttatttttgtcccattattatagcatatgtccctgtctttgtcagagcacttaataatacttcagggtattaacttattcacatgtctgtcacttaccacttcaaggtagggaaagtacagtgcaaacagctcatgcttatcttattgtaaattttcattgctaacttggagttgactttttttttcttttttgagactgagtctcgctctgtcacctgtcacccagggtgaagtgcaatggcacgatcttggctcacagcaacctctgcctcccaggttcaagcaattctcatgcctcagcctcccgagtagctgggattacaattgtgtgccaccacgcctggataatttttgtatttttagtagagatgggttttgcagtgttgcccaggctggtctcgaattcctgagctcaagtgatccacctaccttgggcttccaaagtgctgggattacaggtgtgagccaccgcgcccagcccagagttggcatcaactttttcatttaagttttttggttaccttttaaaaagatgtacagcatagaggaaaccacagcaaagttttaaatgaatagatgatgatgatacagtcatgcgtcacataaccacagcatacactcacacacatctagggtaagtagtatggccttttgcttctaggcctgaactgtaagttggtggactgaatactgtaggcacttttgcaagtggtaagtgtatgtatgtatctaaacatagaaaagggagagcaaaaatacggtattccaatcttaagggaccactgtcatatatgcagtctgtcattgcccaaaatgtgcactgtgtgtatatattttgtatgtatatgcatgtttttaatatttttgatagaccccaaaacaatctgatttaagttgtatatgcttagtaacttatttagagatacgcattttaaaaattatttttaggagaaagttactgttatgagcaccattaatccaactaaggacctgttggctgacttgattgggtgccagagacttcctgaagaccaacg

SEQ ID NO: 45729 - DNA, 613 bp, Homo sapiens
cgagatggtttgccctcctgtgtcattcttacttccctaatgtattttgtgaatacttgtatatgccaggcacttttgctgctggtcatttaacccgcacatgattatatgagataaagacagtctacccactttacccatcagaaaagtgaagcaagagaggttaaggaaactgctaaaggtgttaggtgttcagtggcaggagtctgggttcgaatttagacagcctagcgacagagctagtgcttgtaaccactatgtcatgcatgacagttggtagtcaagtactacctgccaggatacagtggtgagcaaacaggcatgtcctttctgaaggttttacaaataaaaattacatcataaccctgggggtgagggaaagaatccaggtagctaaggaaagtagaaacgagaatggacacagagggcttgtcaaaaaggttcagtacacaagttagaaggaattgtaagaattaaagatggtttgtgggaaacaggtcactgcaagttggaatttagtgaaaatgtaagtccactttggcatatacttttatgagagggatattataccactttggattaacgggactgattgtatgggatacaggtaaaa

SEQ ID NO: 45730 - DNA, 2096 bp, Homo sapiens
ccctcccataacaaattttcaagtgtctcctgaatctttcagaataacatgaaagctgtatacctattgtggaatttgattagaatccggaacagtcagagttggaacaatgttcacaacaaaatgcaagttaataatgaaggaaaaataaaatcagtcaaatcagcctaatgctttgggaaaaatctaaattcagttaattctaccacaaacaacatgtaacctgcttatgactggcaacgctgaaggaggattcaaaggctctcatctcgcgctgcttgcctgacctcttgctttctaggagctgacttaccctgtcagatgcatacacggcatcgaatagcccaaggagggtgacggagatgcccacagctggaccattgaccactgcaatcagaggcttaggaaaatctataaaacagcccacaaattccctacagaaatggaaacacaaaatcattaaatgtgccaaagcagcatgactaaagcatgggcaagacagtctgactctgagataaagccttctgtcaggctgggtgtttccacagccaccaccagcagtgcctccttgtcctgccacttccctggtcttccgcaccagattcatccagggcatccgtctgaatggcagtggatggaagaccaaccagtgagacctatgggtcaaccctggtttgaatcttgtattctggacagtgagttcagggctgtaaaccagccgcagtcttagagattaggttgggtgactgagcacatgctgcaatatcacaacaagtgggaattacagatttggcaggaataaagagaaaagccttcatgacctcctcctgtgtttacaagactcctccgagtctcctaccttcagcgttcatggaaatctcccattcctctggctggatgagaatttgctaaattcctctgcctcagtgcaagataattttgtttacaactatagctcacttttatgttttccagtcaaatctcatgagaccagcaggatgaacaggtaacagaggtcaaagagaaagaatgaatgcccacctatggatggaggcagtttagagaaatatgcttgtccaaagtcacaattaactgcactgacacagagaagcagatattgcacttttgctcaactaaataccactttgatgactaagaacgggccctctgggatcagacaaaggtcagtaactcttacctcagtaaaacggcattatttttagctttctcctctactccaccagggggaatatcagtgaagttagtcagatcattcccactactgtaatagtcaccatttcctataagtaagaaaatcaacagatccctcattcaatcatcctataattcttgagtatctactgcatgccaaactctatggttaggcaagggaaatacattggagaacgagcaatggttcctgccctaacttacaaactagtgagtacgctggacactgatctataaaaacacaccgataaatgtagctaatgctactgttgaaatagaggagtggtgcgtcatgaaatgagggtatgtaccaggagggttggtctaatcagggagttcaggaaagaactttcctaaggaagcgacaactgaattgagatctgaaggagaggccaggtgggctagaaaaagagggctgggaagaacagtttacacaaaggaacagcctgtgcaaaggctctttggagaggttatccccactgtagatgaagtaagagccactgtagctgactcagggaaagccagggggaagtcggtgcaggatgaggactggcagaatagacctgacagtgctttgtagatcccatgaggaagttttttctttattctaagagccactgaaagtatgtttctgagtgtgtgtgtttaattaaagtacaatttatatacaataaaacaaccagtttttaaatgttcatttagatgagttttaataattttaaatacccacaagatcaccatccaaaacaagatacagaacatctccatcaccccaaaagtttcccgtaggctccttcctagctatcccaccccacctgctccaaggcaatcactttctgacttcaatttccacagagaagaacttt

SEQ ID NO: 45731 - DNA, 679 bp, Homo sapiens
accaccagagtttcaaacccagttgatttcctgtctgttccaggctccacctgactagaggattccaatgaaggactcaaactggacaccaaatccacatagttctgcctggcagcttcctgaacggacgatgacaaacaacctcagcccatggtcaatgaataagcactttgagaaagttactatactaataactaacaccttgcaatgaagaaagaatagaagcacatcaagatcttgaagactccatttacaatggcttaatgagaagcacaaacttctttagaagtacagcaaataaaagcacagtaactagtaaactcaccttgggcaggctgccaagggcattccatgcgtcccatttggccttgttgatcaagtcaaatacacctggtttgggcatgttacaaggtccttcagtggcctgtgaaaaggagaggggcaatatgttcaaatgtccatgtaaactagacccctaaatatttaagatccataaaatctgtaagtacatgaatgcctcccccaaatcctttcacagggtatgtaaattgatctgaattttcccctccagtctctttgatgttgttgccaaaaatgcacaaacagaaaaaagactggaaataaattataactgcctgtctatgaaaataatgcaggataaaggttttggggaagtatt

SEQ ID NO: 45732 - DNA, 2864 bp, Homo sapiens
cacatttctgcagcctgatttctaattgttcccagcctatacataacaaaatgccatgtttgtctatagatattttctttatacttgcctcagcaaactggctgcaaataattggctgtaaggattccaagataataagtcaatacagaagctaacagtagtaactttaaataaaaggaaaagtaaccatccagggaggtatctgtaagcaactaaagataaaagcagccagaacaggaatgaccatgtaaattttgccaaaggcaagaagtgaagtgcatgcaagacagtggacagcaggaaaccaaaaggctaaagtgcacagaatttagtgaagtgtcccaaagtcctgaaacagcctctgcactcactgataagccataagctatatcaggtcaattcttgcctctttgctggcgaagctggtgttccaacatacacacaggtggaaggaggggagaatggatgtgaacatacaagaaatattcaaaagaacacacgagcagttgctggcattccagatagagccacagccttctcagcagatgggagggaatctacctgcagtggaagggagtcagtgaagggggctcagcaggcgtgcccctttctatgggtatgtttaaccagccagccaggaacagagcagaaacagcaaccaccgcgggggtgatcagcacgtttttaagcacacatagtgagcgggggtggggtggcaaacttgaatgcacaggactcaggccacaagctaaaaatggagttcacgacgatgacactgaataatagagttaatggcaaaaaagatgattaaaataatacaggttacaaagcccaaacctaacacacaaacacaattatgtaactcgaaaatggtgcaatgaactctaggttcaaactttggactattagtaactgattcagtaagatcagcctagagtaagttttacattaaaatgattttctgtaaagggaaaaactgcatcttatatggcaaattccacgtagaaaacgaaagaaaaatttaaaatatccacagaaagccgaaatgtacaagtttccacaaaatgtggaacaaatttatttttaaataaagcgtgagttttaaaaacaaatagcaaaaacacgaccatttaagaaaatacataaagtcgggaaaatcactcataattctaccacttcaaggccaccaccgtgtttcggttttgttccctatgcacagattcgtgcgggttcccgggaccccagggaggtgcagcgtgcttcttagccgttactctgtacccggccatttcactttatagcatacgtgttctccaagaagcagagtgttaagtccacacgagtgataacggcttgcgtttacctcgcttttagcaagcgacgctttgcaccccagaagcagcccggctgggaagtgcaggcccgggtgctcagctggggcggctcacccgcccggagtccggccccaggaggatgggagcgtgcgcggaggcaggcggagaccttggggactgctgacagggaaccatagccctgacctcccgacgcgcccatcctgaccactccgggcccagcggtgcaggagggcgcgcgtgaggtcgtcactttttagcactacctcaccggaaaaccagcaaagcaaaatcctgttgccacctagacaatagggaaggagggtcttccaacggcggcgaccttcgcctggacagcggtatcctgcgggcgaccatgggccgaacggccgggactccaagcttacctcggacacgaacgccgcgccagtctccaagccaagtacgccatcgccatcccttgggcggctctagggctgcgggggctcgggggtggggccgggtctcgggggcggggcctagctcggtctgcgggggctcgggggtggggccgggtctcgggggtggagccgggactcgggggcggggcctaggctcccgggctgcgggggctcgggggtggggccggggcttgggtgcggggcggggccgagagcagagcccaggcaggagcctggggcatgggcggggccagggttggggcggggccaggctgagagcgtagccacgccgcattcgccatcgctagcccgtggcctcctctggggctgcgggggctcgggggtggggccgggggggtcggtgcgtgggcggggcgggagctctaggcggttaggagtcggggctcagatgcgggggcggggccggagcgaggccgggtatcacccgggagtggaggaagtgcggggggttcgcggcgcggggagggtgatcccgggaggacttgcgcggcgcgtggggcggggcacagatgctccccggcctggctccgagtaactgcgagctggaggcgcggctgctctctcgggcggacctcagctctgcgaaccctgtggctgccggagcactgagcgccctgcccggagtcccgcggagcctggcgaggaggggtcgctgcatcccgagggccagccctgagccgggaggtggggtaacaattgagggcgtatgcttaaaagctgctaggtcatgcatccccaaatcgaaggtttgcagacctggtaggacgcctgggggtcagaagtgatttttggagtacccaagtttttagtgtcagtgaagagtttgtggatatttttgagttctgctgaggcatttgcaaagtattttctttggggaagaattcttaagagttggaagggccttggctgtgtcaccttgtccagttcccagagaaccaaaaaacaaaacagaacaaaacgaaacaaaaccacccctctaaattctgtgcccaagttgtcccatccaagcatgcctaggagttttagatttatgtagctgacacctgtggac

SEQ ID NO: 45733 - DNA, 590 bp, Homo sapiens
gcagaaaattgattaaatataaacagaatgggacagagctttcagtatactcaaattcaataagcagataattatgtttatatgccaatgagggggtgatatggcctggaggtgtaccactctaatggattgtgggaagacttcaaataggtttccataactctaatgtgcctctaattgtgctctaatgtgcctctaatgtgattgcaataatgtgtctctgacctttgatatatttccttcagccagctacaattctgacttggtgccagtgttagtggtgtgatgtctgtgccaagggtcatgaaaatagaatctggttttcagtgtctgttacaacacatcacatgtccctaagcccgctttctctgtctcagtgtctctgtaactgtcttctctgtgcatcatctttctacctctgctttttcttctgaatttctgtgcaaaaatcaagcacttggcagaacaagaataacttctactttctgacaagggttaacttgttcccatatagaaataatgtgcttattttgtgttttctggtggtaaaaataggaaaggtgctgcctgataaaacatcaccatgacat

SEQ ID NO: 45734 - DNA, 601 bp, Homo sapiens
ctctgtgagttgtagaatattaaattttataaccaaaccaaattgatgtcttatgcctggaacctatgcactagtgagtctactgggaacagcttagattatcttcactactgattcatgaaaaaggttttggcaaatggtctcaggcaaggaatgaagccaggaacagcatttgtcataccagatgggctgactcaccctttggatagaaaagttcacctgtcttattctaaaaactaccctttgctctcttaaatggaccagggacatttgtcatattctatattgatgaacaagtcttgtttatccagtgtctatgagcttctgggacgcttaagtttggtgctaagtattacctatcaagctggatttttggagaaacttaatgaaaactcatgtggacatctaaagttcagctatttggaagaaaagatgggaaactctctcatagctactttgggaggaagaagacattatcagaggttgggagtatactgtatgcaagacacagggagctcatctattccaaaggatagtaaataagagattttcccttgtttagggccacagagggaccttggtgtctcgacaccaaaacgta

SEQ ID NO: 45735 - DNA, 1616 bp, Homo sapiens
cgtcatgttatctgcagtgctgttactaaaaatgagatccttttcctcatgtccaaatcagggcttcatctggatggggtcccagctctggcacaggccaatggcaggagagttcagggatgggcacacctggccggctgaggggagcctacagccaggctggcctccccagcctcttcaagtgcagggcctggcgaaggcctgccctcttggcacctgtcctgttggtcctgggacagagcccacagcttgggatagtcctgtgggagggggaggttgagtcactttgcatcacattcatgtctctgcaaatgctgagtcaccctggatgcagagcgagaggatgctgtggctgcctgccgggaacgtctgaactgggcagccctttgccattggcaggaatgagtgggcgtgacgcattctctccagttctgtgccttagtcaccaaggtcactagattatgtgtgtcatgcgagggaggcgcataaagggctgggaaaggtggcaggctgcggtgggggagagagaagggcaggagcaggcttgtgtttcagatctcagctttccttagcaaagggagcttcagcttttccacgccctctctgtgtattctttaattttccggtctccccttaagatgactttgcagttaatcaggcttgaatcttcacggtctcttgttgctacaggatgaagtttcagttcttagcctggcatttaagggtctacaatttggtggcccagccatcatgtcctgggaacagctctggccctggagaggaagcctctcgaggctgtcacagtttggttcttctttcccaggacaatcctccactgctctcctggccagctgcctcctccagccagccggccctctccctccctgctcttcccaagtcccaggctcaaagtgcggctcacatccctcctttccctgagccttcccagacagccagccccacagtggcctccttccattctcaaagcctttggtggcacttcatggcagagccagggtagaaaacagggacgatgagacttacaaatctgagctcaaattccagatccttctctgacttgcagtgtgatcttgtgcaagacacaaaacctcctggcccttagatttcttcttctgctacaaatgatcagaggttcatgagggaaatggaacttagtgtctgagtgctgggcacaaggtaaggactcaatcagtgctggccccgcctcttttgctctcaccgcctcttacttttttatgacttctttagcatccattatatccatgtatgtttatatttaaagttattttattatgtgtgtgtatactgattccctaattgaattgattgtgtgttttcattcattttttgaaagaatttttgtggagagtctattatgttccacagcttgtgccagacactagggagtcaaagggggaaagatgctgttcccaacagaaagtctggtcttatacttctttgtaaagtcaccataaatattctttagtgacaggtagagtgaaaataaacaaaatattttccacatagtgataagtataatagatgccaaataaatatttgttgagttttagctttggagttttagatgaaaagtg

SEQ ID NO: 45736 - DNA, 717 bp, Homo sapiens
aaacaaacaacaacaacaaaattggggaggttcttcccgggagtcatctcttttcaagtttgttattcaagagagtgtaaaggttgagagttaaaaccatacagatgtcataaactgctgcccagacagtaagtgacagtaagctcacacttgccaccagggcggtagccagcttctgatcactcgtgaaataaaagccaaagggcatcccacgggcaggtttcatttgctgagggtgtgaggaattggctctatggcttttatatagactcacaggtaccagtcagtagcagagggcgcctgtagccaggaccaacacttcaaagtgtcctccttggtagaggcagtgccattctggagaatgaggacatctttaggaccttaggtgaggtctgaaagccctggacactgcgggacgctaggcagccaggcacccttggaaccgaagccgcctggggaggcaggaagccgcagctcgtgctgctgttgacgccaaagccgcctgtccccaccccctctcgctcccgggagaaccgggcagagggaaaacctggagagatggagctggagttgaggaagggagctttggctagaccccggatgggcaggaaggggagagagagagagactaaaattgagtgcagcattggttttagaaataactttaggaataactgaaaacgcaaagcttgaatgtcatcttggggtgtgagatag

SEQ ID NO: 45737 - DNA, 2230 bp, Homo sapiens
ggcggctgtctgggggagttgggtcaggaagccccttctttcgccaccgatggggcacgtccagggcccggcaggtgtgccctggcagtagatcttccctgggaagtggagcgcgggccagccctcgctgttctgagcgagggcctgtcgtgtagtccacaccgttccgcgaaaggaaccaccattgacagcctcgttcgattagaacccggacctccctggaatccagactcggtcccttcccagctgcgcttcggaggaggcggacgctccgagaggaacccagaggcctggcgtggggggagctgcgggcagagcggaggcagccgcgccctcgcgccgccctccgccgcgcccggctcccgccccccggatcccacccccggcctgccgcggagccagcgtgccagccggagctcgccgggccaccccgcggggcgcgcggcccgggctccgggtcttggcggcggccggtggggcgggcatggggtggggtgggtgctccacctggccacgccgccggcccttcgcgggctggcccggccccggacgggcgggcgcacggaggccgcctcttgggctcctcctggagggaggcgcgcggtagacggcgcggccgctgccgtcggggcggtgggctccagacgcgggccggctcgctcgcatggttccctgccccatctcgggtccgtcgctgcccgtcctggtgtgcacaaccgcgctgcgcctcgaacctcgaggtccaggtcccgcctgccctgggccgggccgcaagcgcccacgtcgaggcgggctggggggcggtgccgcgggccaggccgaccccgcaagcgggactggggaagtcggagccccgcccaccaccccgccccccgcgctcgcggccccgcccccgactgccccgctcctccccttcctgccggctcgctcccggccccgccggccgcccgcctcggccccgagcggagcccactgctcccctcggctgccccgccccgccgccgccccgcccctcccgcgcgggcggcccgaaaacccggagcgcgggagcgcggctccgcagggccgggcggccgcactgggcatgctcagtagccggggcaggttttttggtcgcaagtaggaagctttctgcactacaccggagaggggagccgcgatccggccgcgccgcccgcacgccgccgcgcccgccccagcccgcccggccccgcggcggggcgcgatgagcccgagcgcgagccggcccgccggggagtgagcgcggggcgcccagggcgcgttgcgtagctgctcctgcgcacaaccccgccgcgccgccggcccgcactggccgcggagtgcaagaggctcgtccgtgcccagcgcccggccggccgcgggagcaggaagcgcaggccacgcaggacccaactgaaacaaagtgtcggccgcccggcgccggcgcccgccccgaccctgcccctcccgcccgcaactccgccgcccaccatggcttccgaggagctgtacgaggtacctcccctccccccggcctcgggccgccccccgcccgccgcccctcccggcccggccgcgccgcccgacggccccgctcgccgcccgcgcccgccgcgtcccctcccccgccgcggccgcagtttgctggacgggaaatgtgtgtgaggggagcccgagcctccgttccgaggggccccggccggggggtcctgaagttgccgggcgtggggtgggggggggggtcccagccgtggggaagtggtgctgacacaagtgacttgctcggactgagctcaaagtgctcttggcgtgggtcgtggaagtggtgcctccgttgccgctcggcggggaccgtgggcggtacggggggtggggtgtgggggggtttctggatcatttgataaagcatttgggagagggttttgcccctggtcggggggtggcggggagaagaccggtgcaaacgctttcgactttgctgttcgccaaagcgatgcaaaatctcgcaccgaaaatgctaaacgttgaccacatgctttaattaggttagcattgtggccagagccaggaaatttaaatttaacgctgatacaccgtcattcatttgcgccgcagcgttgcaaatgagaagggcatagccagaactgtaagttctggtcgatgggtttaaaccagcttcaagtttgagagttaccaatttggatctttagacatgttttgtatgtctcca

SEQ ID NO: 45738 - DNA, 898 bp, Homo sapiens
gtattatgttagtccttggtgatattttgtatagtaggggtattatattagtccttggtgatattttgtatggtaggggtattatattagtccttggtgatgtttcttggacatactttctccccgttggcttttgactttgatcttggtgtatgtgtgtgtgtttatttttgcctttatgactcgcccttgcctacgggataatgacataatgcatagttgtctaagtgtgtgatgggttaccctttgccttttgttgtttgcattgtacttcctaactcctacttcacaagatttcagttcaggcatcagttccgaaatgatttctcaactagcatgagttaaagaaagagattatgttctgccttctcagagggtgctacttttaaaagttgtttgatcctcatggtaccctttaatgactccctgtgattatatgtctagtaccagttaactatgtcagagttactttcagattttatcagttgttgtgactgtatgggatgactcagtgttggacctgagactttgcctccaattttaatatatttcatgaatccatttccactaaaatcttttttgttttagtatataataaaatctacacatctcagttttgacttgcctggtgtcatagtccatttggagagctgtaacaaaatactataaactgggaggcttagaaataacataaatgtatgctcatagtcctgggggcccagaagtccaaggtcaaggcacccagcagattggtgcctggcgagggctgctctctgcccttctcacagtgtcctcacatggtggaagggactagccaggtctcttatcagggcaccaatcccattcatgagggcagagccttgtgccactctcctatgtatgagacctagttatttct

SEQ ID NO: 45739 - DNA, 735 bp, Homo sapiens
taagcccgatgtatgcctcctattatagtgttgaaaatgttcttttgacaaatgcatcaatgaccaggcacatgagaacagtgcacagctgtagaaaaacaacaatgaaggtcttcgacacaggagagagtctgcactgcatcacagctgatccgaaagttaaattcaatgaaaaggcaaatattttggtcaggagaggaattcttcctagggagtattagcacagtgtatttttagttgtgtggctatttatagctgcccaatggcttgcgtctgagtctttatttggtttttaggacatgctaaggattgagggtcgtgggccttaattgtatagaagacgcagttgcgtttggttgcctggaggcttctctgtgaagcctggtgggacacctgctggccagtttggcccttcttagtgaaggtgatagagacaagggcagaaggtcattgtatttataggatatttgaagcttatcttgtttactttgttaataatacttgagtcatttttctaaacattctttgcataacagcaaagattaaaaagataagtaatgtaatatattaggccctagttgtcattcacctgttcttgtagagctgatacttttttcttgatcaaattttaggtttaatcatatttagcttagaagagtggtctgtcttaagagtattctgattatttaggaacatctagatgaaacttctttgccttagtccatcgtttctcct

SEQ ID NO: 45740 - DNA, 2511 bp, Homo sapiens
ttaccaatatctattaatattttagaagcagatttttttatacaaatatatgggcatggaggcaaggatatatgaaataattccttttactgtttttctgtagaattaccttcttattaccttgactttgatcatcgcttttatgttaatttattgccccatccgtggtttccagatgtcagcctgggcaacggctataacagtttgccttctgttccataaggcagatgaaattggagctactcagattttggaaacagctgttccttatcattgagagacagttcagcagttttaccttttcatgagtcatcagttactgggcctaggaaatgtatttccatcttgtgtcattgaccccatatcttcaaaagatgacacaactgaaatagcttcatgtagttcttctaggcttatttcaagagtctgcttaaaaggttgtctgacactctgatcattaaaccccagtgtgatctttctaagaatgcctcaggctctctcatttagaaagacttagtgcaactcattcatttgaatgagttaattcttgctcaatgcaaagatcccacaaaccttgggggctaggctgaggtccagccgctaaactctgcaattcctcactctcctgttcatacacacacagacacaaccctcctcacctccctgacctgcccctgccaaaaaatatgagtcatccgtcagtgtctcggggagttgagtggggagctatctcagatgctgagtcatgattttcagagaagatctgaacagattgctgtggttttaaattgctgaattgtagagagcatctagattgttattttcagtattaaagatgggggtcaggtttagaatccagcaagtgaaaagctgtccttactctgcacttctgatctagaactcagcctgcactgaagggactatcttgtgtttcttcttttctccactgtgtgaaatcataacaagaaacaacctctgagcataagatcagcttctagtatttaggggaagaaaatgcacattcctaaagtggtatgacaccaagctaccctacattgaaaagcagcctacttttccagcctgatctaaagcaaatcccaaaatagcatgggcttgatttattaaacctctgtcctgtgcagaggctgccccacgcctgaccccactgtcctccgaactcctgctgcagccgtaccctccagccctcagtggagcaggatgtgggtacaggcctgagccctgtgctgtttgctcttcttgtttgcaggtcgcatgtcttgagccagcctgtgacactcttgtctctgtatcccccagactgttcagtccacttccacataaactcaggaaatagcaattattgccagataatcagtgagctgtctgaaatcatgaaccaaggccagacccagatcccagggtttttgtgaaccctaatccaccaccgtacacttaacaccaggcagtcttagtatgccctgggccagatttcctctgtgacagcttcttgatttgtcttgtgaagcccagaatatgtactgggctcctgtgtcttcgagggaagacaggttggggagcaagatgtgttgtttatagagcccgagagccacctgcaaattccagtgcagctcatggctgcatgttaccctgtggccttcacgtagggcctgtagtgacagccactacatgcgtgggctccaggctgtcaccaaacctttacaacacgtagtaaataagtctagggtccacaactgctggggaaggccttaaacaaatctcaagtcttcaggatttccgtagcatttacatcttggtaaattgaattccataatagacttttcctttgctcaaatatgcaatgttttgagtaattccccatttatttttcattttagaaacttcgtgaatactttcattcaatttaagaagcccattattgtagcagtcaatggcccagccattggtctaggagcatctatattgcctctttgcgatgtggtttgggctaatgaaaaggcttggtttcaaacaccctataccaccttcggacagagtccagatggctgttctaccgttatgtttcccaagataatgggaggagcatctgtgagtacctttttaaaaaaaaaaaaaaaaagtcattctagaaagcttcctgaagaaatctagtttggttattgtttttctaaagctgtacagtgtgtcattctgtggggactttccatcttgtaattcagatttgggttcatagacgttgttgacctttgttgcatcattccctagagaaggacttcattcactgaggagcctaccactttgcataattcacatggatatctactgttagtaaatacccaatcagtaacccaaccaacaatttgcaattgaaaagttcttcacctaataacttaaaaactgcacttttaagagaaggcaattttaagagggagcaaagttacataggattagagggttgtcgtccatataattgtgtgtttttatttctttaac

SEQ ID NO: 45741 - DNA, 1449 bp, Homo sapiens
agctggggaggaggcagtggtggggaggaggcgcgagacccgccctgatttggggaaaaagcgaggtgcacgtggctgccccacagcctaactccctggtcccggccctgaacctcgaatccctccctggactcactcccagttcggcgggttgacacgagtgagcagccagaacgcccctgacaacagctccctccagactgggtaccgcccccacgcccggcgcatcctgggagttgtagtcctgtagccctgcaagccactggcttagagcagttaagagactacaactcccagcaagccgggcgagggccccgcccctccgcgtaccgccggcggccccgccccgcgaagcctagcactctccccaaacctctctcgcacgcggggactgagcacggcccgaaaagccgaggacagccggactcaccctgtagttatagtagtgcgtctgcacaagatgccggtggcgcgacttgtggttgccgaagttggatttctcgcaaaccagtaagtgccgcggcgcctcccgaagccggcgcagcgtggccatgctctcctgggttcctggtcctcccggcctccgctggcggggcacgccccgccccttcctcccgccccgccccttccctccggccgcatacccgctgctgtgcgcccctggcggcggtggagtggggatggcggcgctggatttctgagcagttcttagacttcttaggagcccacgcagccgctctttggtggatgtctgaagctgtaaattcactgtcccagtggctgggaacctggctcttgccttttcaacgccacttttcctccgtccccgccatcccttggaattgccctaaaccctctctgtgggccccgcctcggagcgccccttggaccccagcctggcgccggcgcatacctcggtcaggcccctcagagggaccgcttcctgccaccgttataaaaggaaaacatcgcatggaaaggcccagttcctttagtatatggtcaagaaatgtagccgcacagttaagtaaccccctaagctgctttgggggccacacccagctgctttctgacttctcacactgtttggttcacaggactctgttacccattggggacctcttggccattattaacacaggccaacaggactaaaagtttgtatcagtccttcccaaaacattagggaaggttgtgcgggaaggtaaagcacaatttttgccttacaataggactcctttgaaactactattgagttcccttttaaatagcccttcagaaccgcttttaataatgtgttgtttctgggggttaatagtgataattctcctaagtcatttttccatttcgtttttctgtcacgggcttggagcggttaagagactgcggctcccagcatgcggtacgttactgatcagggcaaaatcaagtatgttactacatgcttct

SEQ ID NO: 45742 - DNA, 688 bp, Homo sapiens
atgggcaatattgagagacccagtctgtacagaaaattaaaaaattaaccaggtgtggtggcacacacatgtagtcttagctacccgggaggctgaggtgggaggatcccttgaggccagaagttcaaagccacagtgagctatgacggtggcacagcattccggcccgtgcaacagagcagcgccctgtctcaaaaaaaaaaaaaaaaaaaagtcctctgtgtacataagaagcacactcctccccttttattgcactaataaaaacttggtattcacacagttctgggcctctctgattttttcttaactctgtatcttggggattgtttcatatccgcccaagaacagctactcgactcccttccctgagtttccattaactgaattcttgtcgcaggaagaggactgtggtctgtcaacacacctggacatgcctgctctgcggccccatcagactttgtccccaggccattgtatgctcttcaagttcattgaatcatcctaaaaatcctttcctaccacctaacatcatccacatttcctcatctccctttccctaaaaagaagggtatttaaccatctgtaccccattgcatggtgggagaatcacatgctaataaatttatatgactcttctcctgttaatctgccttttttttttttttaagagacaggggtcttgctc

SEQ ID NO: 45743 - DNA, 557 bp, Homo sapiens
cagttaattaattgtattttttggtgagggattattttacttttaacttcttagtgtttaatttttaatccttcatttcttctatttttctgattttaatttatttatcagctttagatttttgtctcttttaacccaaacctgatttactagaagttgtctattttcatgcacaaactgtcacaccacgtgcagaggcctgcctgtcagtcaatagttcagttttggctgaactgccacctttgtttcacaatagcaaaacgatgatttcacaattgtttgaatatcttattgcattttgcccttattttatacaagatagtgaacaattgtaaaataaaaaaggttaatcctatctatgtcataaataatgagagaaatgcagaaatattagttgcctcccaagcttttcacttaccaggcttacgcagatcaaatgtgtgttcaatagcaaacgctgaaggtggctaggggctatggggttgggatctgaatctaactacctgcatggtgcaagaactaaaacctgaaaaacgaacacaaaaccgatccatgac

SEQ ID NO: 45744 - DNA, 728 bp, Homo sapiens
aattaactttcacatacttaaaatctcctcacaagaacaccctacatttatcacagtgctaaatgtgctatggaaagcacatgcttatggaaaacaggctctaagttttatttttcctttaaaaaggcaaccttcttgcccacactctgattgattttaggcttgggctcattcattttgaccagggtggttgggcttctctctgtttacaaacaggtgtttgccttacaattctgttgtctattcaccgtcacactgtatgaggtcaaagtagaagtcagtttggaaatgcgacatcaaccatcgtccgctggggagcagagcaaaggtaaacatggtgaaaggtcctgcagcagccagccagacacagtcaggacttgcctgggatcataaaggcctcctgccagcacgccggcccctcaccccacacagagccatgggccactgtttactgtcctgacttcacagtgccatgactattgatcatgggtgagcgcaaacataagagtacaacagtgtgatggtccggaagaaaactcacatcaaaacacctgttgatgtattctgacgtcataggttcaaatgtcccatgatcttgaggcttggctcttccacgccgcagcccttccaaatagcacacccagggcccactgcgtgctgtctctgttgcagaccctgtgtacgtgacttaatcccgttggaaaggggacactggaacagagagaaag

SEQ ID NO: 45745 - DNA, 1040 bp, Homo sapiens
cgcagtccggcgcgggccacgcccccactcccggtgggcggggagggtgcttggggcgctggcgtccggttgcggtgggaggtggtgcgtgccgcgtgggcgccggccccacggggccccctctccgccctccctgcgggatcccggggcgcggactcgcgggcgcgtcgggcgggacagggggaggggcgggacgtgctcccgggcctggcgcgaatggcctccggccgctctcggctgcgggccatggccgctccccggcgcgtccccacacggtccccgccccagtctggccgcagcccaccccgcgccgccactgggcagatgggggcggcggctcctgcctcccggctttcggaagagcagagcggagcgcgcctgaccgagtcaggcttccgagtgggattggaacccggggcgccctgaagtttggggaaagcaggagcagaagggaagggatgcgctccccgctctccggcggcgcggaatgggcctccttccagcctctgcgtaggcaagatttccccagttgcgcgctgcaccggggactccccagcccgtgaggcagccaagaggagagcgctcagtgaccctctgggggcagagccgtcaggccaagttcatgggcaggaagactttgtgcacgtgggggtctctgaaggttgagcgcgagctctgcacccccacttcgaggcactcaagaagcggaacagacgcgagccccgccgggggtgcgggtgagggctgcagggagcccgcgaacgacagaaagtcgccccccgcattccaccggagcactcgggaacacggcttccaggtgtcccagcggccgcgcctccccgcccccggccctcccccgtcgcgggcaggttcaaccgggaggcggcgtggccccggagccggccccaggcccgcatcctcctcccacttcgccctgggcagccgcagctaaaagccggaggctccaaagtggaactacgttgtcttgtcgagcctggggcgactcgcctcggggagggcgagcctgaactgcagccctg

SEQ ID NO: 45746 - DNA, 559 bp, Homo sapiens
tcacaatctatttaatcactcccatatgatgaacatttagactgtttccacttaatgctaggattatcattcttatatataaccttttattaaatctgattttttccttataaaaggtttctagaagtagaattgttggataaacagatatgaatattttgatggttactgatggatcttgcaaaactactttccagaaggtctgtttgtccggctgacgctccctctggtggcccctttgaaggctttggcggcacacttatcatgccgcagaacaaacacgcttctccccatgtagctccctgtgtgagctctgtgtgctaaaggccgtattctctatgcggcggctagaacaagaacacgggattctcctgttgtgtggccctctgctgcgttccttaccaaagcccccattacagcagttaccatcatgtctatttcacaaagtccaccaatctagaggatgaaaattctaggggaggggtgccctcccgtaaggcatgtagctgtgaggtgggatcagccccatggaaaagaccccacaggaaacccacagaat

SEQ ID NO: 45747 - DNA, 901 bp, Homo sapiens
catgcagcaattgtccctggtgagatcccagcatggagaggcactgccacagccttgccactgtcaagtcaccagcgataaaagcttatttgtcaaatagaccatttttatcatgctttttatatttcccaattcaaaaaaaaagcacactgaaatagggacacatgaatttatgtctgtattttttcagtctgttctgtatagcagcaagaagtattgtgaaacccaaacttacgaatatcgaccccatggtattcctctaaaaatagccctcagtccacataaccttttttctttctagaatccagcaggcttgtttttcaaaatgtttacatataatagcataacactgctacttttaattctgccaccattttatgcaacagaggagtgcctgaagggatcatccgaactggaatactgaaacttcaatctccaatgaagtgtggtagctgagaaagaaggccatgtgaaagaagccaggggtgcatctttttgcttcccctctcccagtacacactccatctccatccttcctgtaagccttgaatgttagatatgggatattcttaatgtggagggaggcagtggggagtcggcctcttatttcctctgtgttgttgctggcagagtgatgagcaagttcatatccctgcccactatcccgtgtcacagttaataattaatatgtttcgtctttgcttgttgggacaagagagaaacaaggtgcaagagcgtgcactcttcatcagcatgcccacacgtccagtccacatccactgtccctgggtgactatagatagagcgcttgttcattctcaggtgtctgcctcaatcatgaacacgcagttgtcctcactcttatccacttttgtcagcatgctgcaccggcttgttgtct

SEQ ID NO: 45748 - DNA, 682 bp, Homo sapiens
gaccactgctcagggtggggaagacagttataaaacaggagacggctacctccccgacccctgatggtcagtgcagagaaggccacatgggaagagtggatacaaacagtgccagccactagccaggagtcccctggagctggcattgcagcattgcacaacagaggatccccgagacaaaagcatccaaacagcacaccacgttacatgtcagcactgccgcaactgtcaccaggcccttctgggaactgggcagaactcagggcccaaacatcacgtcagaggaaaacctggcatttccctgggatggcgacaacagagcccaggcaaactgccagaggtaatgtcccatcagaggtcacactcctgcatttggggagagaccaaagctcagctgcatgtctgtccctgaactctgcttcatgccaccaaaaccacagcggcaaggccagaatcctggcccctctacaattagctacaaggtgatgcaaatgctgaggctgatccttcctgggatgtgtgctggggaatgagcaagttcttgatggtgtgttcaccacctgctctgggggatacatatctttgacaaactttctggggcaatcaggctgcctgttgttattttactcctccagggacaccttttttcaaagtcgacttgaaccagttctggttttaatat

SEQ ID NO: 45749 - DNA, 635 bp, Homo sapiens
gatatttatttaattaaaatcatttccccgtaatatacacaggagggacacacacatgcaggcatgcagagcgtgataacttgactatctctcatgtgactgaaaacactgaattccaaaaaccagtcatgtgccacaaaataacagatcccatatatgacagcagtcccatgaaattacaatggagctgaaaaattcctatcatctagtaactctgccgttgttaacaccattgtgcaatgcattactcatgtgttgtcataaggctgatgttaaatctagtgtctgcaactgtggaatgctggggtcagagaaagcctgagagaatttcttagataatacaatcttgggaattttcagatttcagttttacaaactaaagtttctgaacctgagcccgtggcttcaggaacttccagatatgttatgcaaaactttgtctctgtgtttatacatacctatttctggggaaagggtgaaaagtttttatcagctaaaggcattgtattaaaaacttgcctcatgtgccttaagagcataagagcatatacattatttgatctagttattttaataagaatttttcctaagagaaaatcacggatgtacatgaagatatttatggcaacactgta

SEQ ID NO: 45750 - DNA, 712 bp, Homo sapiens
aacctggttcaaagcaagaggaaaatttatttttgctatttttaccagctcccccttctccacctcactccttctcagaagctctgatgagttccagggagggaaacctcattcgtaaatgagatatctataacctatcacctgtaggaaaaggcaggttctcttttccaggtcacagtaccccagaaatcaccatgatccatgcaacactcctgccattgctgggtgtcaaaagctttcacaaagtgcagctccaggcttttctcaaacaggccccgctgctggagccgaccgtgaagaaccagcattacataactcagcattacatcatccagttactcccccatgtgcaagaaaacacacttgctgggagatctgggcagtcaggctttccctttatagtcagttcagtcaatagagagggtcagtgacatagctcacccttggtcaaaatccagcattcaccagggtgtttctgggacttggcaatcattagcatttattttcagaaccagaaaatgtcaggcatgaaagggaccttagagatacactgagcaatcctctttatccacaggaggaagctggcctatgagggttggctgccagccagtggggggtgggagcagaacctaggtctcctggctcgctgggccaacaatcagtgagtatttattgggcccccatggcctagctatctctgtgtgtaattccg

SEQ ID NO: 45751 - DNA, 2467 bp, Homo sapiens
aacactgtgaaagcagaggctctgaattagaaaaaacatacaaagagtaacaataaaagactcataggcaaataggggagtggggaggcgtgagaaaaagtgaatgtgttatattaaagatgtgagtttaggccctcaatatcctgctgtcaaggtccagtaagcgggatctctgtctggtgagccaggagaaactgaggtttcagctccaaagcttgtgagaccctttttccttttccgctacgcatttccaccataccctaaatagaatggattcttgcaaccaaaagaactcattacgacacctaggaaattttagggaggtgctagagtgtgccttcagctttgtcgcagtgtactactcactggccacttccactctcaactcttccagtgctcaagggaagttttacatatgcaacacactggccttaacttcacaaatgactgatttccatcccttttttctcttctgcagaaacataacactaatcatgctcctagaataactaccaagatagcctttagggggaaaacgtcacaagacatgaacgtctcccctggtagaaagaaaggctcctccccgaggtctcagaggccacacctgtaggcaggagcacgcttttcgatggcggagcccggtccttgcctcgcagccgccggcaaaccacggtggctcccagtccccggggatattccgcgtcagcccgcacccccggtccccggcccctggccccccgcccccggcccccggtgcccgctgggtcacctgtaattgtaggcgctgaaacgcttgctctctctcagcatcgcccggtacagagataacacttgtgcgcgactggaggctgccattttggaaagaaaaaaaaataaacgggtcctcttcgccgaggtcccaagtacgacccaacccacgaaactccagcctgtgcggaaaccacgaacgaaataaaatgctgcggctcggctttgccagcgggccgggcctaagcctaagcgggcagccctgcggatcgcggacggcgccaggcgtcccgcgccgcttcgggggcgggcgcaggcagggctcggggcagctaagggggcggtgctgggagggagatgcctccgccccgccccgatcccgcccccgcccggaggctcgggacccagcagccgctccacgcggcgggagggcggggaaataagaggactggccgcccgtgcatccagccaagctcctggcggacggatatcggaggcccaggcattcgagggacgtgcagttgcatcacggagagcctttgggaaccgtctggggtcttggcggagacatttgtgtttcgggggcagcgccccttcctacatccaggaggccgcgttgcccgggttaccgaaggccgccgcaccgacgccccgcccctgaccgccgatgcccctcccacgccggctgcggtcgccctcggcgctgcctgagagagtttgcgggatttcaagggtgacttgatttcgcctgatcctggtcggcagggtggggtttcttggcattcctcaggccgggggatgcgacgtctgggtgtggaggtgatgagctaggggttctgtggcactccggctctgctcagggcgacctgcgtaggggcctctggggcaggcccgctttctgtcaaaatggcagcgcccagcgtgcgcgggtatctctgaagttggggtttaagattcttgcccgtgagagcgaacgagcctgccgtacttctgattttgaaacacctgggtctgggcttcccgggcgagcggtgggtgagtgccggcctcattgcagcctggggtacgacgtgggcggttggtgttgtagggggtttacattggccgtggattttttcctctttccggatgtgtttttgcttttgagtgaagagttcccgtggttttgtaacctaataaatgcataaaatgcagcttgggttgtagactttggagaataattagagacctttagggctttaggctttctccaagaagcggagcaagttttcaaccatggctttcttcagaagactgcagcttttttgaatcatcttattaaagtggtggataaagttgcttgttctgatctttgagcatggcactggacgcaggaagcttcagccagtcctagttactgtgtttgcaaagcacttttcttgtttttggaatcttgctttatgtaatcaaccttaggaagaaccacacctttctgcactcaagcacagcgagaagtacgttatgcgtgaaaacaaaacaactttgcattaaaatccatctttctccgaaccacttggtcacggttgtgttctcatctgctttagtgtatttggttttgaaacgatatacctgctgtatgtctaaacaactttatattttcaggaacttttctgtttccttttcttttttttgagatggagtctcgctctgtcgcccaggctggagtgcagtggcgggatct

SEQ ID NO: 45752 - DNA, 612 bp, Homo sapiens
tggacatgtctgaggaacctcctaccttgccggacactgaggatttattcaccttgagcagaggcaggcaggtgtctttctgaattggtggtggctgagtataattgagtttcctacactttaaaaactgtactccggccactgttttgattctcttgtttgactggcctgtttgtattttgggcagtcgctagccaggtgttagacctataatttaccatgtaattctctattgacttgagctctgccgttgtgcactttgtacatcatctaccatctactgcatcatccctgtttgcttcaggctctcccagtgtgactcatcattaaatatccagttggaacctcaacctcttccaggaatgcctcctctggcatcctctacatgtgctgttcttcctcctaaacctccaagggacttgatgcctgtcctcttgttaatcatatgctcttttggaaatgtatttatgtttccctatgaatatggtggccctctggcttcatacatttaaaatgtttgtggtcagggatgatgatgatttaaacaacagtattttggaaagtaggactttttttaaaagtcctctcgcattatcacttagtgtacagcaa

SEQ ID NO: 45753 - DNA, 2085 bp, Homo sapiens
ggccagcctggccaacatggtgaaaccccacctctactaaaagcacaaaaaattaaccaggcttggtggtgcgtgcctgtaagctcagcctcatgaggctgaggcaggagaattgcttgaacctgggaggcggaggttgcagtgagccgagatggcattattgcactccagcctgggcaacacagcgagactccatctcaaaaaaaaaaaaaaaaaagagatgggcagggtcattagcaggcaggattgaaaagattggaaagtgaggctccatcttaccttggctggtgaaaatggctccctcagggcattgctcatgacccccaaaccgtccacagaaggaaaggatattcctgtccctagccctgtccagctaccaaaacaacagcagggaaagggaggccgagggtagcccacttacctcgccttggtaagggtctcccctgctgttggatttagcttccagttgtgtcatttcaaatgcccgtgatcctctactgtgtgcaagacaaaagtacgaatacttgcttgtccagccaggccccgagccaccctcctccctttcccctacatatgtccacgtcagtgggcaagctggcagcccggtgtctccagcacatggggtgcaccctgtctcatctgcaggccattgtgtgtgtgttcacagttcagaagctgactcactatctctgcctgccaacatcctccaccacacccacctcccacccctatggtcagggggcatgggtattgaatggcagtgccatcagagcttgccagcaccctgtcacccaattctcggccactgggatcagagattatttcttcctccctgaatctctcagtccctgctgcaccatccacagctgcgggggaagggctggccgacgtttttgatcttgttttccgtgcctatcacaatgcctgtcacataccagatcccctgaaattgtttgttgagcagactgttatcataatctcctgtgatatttaccacattttaccttttgacatggttatttgagaatatttttaaactttctaggtctgagctctttgatagcagggcctgtgttttatttattttttaatctcctaaagcacctggttcttggactccatgaatatttaatagcctgaaataaacagaatttaattcctggatagttgaatttgagaggtggaaataaacatagggtttttatttctgtttctctcaggggaaactgagtcaaagaaaaataagtaactcacaagctgatgtgtcaaccaaggctataaatccagggagaaattcagcaatagaagagcattgtaatattagaaagcttccagatctccccactcaggagtatttcctacctgtaacacacagatccgtcgtacaaattatgctttgtttgctgaaaagcctcctgaagctgaatgggtttactttggcatcagcggaggccatgattgagggcggagatgagacattggatcgctcttgtgtggcttccgcatggccgtcgtggttcctctgcccagccctctcctgcgagggactcgatcagctccagggcgcagcttgtgtgtctgctcccatggccaagtccccttggctcccttccccttggctctggtttggcttgactctgccttctgctcctcaggtctgtctaggtttagtcctgtgtaatcatttgcagcaaagcctgcccatgactggaaatgcagtcctggcttggcaggaaaggggtttgtgcaagagctggctgtacctgtgtctgaaacacctgaggcccttccagggctagggatgcaagaagcctaggctggcaaagctggccttcctgccagggctgaggagcactggagccctagaaggggactgctgtccagccccttggccagccagagcaagggccactgtagtcaaacatgaattcacaaatgggaagagcaggaggtgactcagatccacctcccccataactgctaatcatagtgaattattaagagcataaaatcaggatcttgtttcccacatagagatcaggcccatcagccctgagcagttatataatccacctcatacacgtg

SEQ ID NO: 45754 - DNA, 822 bp, Homo sapiens
tccctgaccccttgcgcttcccgagtgaggcagtgcctcgccctgcttcggctcgcacacggtgcgcgcacccactgacctgcgcccgctctctggcactccctagtgagatgaacccggtacctcagatggaaatgcagaaatcaccgtcttctgcgtcgctcacgctgggagctgtagaccggagctgttcctattcggccatcttggctcctccaggccaatttactttcaaaaatacctgcatccaggaactctcatgctagcaggatgaggtaatgactatttcccatactcgtgtcaactttgagcaatgctaggaatttccatatgtccaaacaactgtttatcaggaaatgcaacaaggtacttttgacactgagcgtgaaaggaactcattgaaccaaaatcttccaaaaagactggaacataagagagcggatgaagagcataatagaagagaagtgccagggaggaggattatcttaggcagagcacactgaggatggagagttaccagccctcccgagctgtcgttggcactgaaccaatgagagccattcatgtgcctgtctgtgccttgtgtttttcttcttcaacatatactttagaacatccattctgtgcaaagctctgtgcccacagctgttgagatgccagatgcatgctgttccctgccctgaagaccccagcagtcaggccagggagagaagacattcttagacaacccaacagtcgtccctggggaaaggtgagtggtgcccgatgagggattgaataagagaagacatcaccatgggctacagtggtcaggaaaggctt

SEQ ID NO: 45755 - DNA, 733 bp, Homo sapiens
accaaataaaacctcgttctgctctcttgttgtcttaaccatcatcacttttactagagttttatgatacagttatttttttggcaatggaaccagtgtgatgaggatagctgattgctttgactggaggatacctattgagaaagagatggaaatttactaattagaatcgcactcttttcctcattataaaaccagcctaattagagctcaggtcaatagcggtggccactgactgctctttgacagcaggagggggaagttcatttggtgtggcaacacgtttccacggtgagggcggccaagtgaactttgcttctggataggcatcaagtttcctgctgggacaaaggggattcctgagtttaagaagtagaaaatgcttcagggcacatgtgccttcttagttttagacacattcgcaagaaatatgccaaggatggagtccttactgttgaacatgaagaggaacctggatactaaaataagtaaaggagatttttcttctacagccacagtaccagagtccaggaaaataaaaggttatttgttggtgagttgatctattatgactctcagaagtatcaggtatttggaagaacaccacaggagacagccagagctcagtgccaggttcaacacttattaacagtggggactcaggtgatttaggctttctgagactcagttttcttgtctttaaaatgggctgacacttttatggggcgatcta

SEQ ID NO: 45756 - DNA, 451 bp, Homo sapiens
tttgtgtgattcctccataagcggatgtctccacactgctcctgagggcaagaaccaggtctgcattcactgggcacttcatcctggcactgtgccctgtgccttgcatctagaagtcacttgattcagattgaatcaacagggtcaagactttccttgttgttatgctctttgggaagctctcataaaaatttgaaggtcaaagccctctggccacacattgcaaaaccaacaaaataaataaaaaatatttaaaatccatgtgaaaaccaaattccagcaatgaccaatgaaaaacatgcataccgatccccaaaggtcagtgtgatggaatttgtcctacagtactgaagaaaactgggcacatggaagcagcttccaaagtgaattttcttctgccgtggcctaatttacagattgggaagtttgtgtctgtgaaaaggtggcacag

SEQ ID NO: 45757 - DNA, 996 bp, Homo sapiens
ggacggattttagagatacaagtttttacttaattatgatcccccagcgatctcatctcctcttagtctcaatttttcttgtctaagagagggtgctcctacccacatcttcagtccaaatccctctcctgaaggtcggacccgcatttgcagtgacggtgactggacattttctcccaggtgttcgtcaacactttcagccctacaggtctgaaacaaaacttacccacctccagtgaagctcgtcctcctggcctttctgcttcctttttaaagtccatccccctccaggcctcccattaccggctgggagccccgccccttcctgggcctcctcctccggggctttcagctcctggctgggagccccgccccctccagtccgcctttccaggctgagagccccgcccattccaggcctcatctcctggctggaagccccgcccactccagtcctcaccctccaggctgagagccccgcccattccaggcctcatctcctggctggaagccccgcccactccagtcctcaccctcctggctgggagccccgcccactccaggcctcaccctccaggctggaagacccgcccctcccgggcctccggatcctggctgggagccatctctgcctcctgccgcttcctgcactcctgatcaggtcagtggccagtcacagacctctgaaatgtccttcctgactgttagctccacagcattcctacagctcccgccgcagttccgccctccggagggttccaacagcagcccagtgcgcctccccagccccaggctccctccactccagtgagcctgcacctggcgctccctggcacacatattttccattgctcttcactgccaattaaatgcaaatttctcatcgtggggttccaagttctctgtatttggtcctcttatcctgacagctctaccctccccagagcactacaatctggccaagagcctcaccagcctattcccccgaaccattgt

SEQ ID NO: 45758 - DNA, 2046 bp, Homo sapiens
ttcacactctgagttactgggggtttggactccaacatctgaattttaagaggacacaactcagtccgtgacagcgggtcttctcgaagtctcgtggggaagagtggttctttgcagtaagtcatttcctggaacacaaaagggtgggagacatctgacatacaagtgtgggcaattgcccttggctgttgtccagaggcacagggctcaggtgcagccctgcactgtcacagggtcccaaaggaggccccttggtttgctgtgctccacactccaagcttccacgagctgatgggggaggggtgagaaagaactcgcaagggaaccgagacctactgaaaaaaggaagaagtgaagacgatgtctacggggctgagggatacaggggaaatgtggtttgaggttgacagaggggagggggaaagagccacacggcaggaggctgggctgagagagattctgaatggtctccaggaggcacagaatgtgagagacaggtgagggagggaagatttcccccacaaatcttcaccctgttaatacatgtgggctcagccccacaggagttgttcggtgagcacacacattactgttgaagactggaatctgatttgtgcaactctgtgttcagcccctgctaagaaaggcctgggagcagggtgcatgaaagggtctgcttcattctgggtgcccagccaccagcagggtaccactcctgccagacgcatgggcaggcagctcgcctcgttcctggactgtgagctccctgagcaccaggaacgacctactgctgccttactgttccctctgcacacagcagaggcttggatggaaggaattcctgggtccctctgaaaatgttcaggcattagtcacgtatgaatcaatctagacctgtttttgcgtccgattatgttttcaacttgcaccacctcttgggggcactgatgtcataattcttccattccccatgtgtcctgaccaggcaggagctacgtggctgtctgaactcttgtgggtttgtgataaatgggcgagtgttgaaagagaaaggcaaacaaactgctttcccaaagaagtcgggagacgccctcgacaagccctggacagagcagagaatgggctccgccaggagctgaggagagccttggggaggcttctgtatccagggacctcagccttactgcacctaccctaccaagcagtgccctgaggacctgaacttagccctgtgtgtggacgtctgttgcagaatgcgccaagtgcccagaaaagagaccagggagacaaaggcagcagggtaggatggcagaggggacacctcctccatccagccacctctgtctggtgcttaggcatctgggtgccccacacttcctgtgctgcccaaacaagcaccagctcggttctaaagggaagtaagacaacacgcacagcagaggcctggaaacggccagggaaggaggagaggccaaacgttagcatctgagtactttctttttgggaggtgctgtgaggcgtgcaaaagcgaacagtaatggctctcagtaacctcagcaaatgccagcactcagcagccgcccttccagagaggggtcgctggcagctgcagcatcaagcggagttgctgcataggatgctttttatagtgctgtttgtcttcacggttctccaacagatgagctggagggtggatgtttttaagatccatttgtgtaccgtgaaagcacatggcctgtcttcccaagagtttctgcatttccaacttcttaatccacaatagaaaaaagtctagaaaaactaatgcagttagagcaggttttcctcgtgccagtgtcctcatatcccacccccccccccccgctaaaaatgactccccaaggaactccagcagagtgtggtattgtctcaagataaaaacaaaagcagtagagccagagatggggcagaaaaagtgagatgagacatttacttcctcaggtccttttccaggagtaaatgaccatcgtgcgcccatgggaagagtgctgcatccacggaggacat

SEQ ID NO: 45759 - DNA, 2731 bp, Homo sapiens
gtctaaccctcctgtgaaaatgaggctcattcagtcagatttcaacccagccttctccactttctgcctccatcacccttccgggggcagaatttagcagtggtctgccaccccgagcagccgctcccacaggaactgcctcattaagctctgtgaccagtaactcccaacttaggaaaagctcaagaaggaccactctgctttgtttgcacttttccaagaacccttactacataaaacgttctaaacttgggaacactaacttttgcactgtttcccaccgagccacagagctcgcaccagcatcacgctctccctttgccaggatctgagctcgctggaggaaaatacaagttcctctttcagcttctttccttcacttctggagacaagctttccagctaccaaaacagaacgtttcccaggttttcctcccacacctatgaactttgttccttgattaaatcctagtttcccctctaaacagaactggactatgtccaaccaatgtcttcagtttctgcaaacattaactctgatgttttttttcaagaggtttgtgttcggcttttgagtaggttccggaggctgccagtggaaagtctgaggggggtatcagcagcattttaccccatcccccgcatcccctctggccagcaggacaggaaaaggaagcctgtttgcgtgcacgagcctgctgaccggcctttgccatgcgctgtgctttcctttgtagacacagagggactgcgagggaggatgagcaactccttcctaagctggtagggtacatggctccaagaaacgctcctggtctggagtggaatgtaggaccgttctcctctcacagccagccacacaaagctacctgtcttcggacatctttccccgacgcttgagcaggctgcagggaaaggggcccgcttacccggaggaaggaaaccctccgcagaccctccaggaaggcaggcctggggcgccccttccccggggagcctggaaacccacaaggcaggagccattagagggcagcacgtgcctgtctcataacactgagcagactcgtcttttttttttcttcttccaattacagggtgtttcaaaaagcaaaagtaccgtggctccagcgtcagcagaaaaacaagttagaaagacaggcaggggagggggcgatccctccaactccaaagctgtgccagggagacaccgctcttggggaagttgggctgcagcccccgcacgtgctaggaagataagtgaaggtcccaacacatcctgtccccttagagcccctggggcccagcagccgggcccagcagcccgacccagcgcctagagcccattcgcagacagcgcgctgaggcggcttgggcgccatgccctttgggttactcagctcttcagcctcctggaacgctaggacaaaggagtgccttggtgctggcagaagccggggggcacagctgggttttacaaggaaggacgaaatctcatctcagcaatcgggatagatcaaccgttgcccgtctgaggtgacccaattcagggaccagccgcttggctctgaacacacacgtgtcacaaccccagctcgtacccaggccttgctagaggtaagaacgtggcatccctccctgggaccaactcgagcgccacttgggcgtcccctgccaggaccgctctgcattgcaaagggcccctggggcgttcaggattggcctctgcccctcctcccactgcaccattctcttcttcccaccgcacatctcttcctaattcaccaaggggttccaccccaaggaagaactccttcgtgctggaaaaagcctggggcagcacggtgggcctccccctccatctgggtcaccagaggcagggagggaggaggcttgtgtaatcttactattcatttctccgtgcaagctcctcgggacaggcctgaattcatgataccatctcattggaagacctttgcccccaaagggcctgggcagattgaagcgtctagcagaggtgaggggtgacaggtgaccaaaccccagccctgaggtctcaccacctgctcacaagcccagagctggggtggtggggttctcactgccttctccccatcccccttctcattgcatttcctttcccccactctggcctcggaacccaggcggccagtccttagccagtcccttctcgctgttgtccaatctgtcactgtgcctgactattctttaggaagtggttactgtttgttgcacaccattcacaaacacttcattttcagatcctgccctctgcacactacgtgctaggaccttggcaggccccgtgagtggccaagttccgtactcttggtcatcagcatctgatctgcctctggaactcctctttctccttccttgttcaattcagcggtttcagttgacaaagaccagggagcctctaaccccgggggcgtactaaccatagaaatatcactcagtctagcatagagtgcgcctataactgaatggggaacttcactgatagtgcttccagtttccaatagcattaggctaggtatttggactacatttcccactgacaaccatttaaaagctggataagatataaaacaactcaatctttctgttgaaattgtcaaatagtaagaagtaatactggctgttgatccagggaatcatgagggactgagtcagtcctctctaatcctataggcatcagaaaaaatcatggg

SEQ ID NO: 45760 - DNA, 832 bp, Homo sapiens
cctggatagagtttttgcaactgagtttggtgagaatcaaatctatcaggtacagtcctagaaacaaataacttgaagtctactttaaaggcagattctcttggtctctttctttcctgtgtctgtacctctgtgcatctctaacacacacacacacacacacacacacacacacacacacggcccttctgtaagcacactttcctcgctgtcccagtcctctcagtgtccacgctcctgcaggcgctgacttgggtggcggttgcagaggaaccagtaggactggcacggccatggccatggagcatgtggtccagggcacagatagcagcagctctggttccaaaggcagtgcgtcctgccaaagccttctctctctgcatctcaaggtcacaataatagattacgaaagagtggaaaagcacagctcagaaaatgggccatggggactttcctctgggtgaggagggagagaacaatgcccgatgcggcagcaggtcgtttgagctctgctagggaaggaaacgcggagcgtgaggtccctccaatgcccggcacctgcaacgcctcctgtccaagggctctgaaaacacaaaaattgggaccattggaaaatgatttttaaggtgctctgatgtagaagaaattccatcacaaacattaacctgtttcacaagaatcaaatatttactattgtgtttcatggtggctactttttaagtcccttgcaaattaaggtaggacaaatgttctcacaaaataaacattctcctgtcttcagaaaccactgataaatagtccaggccgatggatccttgcctctcctcagaat

SEQ ID NO: 45761 - DNA, 2808 bp, Homo sapiens
caagttcaagtgattctcctgcctcagcctcctgagtagctagaattacaggtgactaccaccatgcctggctaagttttttatttttattagagacagggtttcaccatgttggttggctaggctggtcttgaacccctgacctcaagtgatccacccacatcagcctcccaaagtgctgggattacaggcatgagccaccgcacccagcctggactttaaattgaccaattgtgcggtgcataaattacatcccacacaaacacacacaacacatgttggcaaggaagcaccataagaggaccctgagtctccccgtgctgatggtagggactagaaaatagaccatccacacgtggtcctaggtgaggtcaggagaggtttaaggtggtcagagagcagggagagccctgtggcagaagaagtggcaggtacaaggactggaggatgggaggggcctcatagggaaggaagggcagggtcctgcttgggcaggtgcacctctcttggttgatctcagggtcttaacggtagatcaccaaccaggtcatctctttccaggctgaggtgtgcagagattcctgataaggaggggacctggggccaggctgcctgctcctagcacagggttcttgcctaccacctctctctcccaccagcaccagaagtgccaggggtgggggcaggtcgggggggtgggcagcggatctcaaggcttctgggaagtgaaaagtatatcttcctccaaaaattttagatacataaatagagctttactgattccaagagatagtatagtgagattattgcaacgaatttaaaaaaaatcatgatttggatcttaatttggcaaactcccagctgtgtgacattgggcaggtaagttatgtctagacttcactttcttcatctataaaatggggacagagattatgccttcttcatcgagtagttgtggaggttcaatgagaatatgaattggaaacacttagtagaacacctggcccctagtaaatactcaacgaatgtcaggtggtgttggtcttcatctttattgtgtgagaaggatgatgaactcactgaacatatgaggaaactgagaggccagagtggaagccaggactgtcatgcaggtctctgacgcgctgtcagtttctgttctgcaggctgtgagctgatttgtacctgggaaagccaaagtgttcacatagactaagtcagaataagctcctccaactcgacttgatcctgggtgcagaaaatgctggaagcctgacacaatcacagcccaaagggagcaaatgaaaagaaatcctctgaatgaaatttggggtctcacttcgggcagcacccaccctctgcaaaagggagatgtttccacagctgctgatcctggatccagaggcagcactccctccacgagggacactcgggcattgtaaactcaagcatccctttgttttccattcttcactcagacattcctgatgactaactagggatcaatataaatcacgtcattgtgatctcgggtcttttcctgctaaagaaaagtagagagtataaggaaatgacggtggtttgaaaacagaaagcaaaagtactccctacaaaagttatctggagctattaggaaaacaaggaagaggctcctggtgatttggaagccgggccaaggtctaggatgcaattgatgtcaataggtcctttgcaggtagagggacaggtgaggtcatagtctgacgtctgttcttacagggctcctccctggaaatgactcgctctctctgtactcatttcctctcaaggctttgttccagcaagggtttcttttgaaataggagaatcccaggtggcacaggatgggatggggtctcagtgggagcagttgctgcaattgcgaaagaggaggaggaggaggaggaggggaaagaggcaatacttccagcctccagggaaaatctctgtgcttgctgccttatcacagtgactgggtaagcccagggatccagtaacgaaggaaggaggtagggggtggccaggacaatagttcagttgttgtccaaggcacgccctcatcaccttcgtcatttctctttttgaggcagaaatccaccctcagatgcacacacaaagctgtcattaacagaagcttcacgtgcaccccggaaagcaaaattgggcactcggcttcaaaggaaacggcttcttccttcacaatacttcatcactaaatggttgtctggcatgtttgttttttcaaatgtccacattttatttgtccaactgattgtctctttatcagcagcagccaggaccacagctgaactgtttgtgagttggtagtttataaaatcaatgctaagtctttgctagtgtttctctaacacgctcatttgtatttattcgtctcagaagtcaaagaaaaaaacacaacatacaaaaggcagagtggtgcttttctatgtcaatatgtgtttgaggacttttctagctaattgacataaactcgacagctagaccagatgacaagcaagaatatccatcccataatgaggcttccggcactggcttaatcaagtaaatccagaaaacaaggctcaaaattacttgagaaaggttttaattgtttttgcatcttttctcttttttctttctcttattttagaaaaattattcttagaggtagagtctcaatacacttcccaggctggtctcaaactcttggtcaagcaatcttcctgcctcagcctcccaggtagctgggactatagacctgaaccactgtgctgtttttgcatcttaaag

SEQ ID NO: 45762 - DNA, 1005 bp, Homo sapiens
agtggggagattaagtaagttatagacagcttgtgaagaagaaaagaggaggaagaaaaaagagaaggaagaagaagaagaaaaggaggaggagggggaggaggaggaggcagagagagagaaagaagaagaagaaggcggcagagagagagagagagaaagagagagtgctagctgaaaagagcattttgcctagactccactgaccaggcctcacagtttttagaaaaaggaagaagacaaacctcacagatgcagactggctggaaaaccccagtccctcagttcttaaccaccagacagggaagtcttggccaaacaatggtggaacagattctttgagggacagacaagagacagagggggacagagggccccagcttcagcctgatgcttgggtttgaaatgtccaatccaccagcacacctgacactccttggcaggaagaggacagaaaccctggcaatctggggggaggcacagcctgttcacagaatcagaaatgtgggagcaaaagtcatggcctttggttcagaaatgccaaacatctaatcacctccggcaaagtccctggcccagttccatgttattgtgacctctgagtcctggccgagtgcagggcaaactccactacctgctcggtggcccacgggtcccttgctcctggcactggggtcctgtttctttttaccctttccaactgggctatctggcagggatcaatcagtccccacatagaagacacactggcaggggtctccaaggcctttatgtgaaggtcggtggcttggacgttactattttttcaaatggattaaatgccaatggcatgctgagcccacggagaaatcagaggtagacagtcggcaggcaggcactctggggagataaacagatgcgtggcattccacagctctgaggaaagatgccccttgaagctagggagaagcttttgtccatgctgccacctttaggggctttctcagaaattcccactcctacgct

SEQ ID NO: 45763 - DNA, 799 bp, Homo sapiens
ggcaggagaatcgcttgaacctttggaggcggagcttgcagtgagtggagatcgcaccattgcactccagcctggtgacagagcgagattccatctcaaaaaaaaaaaacaaaaaaaacccagattcattacactcagtgtgtcccgcctcaaaccaactaaatctaaatgcctcagtaattttgatgatatgccagctaggaacttctacttctggctaaatctgcccccaaggaagtgtgatcatatttgtaggattccttagaaattatgtgttcctccacttcctctagtctggcttccccatgaaaacgcagccgcgttggtagcaaagaccagctgctttggctgtccagcttcattatcttggctttttccctggtaactgtcccagattctccgtaggtgtttactttgtgtgagtcagctggctctagtgtaaagcatgtgacctgggtctaagccaatcagcatctcataagcctcctgccatgactggttcagggataggcccttagtccaatcagagaccatgaaatgcaatgaggctttgcctagaaatgctgagctaaagatcttcactttctatgcaggttttgaagccaggagcccctcttcttgagatctattggcaaccatcttgtgaaggaagagcccattgtgtaggaggcagatgctggagaaaaagagacaacagggccgggttttatcatttgagacttgagtaaagtcataccggaagtcacacccagtctaccctgggaagcttggttacaagggccagtaaattcccttttct

SEQ ID NO: 45764 - DNA, 1571 bp, Homo sapiens
acgtgcctatagtcccagatactcgggaggctcagatgggagaatcacttgaacccagggagcaacagagtgagaccctttctcaaaaacgcaaacaacaacaacaaaaattagccaggtttggtggcttacacctgtggtcccagctacctgggaggctgagatgggaggatcaaggatcaaggaggttgaggctgcagtgagccatgattgcactattgaactccagcctgggcaacagagcaagaccttgtcaaaaagaaaaggaagaacgaaggaagaaactaaggcagaatgggagatagtgatgatgggtgggtggggttgcattccacagagctgtcagataatgggaggaaggagctagacatggagggtctgggaaaagcatcccaggatgaggaaccaacagagatcctgtgtcgcaggaccaggtttggaggctgctggcaccatgaggacgtgagggctgtaagctggcagagctcttagagtgagcatgctgagagctgtaggtcatgggtcggagcgtgggttctattctactgtgacaggaagtcatgccgtgagaggatttccccgcagtgaagtcaggtgattcgtgtccttaaatgctgcccgaggacttctgagtaggtggagcctagggagggagagcagaggcaaggggatcagtcgagccccgctggtgggatgagtctgccgggacaaggggtgctagctgtggtcctcgtctgccttgttctcagctgtatcctggcccccagatgaagcctggccacagtgtacttggtaaatagtggttgcaggaatgactgaaatcctggcctgagtgagctcacaactttccatatgaggcaaataagcagatctgttggttatgacccagatacgtggtgaccagggcaaacgtttgtcagaggagtgacgggtgggggctggactgtcttcccggtacagctgtggaggaaagcaggcagtgcagctgggacatgcagccgctgtcccctggggctggcggaagggtgtggagtgacggagagggagagctgctgatcagggagctgggcatcccgttgcagccttactgggaagcttgcatcccagagccgacttgcctcacctttattcagggattcaggcccttcccctcccccaagggcttgcttaattcccctggcttccttgaggcatactcagaaattcctttcagttcccctttctgctggctgtgcttgaggcagggatgggccaaataccctccacgcccttggtccatccagaagtactgagtcaacagccctttcccagaatctacctccatctctttccacacctgcagccggactgttcccaggaatgaggtggggcaggacctgagagcaaagtgtgagctggtgtgcagaaccacccggaggtggaaggaagctagaatctagtgtagggtgcctctgacacttgtcccacacatagatctcccagggatgactgtgtgggtccgaggtgggatggaaaacttgcatttcttacaggctgctggggatgctggtgctgaggcttccgatcaccct

SEQ ID NO: 45765 - DNA, 2053 bp, Homo sapiens
ctataagccaactccactatggttccactcttcagttccaccgtctcccagggagctcctcgccacaccatttgcctcacctctgcctctccacacctgtacctctccactctctactcaccgccctccccactgcatcaccaaacacccctcaccccatcatccctggcttgcctctccctttggctcctagaacagtcctgtgactttcacttgaccagaattcggagaaaatcctgatatggattttaaacctcacacatggacagagctctctccactgcgatgccaaacatccacttctctgtccttccaactctcatcctgcctcacttcctctgctctccaattccacaagcaagtggtccctgctttcggcccccatttctgccacagtatgactcctacttgctggaagttaaaaggcctctcccaacacctctccaaggcaacggcaccacagccttcagactacctgtgctcaatgcctgcgggagaacactggtaaaaggcggtttacttgaggagttcactgctattgggtaaacaaaggaggatttttcaagaaacctccagtatccataagacaatagatcaaagaggagcccacataagccaagggaggcccaatgaagaagaaagggttggctctgttccacctgggaagcacctgcccaccaagaactggggatctgaagggatctttttctgtcagtggcaaagctgggagttcctccggggcctgaagcagaaagcagacaggaccaggagaacatgcatacttctcaaagaaacacagagaacagccccacgggctggaccctgtaactgaagaaaggagtcaggaactttttgctctaagagtccttgctgaaacggcgtaatgttgtagggactgtcgcggccctgtgttgtaccctcacacatccgcacctatggcgtgctggtggtgttgaattctagaagccgacttgaaaataaattgttgcccatcctcccatcattcactcatcaaatatgtcatcaatgcctacttcatgctaagagttagagaaacacacatcatgagggctgggcgcggtggctcacgcctgtaatcccagcactttgggaggccaaggcgggcagatcacaagatcagaagttcgagattagcctggccaatatggtgaaaccccatctctactaaaaatacaaaaattagctaggcatggtggtgcatccctatagtcccagctactccggagggtgaggcaggagaatcgcttgaatccaggaagtggaggttgcagtgagccgagatcacgtcactgactccagcctgggtgacacagcaagagtctgtctcaaaaaaaaagaaagaaaaacacacaacacacatcatgacacagcccttgaccttggagagcccaaagtccagagagagccaaacaaacagattataaagtgatgcctgtgattaaaaaaaaaaaaaatagaagagaatgcaggtaaccagtgttttgggaacccagaagggatccttctgtggggctaggagataaggcaaggtttacggccctgaggatgccgaaagcttcagggatgaaagcggggactccaggcttataaaatatgattgatccctttcacctctttttttcatccccaaacagctcactttactgaaattgacatcacaggccactgtttttaaggtttggcatcagaattgtgaaatggttgtctagagacgtgctgatcctgctggacaatgagacagtgtctatttctccaaaccctttagaaacccgaacactctcactgaaacaatgagaaggtcactctgataggctaaaatggaattaaatggttgtgctaatttatatttcttagactactagtaaaactaaacatgctttcaagataaatgacatggaatttgtctttaattgactccttttttgtcccctgctccagagccatgttgttttttctttgatgtctctactttgtccctgtctctccatctctgatgtcctccacccagtccaggcccacatcactgctccct

SEQ ID NO: 45766 - DNA, 472 bp, Homo sapiens
ctccatagccagtgagtataagaagaagatgctgaaatacaaagtacaggagagttacctagaagttcttgaacttaaaaatctttcctggatgatggccctaatgtgatatggtgcaaagttggtgcctattgaccaaaggggaagtgcctacagttctgcaggtcaaggtcatgaactttctctccacggtttccagtccaaattaggttgctccatataatcctggaacacaacctattttagtctcctctagttccagtttcttttttttttttttgatgtgagaccaagttccatagtagtagataaagagttgcaaaagaatcctcaacccttatcttttagtccccaaattagactgggcctaacctccttggtagcttcttaagtaccattatcaaagagacaaataagaaacctcaggctgaagacagattcaccagtggagccaaagttatcatcggaagtg

SEQ ID NO: 45767 - DNA, 422 bp, Homo sapiens
tccacagagatttaataaccgtgtcccaagttaaacaatcttgggagagatgcaggtctgacagatgagaaatcctaaatcataaatgtgctgagtttcaaagaagctcatagatgggtcagcaaacctggctgaccgcgatggagagagtgagtgagtggagtggagcagagcagcccagaagctgcagaggtcatagcagaaattcgggctctggtggagaatgatgcaatcaatttgggaatctgaaatgacaaagagacagaatatcctgccaggaagacactgtcatctgcagcgtggaggccggattaaaggagagcactcaagactcacttgccagggcagagtaaatcactctcagaacttgatctttcactcagtgaaacaaataaaagaaaatggtaataaacaaaaatcgt

SEQ ID NO: 45768 - DNA, 2190 bp, Homo sapiens
gaggagccaaggaaaggttggggagtctgaagagagaaggacctgaggcttgcaccatattctggatgaggagcatggagatcactctcaaatgaagtttggccagatagtgagcaaagcaacagagcagccagactgctcagcaggaagaaaagataacagctctgtggggttttttttgtttttgtttttccccttgcagggtaactcccttcataggcaacagaccagagagagcagttgaagatgaatgtgtctctcttggcaaatgctgaggagcgtgcacttctatctcatcattaatcaggaggtagaagagagagggttctggtgaccagtgatgatttgggaacaccaaaaaagacaaacaaactccaaacataatccagtgaaaacccaacaaattacatgacatttcaaacccagcaggagacaaaacgcagaccccaaagaggaagtgatgtattcaccctagccaaacaaagaggtcgacactttgaagaggaaaaagaaaatcaagtacaaagggacagcctaaattccttaaaagagcatggaggttgtgactgagatcccattcctggcctctgaatcctgtctcccacaaccagtcaagcctgtggtgatccatggactaccatgttctggaatgaaccaagagaaattaaagcctcctctcctcggagacaaaacttcatgcaaacgacatcacttgaagtcaccatggaaaagaatagatggagtggggagggggcagcatggaatgaatagtgggaaaggtgaccaaaagaccttgaacgatattcattcaaagataggcctcaagttgacaataaagatggaatcttccatgtaatgctgctttgcagtaatcagatctctaatcccagttatcgcaaagaaatgcaaacatgaatgaggtattgccaatgtctctaggggaattgcattttcatccttcatttaactgagaaactgaggtgcaaagaaatgaaggaaatcgcttaaaggatgacagtgtgagtcagcagcccgaccaggaagccggggctgcgactcctcacttcctggttttctctacaaatatgaagagtacattcccttcctctcagaatcggtttgtggcagcagttctctagcttagaaaggcagctttccaggagagaaggcacgggcattcggctcctgctggggaggggcgaggtaacccgacatcaggtccacaggtccacagaaactgaaatttcttccaagatgaggctttccccttccttcgcctggaaaaccaatttgcgctgatgccctgactccctctccttagagtgtcctccctgctcaccattctaaggcagcggctgcacaaattagcagtgctctttgtccctagagctccagaatccgattgtgttccagtgtgtgccgcaggcctcgatgtgtgctgtgcattgtaaaacactggcacgtgcttctgcaaagaattttgttcttcttaacagccaccagaaagtttgtttggccatccatcccactgaagcaaaaaaggagaagaaagagaagaaaaggctgtgaaccgcttattagaagcttccaaagctgagtggaagtttaaccaatttcaaggaaagcacacacacactaaaccccccactgtttgaggactttccacgtttgcatgcactggagctggactctggagcaaagggcagcagtgattattctagaggttatgtcatagatggtgtaacattatcttctgcccactgggatcttatcagccatgtgtgcctggtctattttgagacccatctgagcctgctacctgggacatgggtagtgttaacaaatcaacatatggctgacaagagtttaacctgcctcgtctggtgaagaacagtcagagcaaactgtctgtcagcagcagcagctgaacttgtgatatgaaatattgctttcttgcctaaaagcaggacagagaaagaaaaagaaaaaagaagcaaaagaaatattgctttgtcttccaaataaaatttagaggctcagtgtaaactgcaactgtgaccccaatcaaccaagtaggtgaaacacacacacacacacacagagacacacacacatctttttacttagatagctttgttattcagcaagaagacaaattattaaaaagttgccgggcacagtggctcacca

SEQ ID NO: 45769 - DNA, 2256 bp, Homo sapiens
ctttaaattaagatggcatgtaattaaatcgttcagctggttgccaggcttctccgcgcaggtagtttactttcgcttgaaataacccctttgcgtctgaagatccccacaccctgaagtgactcaacttcataacaccaccattgaaatctctagctttacaggcaataggcttggccggagagcatcagtaactcggcagtgagtcagatgaagagctctggggaggaaggttggaggctaagtttgcttgcagggaatgggtgcggttgagcgcccgggcctggccagagcctcccagtttacatcctgcttccctgttgccaatccgactcccgggagccgccctgaaggggtgtgggcagaacttcggggacatggggtaccatcccaggccgtcccaggttccctgtacttctggatttagccccactgaagcttcagaatgtctgaactacatgaattcaccttccgggacgcgcacctgggactagcgagaccggcagggctttgcgcggtccttaagacccggaacaaacacctgatgaccccggggtcaccttcacactctcctctgccccacacctcgtagcccccgccggcggcctccttccaggctggggcctgcctctccaggcggcgtcccccgagggcggctgcggcgcggagccgggcggtagggcagcagccctgcggcggctcgggaagaacaacttgtgcgaactgggccgcgcttcccccgggcgctgcatccgccttccgagatgctggcagcccgggacggcctagcgcggccctctccttatttatccaccgagcacagtttccatggttccgccgccatccttccgcccccttcctcgcgcggagcccagcggcagtcgagggcctggctggtgtggggctgcggggtgcgtgcgcggcgcggggcccgggcgtatttttcaagcctcggggcgcgtgggtgcgccccccaactcctgtcccccgagaggctgtgccacttccgcagccccagcccagtcccttccccactgggccgcacctccagtctgcccgcaaggcgccgcgcagcccccggcccggcccggtggcgcgggggaggggcgcgccgggcaggcaaagttgctgagttgctctgcacgctcagaagttgcagctgcgacggcagcttccctcccccttcctgcactgggctacccggaacgcacacccacccgtcaccacccgctacctgccctcgcccctgcggccccggccgggactccacagcatccccaccctgcgcccgcgaggagcccaggtttccagcggagttgggctgggggcgggcgcaccccatctccccgctccgcctcgggggaggcgggtgatgcgtggagggggtggttaggatcccctctaccgagtcgccgcttgcctgcggcgcttttgcactttcctaagctgagcagctgtgcaggcgtcgcccgccggcccctgcgccctcctagcaaagcggggtttgcagaacgggaactgggcggtcttcccattccctcccgcaaggaattttgctgtgagggtggagagggggcggcggggggctcggcttggggctgaggttgccaacaggtgctcgcgggtccatgtgaccgaggagggagcgcgcagggaagccgggggtgggggtgggggcgggggcaggctccctcggcgtcccccccgtagtgcccgacgccgggtgcacccagccggcagctgtctggggagtgctcgcggatggctcctcggagcgctggcgccctcgcggcctgtctgggaggaggaggaagaggagggggagggaggggacgcgaaagtgggtcaggaatgtaactggatgctgcataccccccacgcacacccccgctgtggccgaccgaggcggccagctccagccttggaaagcgagtcatttgctgttgtggttccccagcattatcggtggacggttaccaggggatcccgagggatgtgtttccctgtgaccctttgggaaggaaaacttggttgcctcagtaaccgagtttggcttggatgcaatgatgcagtgagtgttctaggtgagcctggccgagaaagaggctgcagttgcactagggggtggattaacttttcttattaccgaaccaagacgtgaaaggaaagctggggaggaggtggagttttgctctgtgtttgtttttttactatttcagagaatacgaactaaacgtttttgcgttagggtttgtc

SEQ ID NO: 45770 - DNA, 1480 bp, Homo sapiens
aacccagcggctccctaacctgcctcatcagattaagaggccgcaccacatagttgttgcaccagaatctcctgggccagcagtccattttttttttttttttttttttgagacagagtctcgctctatcaccagactggagtgcagtggcgcgatctcggctcactgcaacctccacctcctgggttcaagtgattctcctgcctcagcctcccgagtagctgggactacaggcgcgtgccaccatgcccagctaagttttgtatatttagtagagacaaggtttcgccacgttggccaggctggtctccgtctcttgacctcaagtgatccacccgcctgggcctcccaaagtgccaggattatgggcatgagccaccgtgcccagccagtctgtatttttaataagctttacaggtcactccggtatggatcattttggggaaccagtttcttagctagtttgttgtagagcctgagaccttcccgtgagacctcctatgtctctcccagggagagaaagagctcaaactttttatgagttcgtttcaacctgtccttttgcttttgtatatgatggacggtcattgatagtggtgctcaaagttgtttttatccagatgacctgctgctttccaaatttagcactggtctgaaagagtggagggatgtgtcagaagtcctctgccctgctgctaggctggaaggagatttgggttgaagagctatgtggagagtggagagtgactcaaactttgtacattgaagcttgttggaatgatgcaatcacccaggcattggacagaccacttcctgtacctttggatacacagacccagggtgtggtatttggcagtactctcaggagtaggctggctgatcctcttcaagggagctgagtagtcagaggtaaggccaggcaggctgcaggctccaaacccacaaatgtttctagtttagagatagatggattgtcagaaacttggagggggatttctaaaaggtgatgagtatgaacacctttctcaaggaatacctggctctctaggtatatgtttctttctttattgtcagaagacaaatgtctgtcctgtggagcagcagttacacacgttgtcacagccagctttgaattagtttgatgctgatgatctgcctacaattatcatttgctcttcattttcccatttggtttataagctgtaaagagacgaattcacctgtctatattattacatgcctggtgaatgagcaggcggaaatgaatgtttaaaattgatggtggagggtttgaggggtaggatcacaccacaccccacaccccatacccgactccagcatcacatacacagaattcaagctgtccatttttctaagtctctaactgttgaagccaagggtgggtcattttgttattgctccacccctacccaataaacagtggaagttgatagagtctagtggggtttttttaattgtg

SEQ ID NO: 45771 - DNA, 3873 bp, Homo sapiens
gaaacataacaggttccgaaaacttaattttgatgactgaaagtcagagaaacagccagctgaatcagctccttcttgggcagtggtttagcctacttatctcatatcagacctaagggtccagctgcttttccttggttctaaagagttctattctggccaggacccatcccgagacagacacttctgtctgcagccctgaaaactagaggtcaatggaagggctcaaattaaaggcccacagttgggcttacaactctccatggtgttcaagccttctcagaggagctggtgtggtggagccagggtcaaaggtcatagtaaatagaaagtagccagctttctgcctgcataacatcatcttgcctaaccagactcaaacgcttaattctactgtagtattctttggacattcttctttagaactacgggggcgggggggggggggcgtgtttattttcaacaaccacaatcatccttatctttctgaagatgtttccaaaggctgagaacagacccctttcagaacctcggtaggagaagtattaacagttggaaacatgtcagctgctttatggaggaagcacagcccaggcctggtttctctgggctccgtgataacttggggcaaggcagccagtgcgaagcgtggtggcaggagctggagagatggagagcggctcggagaagggcccctgcttttcagagttgaaacaggagccctctgagagaaagagatactgcgtgtggcttctctgaagccttggagggcgacgtggatgacacagcatcagccattccatcgcggggtggggacacagtggcggcaggaaccgtcctcagcccctggcggccacggcagttccccgctgaagcatcctttgtggggtgtgggtaagggagggggaccaaagtcgggtcggagttgagtttgttagacggcgagcacactcagggcggcagcccgagtaagaaggatggccccgggagagaaacggctcgaagctaggggcggggtgaagcgcctgctccttaatctcctgccccatcatccactcgccccacctggatgcagagcgaggaccgcgtggaaaggaaacggcgcgggcggggctccccctcgcagatgcctcggagacccagaggggcggcgtcaggccagggccccgagccctacgccccccatccccccaactccagcgcctctgaggtgcccctctcgcaattccgaggcatcaccgtgtctcccccgcctccgttaaaatagtgaaactgcggagtgaagtgatggaaagccgggggcggggagtcgcccgcggcgaggggctgcaggggagggggcgcggtggccgaataaggtggcccgcgagcaacgggacgattgggatcgcagccagtcgcggcctcccggacccttcccctcgggcagcccggccctcccatggcccggggcgccttgggagggcgtagggcaaacctggggctgcggtggggggtggggaggggactccacctccatccatcccgggatggcaactgcggtcaccctgctaaagtcggggcgggggcggcggtcctccccctcaccccccccagtccgagcgccgccgccgccgccgccgccgccgccgcggccgctcagtaacacgtccccaggagactcgcaggagcaacacgtgatgtgtctacttatcagggtgagagggggagagcgagactccgagcgtgcgggcgaggaagctgggcggggggccgagacgggggccgggacgacggctggggcgccggggtcgccagctcctcgcccacctccctccctgtgggagaagaggaggaggggaagtgactgcggagttgatgaactttgcacatccagaaacgccattttgattccttttccggaacaagtttgcatctctcctcggtctctccctgaagcccaccggtccccaacgcatcatgccagggagccaagcgtcctgcccggccgtaagtacgtgccccggattccgactcgcggtacgccggcggcagcgagaagtctggggcacagccggagcgaccttttaaagaactttggggatggggagggtgaagtctgcagagcgcgttgtacttttgaaactcggtgtgtcccggagccggggacccgcacgccccactccgcgcagcgtgcgctcgggccggcggggcggccagggatgagcggggcagccctctcccctcgggctgcgcgccgggccattcctcctcctcctcctcctcctccccttcctccgctcttttccctttcccgagccgccggctctgccaaccagctcccagcgcgagccgccgcagcgccccgccagcaggacctgatgcgcatccatattagccgtccgagcgcaggaatccggcccgacccgcgccgccgagtttatttttaaccagcaccgccgggactcggatggtgcgcgcaccgccggccagaaacatcttcccagcgctgctctccatcttccgccctctctccctcgacatcctcccccccatgtgggaggggaaacttttctcctacatactttcgagtccttctcgggccgggaagcgcggagatgacggcgcccgccctcccgccgccgccctaaggtatccgggggtgcctgcccggggtgctcgcgcgggggtgcctgctcggggctgctcggtgggagcatccgccgcgccctgctctgcggactttgaacctcccgggcggacggcgccggccgggagggggccgcgggcagccccgcgccctcgcgggttcccggctggcggtcgtggtcacgccgaccaccgccccggggggcctggggaggaggggaccgggccctagccgtgcgggcacgtattgttccctcgcccttccgttggcggggtgagtgttttcgtgggagccctcggtgtggagctagcctgcctcgcgggcggggggggtggggggctcggcgccgtcacgagcacaggaaggaggccgggagcatccgaggcggggccggccgccggggcccgctccgccgcccagctgtggagcgcgctcggaaacttttgtccgccgcccgctggaccagtttttcacgagttctggggcttcccttcctcctcccatcccggcccccggcgtctagctgggtggggggagggggcctgttgctgccccccccgcccccaacttcccgcacaagccttgggccgggccccccgcgccccctccccgctcgcggtctcttaggaaactgcgaccttaatggttgctaaggagcaggggaggtccttcccgtcgccgaccccctccctgggaagcggcgtgttttctggaccgggccaagggcgcgtcgaggatgtgacctgctccgcggccgcgcgtgagtgcggggcgcgtcggccgagcccaccgatgggcgaggccacctttctctccgggcggggcggggagctgggggacgcggggaccccacggggtgcgggcccgggccgcttgacaggcgccgcgtgcagctcgcgcccctcggccgccgtgcatccgtgatgggttataaaagaggaggaaagtatttctccttgctcagcagatttgccctccctcgctccttactggttaggagatagaacgtgagcccagatccggacgagcagttcacattccattacgaaattctacacggcttcagagccagcagcagcacacattcggggcactttggaggggttttcttcgtttgaggatgctcctgctgctgctgcttgtgatggtggtggatgtggagagagacaaaagggtgaataaaaaaatataacgttttggtatgttgaaaaacctgtccgggggttttcattagtagaaaattg

SEQ ID NO: 45772 - DNA, 668 bp, Homo sapiens
aaccacataaagtacctcagtggtcacccgatgcccttaatatattagagttacattagtattttgcttgacctgtaatctgtgtgaaaacatagttcattcagtcagcaacacttgttgtgtatctaatgtgttgggccctccactagatctcctttgggtgccaaaggagaagatttatttgacccctttcacaaggagtggaacctgtccccgtggagtgattgtctagctggtatttaaatacctctggtgatggctgacttgctccctacccccaggcagtcctttggtttctactacgttaattaactttttttttttaatggcaaacaaaatctttttggaacaaaaccgacagtgacgtgttttccactgagttggtacacactagaagctggagtgcaggtgtgctgccctgcttgatgcaatgcagggaggcagggtgcaatctgaccctgagacttccatcagggtgtgctccggccactcagcaagtggttgtcacctacttaggatttctgcttcccgagggaaggtgcatgcctcacttggatgcatggcccatccccttctgtgtgagttgggtcaccagcctttaagatggtctcacatgaaagtcttattgggctcccattttggataatgcttttctctaatatcatccg

SEQ ID NO: 45773 - DNA, 1672 bp, Homo sapiens
aaaaagttatgcttttgagcttaacacattatttgaatacctccagcttcatctgaaatatccttaattgagcaattgctatgctaggtttaggcatggtggagtttggtgtttcttgcctttggggagttgacattatgaaaggaattcttatgccatgtggaccctgagccaagttcccatgggaaggccaaggctcacagaagctcgcaggagtgggtctgcacttctaggaaaagcacaagtaggggctgagagcccagcaggaaagcaggttggttttgagtttacagtgtaatttggtgttgaggaaggtgtctgagaagatgggttggagggatagtggggcaaggtggaaggtggggcaggatttgaccttttcttcttaatttaagtggtagggagtccaaagtttttgagtagagaagtcacagttggcctgcttaggccttggagacaccctcaacagtgggcatgtggtttgtgtgtctgtgctttgggtgactgccgtggctcacttcactgtttgctttttggcctgaggcagagagtgcctcccatggcagctcgtacaggatgaaccaagaggcagcacccaggatatctgaattgcctaaagccactgcagtgatgtacacacatagcgaagctttatttctttacagccatagacttgttgaaaagctgaatcacatactttgcttgatatttgactttgtggttaccaattccaggtgagccaccttcgagaggggtaacatcctgttgtcggaaaggtgcagccgggcagcagggaacctgggttccactttagccctgacatagaaggttttggttcatgtccctttggtctggtaggcccctttttggtgcttgtttacggaactgatttatcttgtttataatgttggtagacgggtgtatataccaagacctctggtttactgaaggtagggccaagagctttccagcagtctgttgagtggagctacgggtcagtcagcacacctggcccagagcaccgtgagctggtgaacctacttgtcccaggtgttgtagtgtggcacttgagcccactctactgactctcccctccctcactcaattttggagtcttgctgtctttgcctgttgctgttctctgcctcagcccaaaaggagacaaggagtgccttcacctgccctcactgggggcaagagcaagtctggataaatgacttttactgataattcctccaaatcatttttatcctccatagccaacactccttcctctaaaaacctgcaaagtagtagtagtaaatccctttccattcctctcctttgctctttcaggcctctggtaaagctggaagcgcctgaaagagaggcaaccgaagccaaggctgccataatccacgcgctctggacgtcaccctgggtgactcagatttggttgcatttgtcatttcacaaccacctgcatctgatcccactgtgtgggcaaactgtctgctgggagtctctgcctggtgcctggtcttgggggcatagtgttcttccccagaattgcttttcccagctgtttctctatagctttagtcatggggttcactagtgaaagctgccatgcctaccctccccatttacttttgttagtagtcatttctttttttttttttcgagatggagt

SEQ ID NO: 45774 - DNA, 3751 bp, Homo sapiens
tgttaaatttatttttgcataaaatagttctgctataacctatgtgtagctattcaaacaaataaatattcgacaatataactgaattggttattgatcaggtagttgggccttcaaaaaaaagtatgagaatatgaaatataaacagatttaagttctgtaaaaacaaaatctgtaaaatcattcaggtatatttgtgttcaaaattttccaaaaagattagattaaaagtatcttttaattggtgatatatattgactccattagactttggaaatttatattttatcagtcagaacttttagattcagactagaaaaaaaattccttcttggtcctttcccccacccaccctttttattgtacatagatgctgttaacagaactttgcctttttcattcctatcaggtttagtacagttcatgcgcaggtttcagtaaacattaactacttttatcagagcttgcagtgtgctgaatggttagcaaagagagtgtactgcaagagacagatgaaaatgagagagtccaaggtcacatggattttgaattttttttaattattgagaatttaggggaaagaccatcaggcttcacactttaaatctctttatgtgggcctgccacacggcgtctttgccagcttttgtatgtactgaagctaaaacatttgttcagatgctgattggcaaggcaagtgactttaaaacatggtttttttttctttcaattaaaaaaagttttattcagggctgccttctaggatgaaagattctcaaggccctatcaaagacgtaatgcaacacttatcgtggtgattcttaagactcctttgaattttatagggatatcctttttctcaaagatttttcaggattgccttctgataatctatttcgtttctggagttagcacagtaactcgtaaaccaagtgctaaaagatgaaatctgaaacacagatatagaataaacgtgttttggatatcatgtaatgttccccaacttttgcctatcattttcgaaaacaggaatgtgatctgtacttatttttagagaaaaggacacgaacatttgagaaattactgacaaaaattattctcctcctgcccctccgatccaataggtttgaagccgctggtcctcgccttttactccttagctggacagcgggttcgggatctgccccatgactaaggctgaagtggaaagttgcgaagatagaacaagagttgttccttagggtggtgtccctaaacttgaaagtggacttggtcctgctcgcaggtgggcttgcacgcgccaggcttcgtgtggtggctcgcgcgcgctggcccccgagcgccagcgtgggtgacccgtgccccgccccggacggccttttcaccctgttctgtttctggggaggggcgaggggaaaactgcgggtgccttccctcagaggcgggcagccattgtgcctcgggaacacggtctgagtagagttgtgttcgcacagctgaaggcggccggcggccctcccagggcctcgagggtctgtctgtgccctcctcaggctgggaccgggcagccgactgcccgcgtcagggctccacggccgcaggggccccctcgggccgcccccagggctcccgcggtgggtgtccggtgagcgggtagcgaggccatcagtcagggcggcgggcgccgattggctggcgggctggcgggggccgggcggggcggggctcggtgttcgttcgcgctggcgttcccccgtgagtagagccgcgtcttccagcggatcttgccgcactttcctcagttgcgaagggcacggccgctggggacacaacctaatgaacaaccggagctcttcagagatgcctttagcaactcagctccttaaaaataataaattcctcttagggaaagattagaagatgagtgtgcttggagcgaacccgtgcccgcccccccgccttttttggctagagggcatttagcctgtgaccacttttaaattttcacaagatttgcatagacatgagcatgcccactcgcattatgtaattatttccccaaataagtccccattgaaacatttggcttccccgatggctatttcagaataaaaacatgtagcagggtatttcatgatgggtagctccaaaaacttttgtttaaaagaaaaaccacgtatctagaaaatgctcctttaagccttttttgacgaggaggaggggtgcagacacttgcctgcggcaaagtgaacctggaaggagcggggcgtgtgtaggacagagcccaggagaacgggcagccgggtggccgggccaggaagcagggcctttctggccctttccgcagagggctggataattgcctctcctttctaaaaggagccgttttctgggccgggagcggtggccctcgcccataggctcacgctcgtaattccagcaatttgggaggcccaggcaggcggatcatctgaggtcaggagttcgagaccagcctggccaacatggtgaaaccccgtctgtactaaaaaaaatacaaaaattagctgggcgtggtggcgtgcgcctgtgatcccagctactcaggaggttgaggcaggagaatcgcttgaacttgggaggtggaggttgcagtgagccgagatcgcgccaccgcactccagcctgggcaacaagagtgaaactccgtcttaatttaaaaaaaaaaaaaaggctattttctgagaatggaggtggaggaccacacaaaacccagccagttctcgtggcttccgcttttacaccctcctccgagagccggctcccatgcccttcccagctgcgctgccctcggcaccaccgggtgcgtccccccgcaaagctggacgcccttgtgtcctcccgcctgccctcggtgtcaagtctccctccaggacgcagtttctcgatgttctgtactggaagtacatcaccggtgagggcagcaggtcactgtttggtaaccatcaggctgttccggtggctaaaggttgcctgctgccaggcgccttgctgagtgtgccctgccttagtctgagacagttcgtggggtcaggcttgacccccagcaggcccgcttcatgagctggcgcctctgcagccatgtgatgggcggagccacgtggggctagcttaccaagccagggcactgacttctgccccaaggccgggcagggaggaccccagcaccggccactctaggaccctagaatgagttcagtgactttacgtggcaccccctctttccactttgagacttacctcacttttgctgcaccacctttggtggtcgcttttctcttaatagtgattcttcattcttcatggggggataacttttctcttctacacatgctgggacccctctccaggaggttctggtggagcatgaaccagtggctggggcattggaagcttcccaggcgatgcaaatacaaagccctaataaagctttcaaaactgcgttagaaacaggtcacttttacatttgtgttggaaacttgtcttgagacaaatgaatacatttgagccactgggatttttggggaaaatacagctaaaagggttaggaaatgatacataaggaaattctcccatctgatgctggctggcttgcttgcttgctgcaaacccgagtgttttctattaagtgaggcattgtggttcctatgctagccctgatgggccttcagcactggcaggtgtaaatgcggctcattaattttttaagaag

SEQ ID NO: 45775 - DNA, 1184 bp, Homo sapiens
atttaacgaatgttcactgggttattgccttgtgtcaataatgttttgagtgaaatatcaaaacgctgatgagatggtttatctcatctcatctttacaagaaaagggaaggttagaggatttggtgttgccagtgtttttacttattgttggtggcctgcctgaaactgatggcagtagtaagtaaggaaaaagcctgccagtctccttaactctccaaaagtaggattaaatctgctgagggtcagaccactgccgtagttctgtcctttcctggaaatcatagattcttttgaaaggctgatcaaatttatggactattttcctaaagctgaatactgtctgcattttacatgtggtttcaagggtatgactcttgcacttgtctacagaacaaggcttatcaacctaagcatgtcatctgttcagctcagctggcccatagttggcttgcagtacctgttatagattgagagaaacaatgcctactgtgtgccaggcactgagctacagactaaagatacataaattgggggagggagggcagggtgcaattaaggactgaaatttgatcactttcttttttgcattttttttttttaaatgagacaggttttccctctgccacccaggctacttgagttcagtggtacaattatagctcactaccaagcccagcaaattaaaaaaaatttttagacacaggggtcttgctatattgcccaagctggtctcaaactcctggcgtcacgaatagttgggtctttctggtatattttcaaaaattatgttaagtttttttaaaaaaaaatagtgacatcaaattatacttaaaaaagcactgtattctcatgatacatacgttgtttcagattgccttttctagactttatccataagtatagcatagaatcttaaatgtgccagctagctttttaaacttgacctaactttataaacattttcccatgttttcacacattgacttttttttgagacagggtctcagtttgtcacccaggctggaatgcagtggtgtgatcaccgctcactgcagccttgacctcctgagctcaaacaatcctcccggttcagcttcctgagtagctgggattacaggcgcacaacaccacacctggataactttttttttttcttttttttttctttttgagacggagtct

SEQ ID NO: 45776 - DNA, 982 bp, Homo sapiens
tgcctcagcctcctgagtagctgggattacaggcacgcgccaccatgcccagctaatttttgtattttagtagagatggagtttcactttgttggccaggatggtctccatctcctgacctcgtgatccacccgcctcagccttccaaagtgctgggattacaggcgtgagccactgcacccggcccacatctgggtaactttttgtgttttttgtctagatagagtttcgccatgttgcccaggctgatctcgaactctagggccaaaccgatcctctcgcctcggccttgcaaagtgctgggattacaggtgtgaggcacagtgtccagcccacattgacctttatgtttgaggtgggaccaggttcaagcaggtttagggtagatggggcagggtggggatgactcacctgggagaggtcagcctgcttatgacacgtccctctattgttggtttcatggattatttccctctatgaactgaaactctagtcaacactaggcaaagtaagttactttgagatccactaactcccctcccaagcctgcaggtaaaaccatcccagatcacctttattcctgctttagggtttaaaaaccccaggaggcaaacaaattaaagactgcagatgttcttaggatggttagacttgacacagaagagaaagaggtacaactgttcatagagttcagtttgacaattaacatgtatattagtatggttgcctgtgtttgtgttatgtttcactgtgtttcatcttcctgtgcctgggatcccccatgccctcctttcctatctttctcaaaaccagctgtttttccccatctgctgcattttggttatagatatttatttgtaggtttgctttaaaacaaaactcctctaaatcctacttgataaccatccatgctctttactctctcctgtcctgggagctctcttcctaactcctgcccttcattctcgacgcctgcctggcc

SEQ ID NO: 45777 - DNA, 1879 bp, Homo sapiens
actgggttacattaaataggcatcagcttggatttacaaatctgtgtgctacagagattttccctgttaaggtgtgtctgacccatggggactgggtgggcgtgtccagctgcccttggactgggcagatgagcaggcagggcggctgtgcttctctgaagtgtgcgcatctcctcttagttgtgcttctggtgttgacccaattattgcccgggtatgaaagagtttgaaggaagagactgtcctgctggtgtctatctccccttttcagttttccttcctgttctttgtaacatttggggggagtttgggggcttgcaaaggggttatctgtttctcagggtggggcttgtaaacatgaacccacacttaagagcctgggcatgttcagtgccctgtgtgagctcaatccaaagcaagtgaacaagtgtgcttcagggacatgatgcttgtttcaggccccgctgggccgtggaggggcggtggccctttgtgcagttagaccccccagggagtgcagttgtgaactaatcaccgcctggagagcctgtgtgcctcacacttcctccaggactgcactaatccccactcccacccccaactgccagcccctggccttggccccctccttccaaggtgcctctgctggtccaggaacatgccacctcctctcccagctgcacatgggctttccaaaaaggcccatcctgcctgctagtcatttttggtttgctcagtttactttaagaaaacccatttgcttgccagtgtttttggttggctagcttgtgataaacacttatcaaccacttatatctcagagcatttgttttccttcatatgcacagtagtaaatacttttcttagaggcgaatttgggggtgaggggatgggaggttttctgttgtatggcggagggcagcccatgcagctcctgggagctgggcgtggtcacttcaccgcacacagtcattcccagctgacggtttgtaacgtctgattacgcactgtgaaattttgaccacagctgaccacttttccaatgggcgaggaaagatgtgatctcctccttccactgccttctctaagctaagctgttaggggagaagcatttcaaacgcttgtatcttccacaagtcattttggttttctaaggagtgtcatcctgaattctgggaattcgaagcccagatttaaggtaaatcacctgccctgggattgcttagcttgcagctcgtccctggggcaaagtggagaatcccgttgctgctgcaccctttccctgagcatgtcagaaaggccagcccggcgacctcagggcctgtgaaagagttgcaggatattgcctaaaactctatgcaaactgctactgaactttaccctagcttcttaccagaagctggaaatgtgaccgaagatacttagattcacttcagagatgtgtcccagaacactcccatttctaccatacattgtcatggtgtcagccatgctgtattcaggtgctgcagttagttgggagagaagcagcttggtgaatatagggaagaaagagctgcatccctgtggcagccagtagtgtgtacttccgtaattaaccaaacgtgaagctgaccaggattggtttcagcagcaactgaagtcagaggggtttttatttcctggtcgccagatagcatggcgactgtgtcagcagctgttctcattggccaggggattgcatttgggaaaagccaaattatatttattttaaattgtccaacttgtgggctgggacaggatttttttttttttttttttttgagatggagttttgctcttgttgcccgggctggagtgcaatggcactatcttggttcactgcaacctctgcctcctg

SEQ ID NO: 45778 - DNA, 1249 bp, Homo sapiens
gatctttgtctctgacccagggccttggtttttgctctggaggtgtatgataagccaagcagcttctcccaaatcctcactaaaggaaggttttcagtgagatcctgagcttcttcatgagctggttctcagggctggatggaagcctccagagagctgttaactcagaaactcacactgctgtgccagcccccagagggtttctgactcggtaggtctggggtgggactgagaatttgcatttctaataaagggctggatgctcatgcccttggggtttgtttggtggagggtctgtagtagttaatttctccctgcctcgtgttggtggatcttctctgcaaggtcagctcatcagataggactagactgttcaggattcaggcagagcctcctttgcttggctgcttctagaacacaagggtatataacgtgaagtgccccatcactttgcagagcaagcgtagtgtttccaaactcttgcccgctgcaacgaaccttttagactgaggtggaagtccagttctgcctcctgccagggagaggagggcagaggtgaagggggaggagagcactccgccttcctgccttgacggggacggaaatggaaagccaggtgcagagcatctggaagggcagcagtgatgcagagcgagattattagaagtcagagaacgtgactaagggagcacacctgtgctctccagccatgggccaggagtcgcacacttttccaaaagaaatttaacagagttcagcaactggatttattacattgctctaccacgcagcagctctaggatcttggagacaagtgactcagtccctctcaacctttgtctttatggctgtacactgggaacaatcctcatggttgttgttttgaggattaaatgagacagtgcatgtggcacatggtgctcaaaaatggttagccatgatgaagtgtgatgggtgtgatggcaacattagaggtgagtgtgtcctggaatttggaaccacgagccatgggtcagtgggagtcatgtggaacatggccatgagggatgaggtcaggagaggggtgcaggcagatattctggggcaaggaactgagcagaaagggtaaccaaggggactggtgtgcgacggggccagaaggtggactgaggccagagcatggagactcttgaatggcaggttaaagagcctgaccattagtctttttttttttttttggagataaagtctggccctgttgaccaggctt

SEQ ID NO: 45779 - DNA, 795 bp, Homo sapiens
atttggccaactggatgctaatatttataacttaagttttcttctgttttagcagagttgttgtcagtttgtgttttggaaaggaaatgcaaaataaattttatctttaatgcaagcagtacagtatttttgacatatcttgttgaggtatttcagcagctcagtcttaccgggtaaaactggtggatggcagcagaatctggaacatcgtgcttgcccacacttgaacagcaggcagtggtgagagtgagaaattaggttagggaaggttagggatgggcttgctgggggtaggatgactagcagagagctggcctctgctccggaatgcaacatgcccaggtgtcctctcccaccatgcccctcgtctgatgcactgagaactttgaacaggtcctgagtgtgtgtccggtttagtttcataactcgaaagtagcaaagtcaagagggagcctgacttccagcattagatcacaaaatgaaacctgcagggagctggcagcatttccaccgtagcacttcacagggctttataccttacatttttccgcctttgtttaaatatccaacctgtccgacctgttcgggctgaacaagctggtgctagcaaacactgaagcgtgcccactcactgtcaacctttttctgatgtgttaaggaaggtgattagtggcaacattgtcccccccccccaacccccatcccaccctccccactgaaacatgaacaggaagcactgaagtcttagcctgtgtattcatgacacggatcctcatctcacctttggcatgtctg

SEQ ID NO: 45780 - DNA, 3858 bp, Homo sapiens
caggcttcctctgcacagaggttggagatgggcattgcactggacgctcgtcatttttttcatagttgggatgggtaggatttggtgggtgattaatccacagtgatggtagggctggtgctgtagacaggctgtgaagttgaaccctcagtcctgcacgtccagctagccgacctagaggattttcctcacctgtttactaataatgccctgtgtttggtgaggggttggcttaacaattttgtaacctgacagggacttggcccctctgggcaggctctcacttcgctggccccacagctgtggctgaggggtggcccgtaagaagagagttgccaggcatcctttgtgggggcacacaggccacccctgccctgtgcctctatctataattgttgctagatggggtggggctggcatctggaaaccaaaaagagttgattacagaacatggttaatgtccctttgctcctctctgctctgccgatccccataataggctgctatcataggaggcctggggcagcctgcgccagcggggcctagccaggcggtgaactgggacagtagctagtgggagagacagcttgttaacccagaactaaaatagacaccagctccatttcaaatcccagaggcagcagaaccacagtgggatgctacccgcttagactgaaggtttgtaactcaaaacagctgttgccttctcactctcctgcacttatcccccttctccactccccaccaacactggcaaggtgcccattgttccttaataaaaagtgttggaaatccaaactcatataaatctcaactccatttccctccactccactgtgtttcaaatgaatgaagtgttgtcgtagaacaaaaggaagacacaaagctgcctgtagagatgccagctcttaggatcaggtgttagcttcaccctgacatgaccaatggtcagtcatcccccttcccccagggctccccagatgagggagagaaggcagaggaggaagcggagtcaggctatggcgagctggcgtttggaatcggaggtgagggacggagtgttcaagagagcaggcggctacacagaggacatcctttgtgtgaggatgttgctgggcattgaatgtccatcagaatagaactgagcaactggccataccctgctgtgaatgaagtcagctgggagaagcatccaggtcagcccggccagcaagagaatctgggccacgcacgtccttggaattttctagtagccgttttttatttcatttcatttcattttgaggatctcgttctgtcacccaggctggtgtccagtgacatgattatgactcactgcaccttgacctcccaggcttttaagtgacccttccacctcagcctcccaagtagctggaaccacaggcatgtgccgtcacatgcagctaatttttttgtatattttgcagagacagagtctccctttgttgcccaggctggtcttgaactcctgggctcaagtgatctgcccaccttagcctcccaaagtgctgggattgtaggcgtgagccaccctgcctggccctagtagtcatgttttaaaaagtaaaaagaaagagacaaaatgaataatgcttcatcgagtataccagtatcatcaaaatataatgtcaacacataatcaatagaaaaatggtgagtgatgtggttcacattcttgcttccatgtactgactctttgaaatctggtgtgtgtgacgtgaccccagcccgtcttggctgcaccacaccagccacatttcaggtgcttaacagcccacagagaggtttcagatgagccacctacggcagggagggctgcagctttgacgcggagccatgtcttgtgtgtgaagaaggcccaagggcggcagctggatggtcaccctgttggcacagccactgctgagggtgaaactcggccaaagttattgtgtaatcttagatggccccctgatgaaaggagttcgggtaataagtaacgttaacatcatttcagttaaaatgtacccagcaaatgattgagtttgtactgtgtgccaggcacttgcccaggcttgaaggaaagagtgatgtttgagacagggtacgggctaggcacaaaacaagctggttggttataaaacaaagttcaggggtgagttcagggcccaggagggcacatttccctcagattccaggcaggcagagggatctggtggatgcaaaacttctccttgggattttacatcagaggctgtggtgcttcacttaatttcctctgggtcagggcccaaccgggtctggtacttcattgaccctggtcatctctgagttcaaggtgatgacattaaatctctgttgggaattggtacatagggagcccaagggggctctgacaggaacctcggctccatgagtagtgagggcagctgagaccacccccttcctgtatcttagtagtggggccaccaaagggaaatgccttctttttcctgcattctccactgttccaaggaatgtttatctcccttcaccacacgcctaccacctacagagaccccaagactcctcatgtacccgggattgatcccacccttgtcaaatgtcatcctaaaaacagggaaaagataaaatatttgtcagcatcttctgttgaagagtctgtgagtctgaggcttgggcaggcagaaacagattttaaacacttccgggggctatgaacagaggtccctcaaggaggggaagactgcccccacccctcacctgacaggtacagaagccttggtcaggactaccctgtcccccacccaaggcccagagcaaggagtggcccacccagcttcggtagccactacacaccctttgtgaagtccctcagactctgcccagtgcttcacgccacgctggtttggttgaacagtcagagcggggcattgggttgctgtgtgcagcctgggcgggttcctgggtcatggggagggacggctgcctggccagggccctgtcacagggccatcactgttgctcgcagcaactgggagagattagtgcagctgtcggatgtcagttctctgccccgagatgggcaggggagggtgggctgaggagagaagaatgtgtgagttggttgggactctagaggagaggttgtttgcacttactccttctggcctctggagacagaacaggaaaaatgaagcatgaaatcccttttgagaaggaatgccagtctctccattaaaacacaataatgaggaaggaattcagtatctgaaggaaatggtcaagctgagtggcagcttctcggcaggtatttcgcaggttcttctgatgagggttgcagggagcagggagtgtcagcattaggaaatgctcccagctgagccagcgtccaggcattaaggatgtgtgggtcacataaggagccagggcatctgcaaatagctgtcctctgaacgcacagcctggcagagtggaacgaagccagccggctccgtcccagcctgccgcctggcagctctgtgacctcgggcaagtgctgacttggtttccctatctggaaaatagatttgaaggctgttgtgaggatgaagggagataatccacaatcctcagagtgtaacaaatactaaatgaaatttttcttctgatactattatttagaatgtattttttatataaaattttatataaaattaaaatttttagatattttaaaccttccaacatttacagttataggtgttgtggcactctatggctatcccattccaatggaattgaaaaggagtcaacttccaggtgcgattcacttggcagagaacatgaaagcaatttgtcctttactcttataaacag

SEQ ID NO: 45781 - DNA, 1449 bp, Homo sapiens
acagtgttaaaatctagctgagttccagccagaagcattgagcagcatctggttttggactgcatttaaacaaactgtctacaccttgaatgctggcctcctcctaccccctcagcagattactgtactgtctctactttgtctcaaaacacgtgttctccagtcctcccagtcctcaaaggggcagcaagaagcagatccggtgttcagtgtccaacgaggggtatacctgctggctgctggcaaggagcatgtggcctcagccttttcttgctcccggctcaggttccaggaactgtgtttgatgaggaagctggcagggctgtcatttttcataccccctggcacagtctccacacacacctgcctttcctccttccttccactcctctccagctctctcccagaccatactttcctgctgatgaggacagttcctggttccttacctttctctacctaaacgcgccactccataggagacaagagtgcactgttcctgcctttacccctcgggagcatctcgtgtgtttttaggccacaggtggaggagagggtgccaggaaacacagccagtctgttctagcctctgtcctcattttcttcccccttccctttgctccagttccttgtcccacagtgatgggcttgggactatggggtgtccattccgggcttccctggcttgcttactttctcatgggtgctttgagcgccttttttgagccggctcaggctttccccccacaccctttcctccctgcttctatctggcagtgagggtcagagcttcggtcagtgagtcatccaaacctgggtgtggaaagcacctgggacaccacttgtatttggctccttttagctttcttaaaagacagctttggccgtttgtacccagtcctgtgtacacttctgccaaatacagagagaaaataccaaaagaaagaaacctgcctgcaggggtggaggagcaatggagagaaggctgggctgctcaggctgtcatcttgttacaaaaagaaaagcaactgcaaggttttctatgctagttagaccccacctttctaaccctgattgtctttgaaaaatgaacagaaatgttttcagttctgtttttttttttttttatcttggaggccaaggccccaatctcctcatcaaactattctcactgttcactcttctcttgccccaatgtccttcttcgtttcttgactgttctgggagagtaaacactggctaattttttttgtttgtttttggaggtttttttttttttttttttttttttgagacaagctctcaccctgtcacccaagctagagtgcctgtgtgcaccctggctagagtacagtggcatgatcacagctcactgcagccttgaactcctggctgagttcaagtgatcctcctgcctcagcttcccaagtagctgggactacaagtgca

SEQ ID NO: 45782 - DNA, 1319 bp, Homo sapiens
ttctccacttttgttcaggttgccttgtggagctactcagaagcacacaggccggatttctgggtgtctgattctgccctttccgggtttctaattctgttgtctttgattgttgcatctttattcttaaaagcgcctgaggagatttgtaagcatcatcttaaagggtcttttagctcaggagggaatcaatgtcccctgtctctgattattactcctgatgtgaaattgtggccatgctgtcatgggggcggtgccaggtccacaccttcaggctctgtatgaatggcgccccctggagtcgtgtgacacagccagtgccggttaaggctagtccctccttcccctgggaaaacacgtggcccctctggctggtccccaggtgccaggcccttgctgtgcattcacaggggagtgcgtggccttgggcacctgcactagttcaggcttctatcgacattaatctaacgccagaggcccctgtgatctgtgtttccagggagctgtgtttaattgtggcaatcctagggttatgagacaaaagtactgggccccagctctgaagtcatgttggttaacacacaaaaccttttaccctgtaacattagcaactgggaccttggactccagcaacttgggggaaagggaggaattcagtgatacacaagtgatgcaccaccaacttccgcctcctgaaggcccctgatcccctccctcctcctctcttttcctctccacctcctttttcccttgtgctttctttctccctcacatgcatccgcacaaacccaggacaagttgtagaggagcttctattgcattttgaaacatgatgtttacagcacaaaaggaatccaagtaaaaggagagggtaggcagaccaaagcaggaggggactgtgcctctctcagtggctcacccatctgtgcgtttgggatgggtctaggggcgaggcagggctgccaaaatgtcctcttcacatgcacatctgttgagtggagcacatgatcaaatgcagacatagttacgtattggtcactcatttgcaaccaagcttggagcagggggaacaaagaacctttaatgagaagatctcctgactgttgccacctaggaccacagtgaacttgaacagaggtcactgcaggatgtctcggcaagtcagacaggagttgtcctgggaagtcagaactcactgctcccgttcccctgtgggagggacacagccaccaaggccaggaagggggactggccaccctggctgggggctgtccctgacttcttctcttcatgggcccccaaagatacccaggggttcc

SEQ ID NO: 45783 - DNA, 2002 bp, Homo sapiens
cctctgggtcacacgtcattcttgaagcagtgggcaagtcaaatatccccacccctcctgcacagaaaaggggaggatcccaagaagagaatgtgggggctgcctccaggaggagaagaaagacttgtgggtccactgcagacatccaggtggagatgtctggagcccaggggtcgggtaagagctacagccaggttggggttattgtgggaggagccgtaggagtgaatgagatcaggaaaggtggccggggtagacctaggacctagggacctaggaaagagacagacacgctggggaagaagcgtcagaggacagagggtgagacgcttgaaaaggaagtgggcgagaacagtgttgcctaaaaagagggagcccagttccctgaaggtgagggtgaagacaggccattgggctgagacgatgggcaaagggcagggtgtgggcagagctggtttgggacccagagcagtggaagggcagagcagcccttgccgagaccaagggacagcagggctgaatgaccgcaatgcagcacccgcttcgctttgcaaataaaatgcggactgcgcgagaaagcctggcttttagcgtccatgcgtgtccaggaacagcgaccagggcaagtgcttgagtgcgccaggctgggcgaggcagggagggactgagggctgggtccgggggagaggagtggccagggaggaggggcgacccaaaggcctccggtgatgcgctgacagaaggtaaaaacaaggaacaaagcaaaaccacacacaggacggcagcgcggagtccgggccctgccctctgcagcagcgcagcccggggactctggggctctccctgctgcctgtggaatttccaggccagcgcatctgattggcctggcctggggcagtgggtggggatttggatgtttccagagaagggaagatggcggtgagacagccgctcggcagctccagaggggtcgatcccgcgacaggggaagggggcgtgggcgtcacatggcagcgctgagacttgagtgctggaacagcccagcgaggaaggtcccaaagacagctcttttcaccagagacaggccgtgcgtttgcggtgcgggctccacccgcagttctgcttcaggtagaaaagggatgagggtgccgggccagcttgacccggtttccgcaggggcagaagcacttcttaccttcggcctgcagagcccctcaagcaacagggaaccacattctcctgcccttggaaaaagttgacccgcttcacagtgaagccagagaggcgaggtgggggcggcggggggatttggatgggacttccagacgcctttcttcttcccagtgcctacctagggatggggacgctaggacagctgaagctggcacatatctgatcactgttcctcaagcacctctttgtccatgcaccctccctgcccaacacctccaatggcctctgaggcttggagaatgacatccaagctctgcttcccaaacaggcccaagcccaccctctgcctcccaactcatccgaccatgaccaccatctgtcaccctttgcagccacgccctgtggtgaccacgcccacagacggccctggtgacctcgccgacagatgggcacgaccttgaatggctctgcttttgatagtcacgccccttgtagccatgtcctgtgatggccacacccaccaatgagcatgccctcaggtgaccactctcagacaccctgggatccagctgccctcacacccccggggcatgcctgggcacacctgtcctctctttggccctcccctaaaaagccctccaaatcctaaatccttcttccaaatcctgttctgctgcttcagtctcaccacctccttgaggccccctgtgactaccccagctctctggtgttcactcgcttggttcctacgatacattggagcacatttgcctttttaaaaataagctgagctgtctccacagctagattttcagatcccgaaggatag

SEQ ID NO: 45784 - DNA, 1042 bp, Homo sapiens
cagtctcaggagagccagtgagggcttccttcagtctggctgatgcctcatctctctccaatccatctttttctcagaggcccctgtaccagcatcacccatcagggaactgatcagcaagcaattctgggcccaattccaggccgactgactcagaatttcgggggtggagcccagcagtctgtgtgtggacaagtcctgcaggcaactgtgctgtgtggtgaagtgcaacaattactcatgtgccaggggcaaatcctggcaggcccagcctgcaaatcactgaatgcccccgcacccccgctggctgacagaggcttaccacccgcccccaacacacacactgtcaatctctgaattcccatgtagagcttgttttaaaatgcagcttcctgggtcggctccctgagattctgctggagtaggtatgtgtgtgtgttctgggtggttctgatgcgtgtggctcacaggctgagtgtgcgatgcctctctctgcctgtgactctgtgtgcacgtgtgtgcctctgtcaggtggcaagtgagcactgcgtctccgccctctcctgtgttcgcctcagatgcagcgcacctctgctcctgttgcctcccaggtcccctgtgtccttcttaccttcacctttttccaaaatccccactcccattctcaaaggctcagctcaaagatctcctcctcctgaagcctctcgcccccctccccactcccacccaccacccccaatatgttcttgctgcaagtccataatattagttatgggcccggctagtgtgaagacaggcagcggctgtcttactcagctgtgactccccagagcctggcactcagcaagagattcatacttatttgtaggcctttcaattcagtttatttcagtctaatctgattcagggcaattcaactccactcacgtcagcacaagggaagagcgccccggagcccacaatgggcaccaacacacagacagtggcctcaggcagcccggctggaaggagcccactggtctcacaggcgtaacccgtgttt

SEQ ID NO: 45785 - DNA, 742 bp, Homo sapiens
aaaaaaaaaagaatgtttgttcttaggaggtaaacactggtggatttgggggaaggggaaatagcatatctgcaattcactcccagagagctcagaaaaatatacatatggtgggtgtgtgcatttgtatatggtgaaatgctaaccacgatctgggtgaaggtgaagggcacagggaatttctttatactattttgtaacttttgtgtaagtttgaaggtggcagagagtctgggagagagggcagcctgtgcaggcaggaggtggcaccagtgtggtgtgcacagggaatgagctgctgggctggagtacaaattcacagcaggaccagtgagacagaagggccaaagggcaggcagaggctaatggtggagaactttgtcctgatggttgtggggaacctttagaaggtttccagcaggagagagcaacagggtcagaatgctatttgacaatgaccacagaagcagctcaggtggtgggctggaaggggaccagactggcagctgggagagtggggcagggctctcacagcactgcagccaaaggcgggcaccacgcccacacggggcagcacacgggaaccaagagttgccacacattcctaaggcccagagcagggcagggccgccgaagagctggatataaaagactgttaagaggcaggaggatggagggggtctgcacaaagggagtttcttctggaagcgatggcaccaaccgagacaggaaaaactgcagg

SEQ ID NO: 45786 - DNA, 1967 bp, Homo sapiens
agtaccagcaaacgactcctaaagtaaaaaatcttgttaaacctgcagattaactcattaacagttgtttaattctcccacttggttttctagccattaaacagaagccagtcacttcacttttcatcgcaaaacaactcgtgaatacctgtcactaccgttaagacacacagcttgcttaaacttacagaatgaaagggatgcttagtcagactaattatttcactttacaaattagaaagtcgaagttcacgacaaaacctgtgcaggaagtcaagttgccatatttttatattctgctaagttattttcacacttaattgctgggttaattgttgaaagaataaatctatgtattaaaaacactcgaagtaggccacattttttcagcacaatacgatgtttccacaaacaaaaaattgttccatggaaagacaagaagaggaagaaggcagaagggagacatcccacagggattcttcagtctgcttggcagcaggggcggataacgggggtgacgatggggtagtttttctgaaatcaagcctcctagtaacacatacgggtcaagcagggcgtgaacaaggcagatgaccattgaacaagacactctgatggcttagatgtgtagaaaacaagggttttggcaaatgaatgaagacggactcccggcgtggaagctaaagacacgtcagccctgagcgcgaggggctgggggtggagcggagccggaggtggccaaaagaaacagcccggctgcggcgcgctcggagcgcagccgtgtccagcgcctcctcctgcagccgaggaccctccagttctggccgctcctgcaggcgagggtccagggcaagaggagcaagcccagccctcggccggccacgaagcaaggtcgcccgggcacggccccgcgctccgcgtgcaaggggcaggccgcagcggggtctccagcgcccgcggggacccctgctgctacgagcctaggcttggggagagggcggagagaggccagcggggtggacgcggaccccaggacccggagcggccaccgcctccaacttcaaacttgccatcactggcatctccttcctggccatcccctccgcacactcccccagcctcacctctggggccgcctcggaacaagacagtggcagggaacacgagtaagagaagcagcagcaagcgggggaggagtctcatggcgctgccggtccagtgtccagtttccgtcggctaaggctctcggcggctccggcggtaatggcgttactcttcatccgggctccgggcagcgaggggcgggacacgtaccgcgcacgggcctttgccacgcccctccctggaccagggaccgccgccgacgtggctgctcagcgcggagaggtggggagagcaggccaccgggaagtcacgtggccggctgctgcctctttgtggctcccgcgagagtccgccttccgccgcagttgcgacccggcagcttgcggttagccgttctttccgcccagttctttacttccaattaattagcattgtcagtggttactttatttgaatgacgatcctcttgataacggcgatgtaaggaacatgagctgcctttatgtggcacttaaaagcaaaaaattttgttggaagagaggacattgttcaaaggaaaaaccatgaaaatacacagtggaaaatctttgtcccctgtctgcccacaccctctcccatggttaagtaatgacaattcttaaattattatttttgagacgaagtcttgctctgtcgcccaggccagagttcagtggcaccatctctgttcaccgcaacctccgcctcccgggttcaagcgattctcccgcctcagcctcctaagcagctgggactacaggcgcgcaccactacgcccggctaatttttgtatttttactggagacgggggtttcaccatgttggccagactaatctcaaactcc

SEQ ID NO: 45787 - DNA, 1927 bp, Homo sapiens
cttgtttgtgaacccagcacttccaattacatttctacaactttgttcatccctcatgtggcactgcacaatctgccagtttacctttttaatttaaagttagactattttttccatctttcatttgtccttacaggtttatgttggatttttaacatatttatcaaatgtttgaatagatgttccagagacattctaaagctgttttaagataggagttaaaagaggtgtcacgggagttactcgcaaaaactatagttttgtttaaaagctttttcagttgtaagacaaactttacctttttaaaaagcacttatctcattcatttttcacctcaaaacgagacaccaaactttttaagacacaaaagtgtgctcacttccaggatccatagtttcttggacccacgctacggacctggctctccctccctctgcaccgggttttgtgggagggagaacgctttccaacctcctccaccaaggactctcacaaactcgcaatcgggctcccggagtgctggaacgcccctgtgtgacgtccgcccgcgccgggggaactccgcagagacaggtgcagcccgcgaggcccgagcgaccctactgtgggtgcggtgtcttcccagagagtggtgaagttaggaaggtacgaccccctaggccgaacagcctgtgggctagctggcgcctcctgccgcagtaaacacaaagtggggtacagaaacgaaaactccgggaagaaacggccagcacgggcctcgccgtgccggctactcaacacgccttcctgagagcacagaacatccacagccctatacagcgcgccatccagagagctccggactcccagctcggcgcaggggcgggacttccgctcaagtcagacttccgggcgaggcggtgaggggcttccggttggggtggcagggtggtggatctgtcggtcccgttttcccgtcgcacgtggtggccactgttggcttctgaatggtttgcaaggcggatatccacgccaaggcctttggatcggccgtgggtacatccgtctgagccgttcctttccatcgcagagcggcggcctccggcggcgctctccagtcatggactaccggcggcttctcatgagccgggtggtccccgggcaattcgacgacgcggactcctctgacaggtaggcggccgtacagtgccctggctctgggtacggctctctccttgaccgcccccttggggtgtggactcttgtttgcggtttagagggagactagtggttcatcactcagcgtctctcttgacaaccctttgcctgtttctgcatcccagctgggtttttctcccagttcacgcggcagagttaagtgaaagctacttgtcaagggagtctgcggttctcaggtcggttagcgtcactgggaggcagagttggggatagcgattaggaaacatgggtttttgcgttttaaccacatttagcgttcaacaaatacttactaagcacttaatatgtaccacgttctgtcctgggcgccggaggtaacaagaagaaccaacttcctgctgtcatggaactttaccttctacgtgaaagagagggcacaccatttaaaaaccaaataatgatgtagactatgcaaatcgtttgatataccaagtggtgactgaatgggtagggaaaggttaagtccagatttgaatgacaaggagctaatcctggcaagagcagagggaacagcatttcacacagaagggacagcaagagcaaaggccccgaggccagagtgcctagagcacagtggaggtagttgagaagattggtagggtgatagagaagtaagaaggggggccagatcatggagacctttacaagtgatggtgaaaagttcagatattaatgtgggtcttatggaaagccataggagggattttag

SEQ ID NO: 45788 - DNA, 560 bp, Homo sapiens
aaagacaagctatggactaggagaagacatctgtttggtttttatatctatattcattgatttatcctgtctggaaacaaagtttctggatcagaaaacagaccaattatttgctcgaatagcagtctgattgccaactccccatccctcagtttcccacagggcagcacagtgtgacccagatgtaccctgcagatacaggcctctgtgccacaggcaagagcttggaaatgatgcatctcagagcacagccagatgctgctggcatgtctgggcctctcactcactctggaggcggagggaaagacctttgatctccaaggcaaacacaaatccattccggagaaaggagaggaaggtctctggggttttacaatcctttggaatgcaagcaaatggttctggggaaaaggaggcattcgttatctttttagcatgtcactctctgtttctcagaaaggtccagaagtttcaggaacactgagaactccagggaggatggcgttccaacaagaactacaacatatataaccaaaaaggattaatatatgattaattag

SEQ ID NO: 45789 - DNA, 1128 bp, Homo sapiens
tctatgattgcaacactgggtgattctttaaattgccaggatacaccccaaacctaattaacagcattcgcttgctgcctccgtgcactggcatcctaatgaaagctggctttggtccagattcggagccagatgccgtggaagcagaagctgctctgacgctgtcgtggctgtgagttggggaactcgggccttgaaactcactcaatcaagagctgctcctgccttcccttcttttggtcaggtggggatgattcattcctgtgttatttcagccactgtttcccagggtgcctggaagcagagaaggcctgagagcttgaagcagacagaggaaaaacagggagaaggaggagaaagggacccgccttgggtagggcccctgctgagtcgtgggcaggtgtgagtcattcctctctgcttcagcagccacaccttttgtcaagttctgaatgccaggtggagaatctgcctagaccaagcgcccttgatcaagtcagaacaggtttcctgaaagatcattcccattaaaattaatggaatcagaataggctgatcttttctgtaatgtgacgtgtttcttttcaacatgtttcctaaatgcttagagagaccccctaaaagtatagaagagggagaaaagaggaagaagtgtgctttcacatccccagggctcgggactagagagagaaggtagttttatattatccattcctgccttcccaaccaaccaccttaccagcttaccaaagaactgaccagcaaggacagtgaagagtgtaatgagcatgaatcctcatgagctgccatattatgatcaagatctttccattgagtgtgtgtgttgctattgaattaagaagaaaaggtctagaagggaaagacttggcatataactaatttcaaagtcttagggacacactttacagccataaggttggcaactattgaaaacagaaacaactcctctctctggtccgtgtcttcaagatgatgaagaaaagaaggaacaataattgtgccaaaaagagccgcggccacgtatagcctattcgctgcacaaactgtgccctatgtgtgcccaaggacaaacccattaagaaattcgtctctcgaaacatagtggag

SEQ ID NO: 45790 - DNA, 3653 bp, Homo sapiens
gacaagcatcctcaaggttctggtacaaaatttggaaaatggacctggcgttgaaatctttactcctcgtttaaaaagaccatcgaaagggaaaaaataaaagaaattgcagtttatatttttgttatcccatgaaaaattagctgcagtgttttcctcttcatgccaaagagattaatatttacggtgaagacttttccaggaagtcgtggttttctgtaaaaaaaggttttacacatcagaaatcggacttctggggcaatttcctgaattcctggaataaaacaaaacaaaaaaaagcccccaaacaaaactctatcatctaaagcgttccctcctcactgtggtcctagtcaatgcgtggtaggtagcgtttccagtgatcaacaaaagtaaatatttgaccagtaagtctccaatcgagaggcccctccattccagctatttccgcccggggaccgaggaaatcctcaaaagccgggccacgcattcccagcccgagaggccccagcgcagagcgcagcagcccccgcgagcgcaggtcctccccgcggtggcttcgcccagggcgcttgggtctcggggaccccgcccccgccccgcccggtgttactcaggcctcggtggcgcagggcggagtcgcgggcggcgggcgcaggtggggaggggcggccggagcgcgtcggtgacacccgcgggggggcggggaaggcgcggcggccgcaccccaccctgggaagaaaccggccaggtgtggcctaggcgcccagtgccagcggggaggagactcgctccgccgccgaccaacaccaacacccagctccgacgcagctcctctgcgcccttgccgccctccgagccacagctttcctcccgctcctgcccccggcccgtcgccgtctccgcgctcgcagcggcctcgggagggcccaggtagcgagcagcgacctcgcgagccttccgcactcccgcccggttccccggccgtccgcctatccttggccccctccgctttctccgcgccggcccgcctcgcttatgcctcggcgctgagccgctctcccgattgcccgccgacatgagctgcaacggaggctcccacccgcggatcaacactctgggccgcatgatccgcgccgagtctggcccggacctgcgctacgaggtgaccagcggcggcgggggcaccagcaggatgtactattctcggcgcggcgtgatcaccgaccagaactcggacggctactggtgggtacctgcccggagagcgcgggctgcggggctcgcgggacagggagggaccgtcctcctctggacgactgggagactcgggtcccgaaggtggaaaggtttttttgccccaggtcccgaaagaacttcccggccgcgctgggagcaggaccgggtgtcctgacgcgtgcggggacaggttggcccctgtcctgcgaacagggactcggtcgtacctttctcccctcccgcgagcccgggcgggtggtcagagggggcgtcgggcccgcgcggggctgtcccctgcctgctggacacggctgcagccgcctttgtcccagcccgcgaatgggaggtcaggcgaggtggggctgcgaccacaaaacccaacctctccaaccgtaatcaaagtaaaagaggaaaggagcggggccccggtcctgtctggtggccgagtggtgctcggggctccgcagtctctaccggctcacccccaatccccagtaaccccgagaccacgactgcaacgactcctggactcctcggccacccaaggacgtttgtatcaaggctgcgcgtcccggcggcgcggggtcctgtcccgaggaggcgcttcggcttcccctgtccgggaaacgaaacttccccgccggggcggctgccgggcccgggtctcgaagttcggccgggacgtgcctgttaccttcggtcgtccgcgccgcagcccccgcgggcgagcgcacctggggccctgcctctgagccttttgtttcctcctttttaaaaacaccggatgaaagaccccagtgtgccttggatcgcagagcgccggccgcatgtctgctttgatccagaatgtgtgggcaggggagtgggggggtgggagaggacgacgctgggggcccgccctggcctaggcgccccgggaagaccccccggtgagagggtcagcttctccggatcccagcggaaacagaccgagggcgtcatttgggtgggtggggaagagatcctgtccctgctttgaccgggtctcgggagctggactctagatgcccacgtgagccgtgcgcgttttgcagcccgccccacctccccgccccctgctagttgttcccacgtcgggcttttgggaaagaggccctgagcgccgggacgttatttaccaggcgttgtggccctaggcctgggaggagcaacctgaatgcgctccagggagttttgttttgcaagcagttttgaaggcagggactactcgagttgcaacctgttttctgcttagattcatttatttatttatggggcatcctgaaaatctattttcgcttttttttttttttttttttttgagttagcaaagaattgtctcaatcttggagttctttgtttcctgaacaaaatgtgtctggggatttccagggaaaatgtgccaagcaatagaaggaatgaaaacttgggttttcattacatttgttttaaaattttgccagccatttaaatctgaaatttaaattttctcccgcagtcctccaggatttgagatgcacatcctttaaatgtgtgggttacacacagtttaaatccaagtcagaatagaatgcgaaggactctttagtagctctttttggcgttttcatgaaccaagtatttattttgattattatttataactatgcttttgctagcttggatttcttatcttttaaatagacaataatcagtactattaatcgaatatttcactcccttggcttcttataccttttgtaggggagtaaaactttaataaattaagtggttaatgaactgcatcaaggtacatgttttattaggattccccattgaaacatttaattttgggcaggctccatgttttttccttgtgtagtatcatcccgtgctctgtttttccaacttaaagcctacttacaaacttgtcaagtctcacatctctctgggaaggggaaagagacccaagtgaaaaattacctgactttgaggaaggatgttttttcttctcattaatgttgctctgcccggcagcagggcgtcaagctcagggcttgagtcgggaggcggtcattctttccggggatcctggcaatggaggttcctctcgagcctgacccagcctgcagtggtgctactgactacaaaatagcccacaaatgctgacttctgcgttttcaaataatagcgaccgcctgaaggcagggcatgtcgcagtttttctggtggcattctggttttgtgtggagggatatgtttggctgtggcgtgcactttgtagaagcagggtgccctctgtgcccaagggagccactgctctctgctaagtgaatgatgattaagaatttcataagtatttttctgacccgaaggttttctaaataaaggtttttgtggttttcttttctttcttt

SEQ ID NO: 45791 - DNA, 855 bp, Homo sapiens
ctccgcaagtaagagctatcactaagtgaggtctccgcctctgcagtgcccctctgagcctcacctcagccccaggaggggggtgttctacctgtcacagaggcagaagctccaggcactgccagtggatgtcactttaagttgctcaaggtcacaggctgtataactggaagtggctgagctgggcgtggactccaactgtgccctacttcaaagtccttctgaagttaatgatatgtgatcagttttccactatcccacaaacacaatctgccaaacacacagtgtgaaaatcgagaaaaccgcctggaaaagaagcagaacttttattagagtactgtttctgtagctgctgggcgaagacaaaatgcaggatcaaaggaggctgtctttctaaaatctatagagacaaaaaatccaccatgtttgctcactgctggagtgggaatggggaggggagagctgtgctctctggttgagcttttgaaatcagggtaatgagatgagccataataccctcagatgggtcttttgtttgcctttgtttttcttccactttactaagccaaacaaacattcattaagtaccttctgtgtgccgaaccttatttatgttgttaggttaagtgtttgtaggagtccaagatgactaagacatgggactttgctctccaggagcaggtagccaggtgtgtttaaactaatgcaagagaggagaggatgcagaggtgtgatatggaaaactccttgcagaaggctgtaacttttgaagttctgaacttttgaaggatggctaacacagcatttcagctgatgtatatagagagtgtttaatgaattttttttttttttgag

SEQ ID NO: 45792 - DNA, 905 bp, Homo sapiens
aggcgtgtgccttcatgcccagctgttttgtttttgtttttttttctgtagagatggggtttcgccatgttgcccaggctgatcttaaactcctgggttcaagcaatccggcggcctctgcctcccaaagtgctgggattacaggcatgagccacggcacccaaccttgtcttgtatttttaaaaataatatttttggcaacacatgtaaagctaatgccttaggacagctagttttggagtcctatttttaaagaaaaatgtttttttaaaggtagtaaaataaaaccttgaaatcttggtaatattgttcacatattcatgtggtccgtctttggattagaatccagaacttgttttctttttaaccaccgatgaagggctctctatgcaaatatttggaatccttacttgtttaaacaagttttaggatgaacttaaaaaaaaagtatgtgcaggtaggttctttgtaatatgactcatttatctctcagaagagttaaaaacttttaaggatgagttatttttttcaagggcacctattaattttggtttggaagtcaatattcttttgataaatttgacccaaatgagttgttttctttttctttttttttttttaaaaaagcacatgacatctgccatcttctgtgccactgaaatgggatttaaaaatcgaacttcatggcttgttaatttaattcctaacatgatttgaaaatctttcaacccctaacacccatatgtagcagtattaaaaatttctttgagggtagggatttaaaaaaatgtgtatacgcttgtaagtacatcattttaaaattatttctttatccattatagaattttgcattttcccaaactgcactatatgaattaaatttaattcaattagcatgaataaat

SEQ ID NO: 45793 - DNA, 1230 bp, Homo sapiens
ttatgtcattttcttttttttttttttgagagggagtctcactctgttgcccaggcaggagtgcagtggcatgatctcgtctcactgcaacctctatctcccgggttcaagcaattctcctgcttcagcctgccgagtatctgggactacaggcgtgtgccaccatggcaagctgattttttgcatttttagtagagacgggggttttgccatattggtcaggctgatctcgaactcctgaccttgtgatccgcccgccttggcctcccaaagtattgggtttacaggtgtgagccaccacgcccagccagttttatgtcgttttctaacagaagcaattgataagcgatgctttccgggttaggcacgcagccctcatggttgcaaacaaactaaaagctgtttgattgcttactgcaggttcgctctgggatttgctgtggctcctttcctcttatcgcttgttcccctgcatgctttacctcattcccaggagactgagctgcagggcccagctgataagggaactgttgccccagcagccagtcaggaggcaggcactcctgagccaggtttttgttttgttttcccgatttgtgtttgccgatggacaggtcagatacgatacacctggctggtaatgagacgcctgagctggagcctggtcacgttgctaatgtcccactgcacgcacctggctgtctctggtttaaagccgagacagctgtgggagagaagggtcaaagtcccgggtaaccttctgttgtctgactctgaaatggctcccctttctgaagccttgccaagtgtattagaacatggatgtggcttagaacaatgtgttttatgttcttgctgcaatcccagattggaatgtttgcccttggcatgtccaagagatgacacaggtgatttggaaatttacatgtactcatgcaaaagaagggtgagataatggacttgccccagtgtggaactggcggaacagtgtgtgtgattcttattgtgaaacattcttaaatttgaggctcaaataataaatttagtcagatttaattttttaaaaaaggtaacttaagtccacaatcctaatattgccaacactcatggaaattgaatccttgagtagatatagtgacttccctttgaagtggcccatagggagttttgcatcctaaaagggaatggtatatcctggattttaaaaagccaataattacatccatcaag

SEQ ID NO: 45794 - DNA, 889 bp, Homo sapiens
gcagctggagcaggcatccattgttaagaagaggagtgaggatgacctccggcagcagagggacgtgctggatggccacctgagggaaaagcagaggacccaggaagagctgaggaggctctcttctgaggtcgaggccctgaggcggcagttactccaggaacaggaaagtgtcaaacaagctcacttgaggaatgagcatttccagaaggcgatagaagataaaagcagaagcttaaatgaaagcaaaatagaaattgagaggctgcagtctctcacagagaacctgaccaaggagcacttgatgttagaagaagaactgcggaacctgaggctggagtacgatgacctgaggagaggacgaagcgaagcggacagtgataaaaatgcaaccatcttggaactaaggagccagctgcagatcagcaacaaccggaccctggaactgcaggggctgattaatgatttacagagagagagggaaaatttgagacaggaaattgagaaattccaaaagcaggctttagaggtattcacaaatacttgatcacagcttcactgtttctcaaattattcatcacattattatctcatctgaactgtgctctttctgcttaaatagatgcttatagaaaatctaatttttctttttattgctctactacttcctgtcataatccaggtaactgctttaaaataatttcaatgctgtgtgccctgctgttctttaattgcatcaaatgctgatctctgggtagcctgtgtttggccctgcttttaagaacactaatacatgtataacttcctccgaatgttccattctacttcttagaagttagctcttatttagtgagctatgacatacatttgtaatgaaaattttcttaaa

SEQ ID NO: 45795 - DNA, 1098 bp, Homo sapiens
gaacatgcatgctaacatatttgggggtgaaaaatctgcaacttactttcaaagaattcagcaaaaatcattgggtggggctgtgaatgtggagagaagagacggagagaaatcaaacctggcaaaatgttaacaatgagctgaaggacggctaaacgaaagctcattgtactatttttaaaacttttctgtagctataagccgttttttctgaggaagtcgaggagggcgaatatctttctggaaaggccagagcaaatgcacgcaagagctgagaaaagattggaaaacgcctctcaaaataacagtcccgcccttcccgggactcttccctataggctgttcaagtcacgtggcgactgtggccccgcccacagctcccagaggcctgcgcgtgcggtctgcagttcggccgcttcctcttggcgggtgggctgcagctatggagggcgagcctccacctgtggaggagcggcggcggctgcaggaggagctgaacgagttcgtggagagcggctgccggacgttggaggaggtgaccgcgtccctgggctgggacctagatagtctggatcccggggaagaggaggcggcggaggtgaggagcgcggccgcggggccctttcggggactatcggcccggggtcttctctggaagaagggagatccgcactggcagccgcggagggaagggcgaggagtcctcgtccgtgtgcagagccgcgatgggcgcctgggacccgaggggcgccgggggccctggagcaaccctgacgtccctgggttccgggctggggcgcgcgaggaactcccgaaggctccacatcgacctccagtgcggcgctcctcccgcgcaacttcgagtttaaagaaaaccgggggccgggcgcggtggcgcacgcctgtaatcctagcactttgagaggccaaggcgggaggatcccttgagcccaggagttccagactagcctgggcaacatggtgaaacctcttctctaccaaaagtacaaaaattagccgggtgtggtggtgtgagcctgtggccccagctatttgggaggctggggtggaaggatagcttgagcccaggaggtcgag

SEQ ID NO: 45796 - DNA, 1972 bp, Homo sapiens
taattttatatttttagtagagacgaggtttcaccatgttggcaaggctggtcttgaaatcctgaccccaggtgatccgccagtctcggcctcccacagcgctgggattacaggcataaaccactgtgccaggccccttacgttctattaaagtgtgttgttcccctttattggaacctttatcccaattgttttgtcaacacaaaattggagtgtttatcccaattgttttatcaaacttattttgtgattctttgattcacgtcagtctttcctactaaatcccctgccacaagggcaagcactgtgtctggtgccactgactactgtcatcctataggatgataggcatttaatcaatatttgtccaataagtgacaaaatgacaaaatgaacaaatgacaaaaatgaatgaaagatcgattagggcaaaccaaaccctcgttgagagattacaaaacaaaaaattacttgaatatacaagtcatttatttagagaaaaatagggttatcaccatgatacctaaattagtcatagaacacacagagttttctggtggggaggggagaatcccataaccaagcagcctcacatacaagatgatagatggctattatgtattttttccttctctgtatttttcttcacggaagcaaatggaactttccaaatatcactgtaggattggaaaaagtgaagcagtccgtagtgccattttgggggaaggagggggaagaaggggaaaggagtctgaaaagcgtttatgtttgctaatggaagtcagatgtagtactcattttatgttacttaagcaacgtgctacattttctccattagtggtcttgtcaggcataggatgtttacaggaagttgcactaagataagtgtgtcctttaaattctgtatctttcagaccttagcagtctgctgactccagctttcagcagagcagaaacaacgccttgggaagacttaaaacaactttgaataagaacctgcttgagaaagatttgccttacaagctaaatgttacatttccactcaacagaaaggtactgctgtgtggccgtaaaaagctggccaaaaccctgtaacctttgcagttagtcatgttatttttggttcatgccaacatggatcacagctgtgactcaacagagccactgaagcaagaattcaaagagtttaaagaacagcaaactcagaaatgactttttttttcttatggtgtcattacgcaacatttcttgtcgtttaccttttctaatttaccaactccatacagatgagctcagtcgttgtttggcaattgaaaatctgagttgcgtcagcacacttccccaaatcccactgcaggcggaggatgatgaagctttcctttctggggtgtttgttttacgtaagtagtgacttacttttcagaggtaaaaaaaaaaaaaaaatctgtgttgatatatgtctccctcaaaccaaaaataggactggggattgatttaaacgtttgcagttccccatttgaagatgacagaaagcccatatcgactggttctgcctttgtttttgtttttcactaatttatattcacaaaatgaagccataagcttagacctcaccgaatggaaaacaggcatggacttcagcaggcaatatattagcatatttatcaacatcctttagatttttgctttcattttttaaattaccatgtaaacttgaagataaccccagttttcccatttgtgggaacataagaaagggagatgaaaaaaaataatatttgtcccttatctatgaagtgcttttattttttaaattttttttattacctgaagaactacattatcgtcaatatgaagtgctgtttttttaagcattatgattagacttaaggattctaaggactaaagtattaaggtgttttttgttgttatttgctaatcattaatcaactgttttacctgattaattttc

SEQ ID NO: 45797 - DNA, 1131 bp, Homo sapiens
gcaaaaatgggtgtattagtctgttctcacatggctataaggagatacctgaacctggataatttataaagaaaaaaggtttaattggctcacagttttgtaggctgtacaggaagcatggctgaggaggcctcaggaaacttacaatcatggtggacggtgaaggggaagcaggcttatcttatatggacagagaaggaggaagagagtgaagtgggaggtgctacccacttttaaaccaccagatcttctgagaactcactgtcacgagaagagcaaattgggaaatctgcccctttgatccagtcatctcccacgaggcccctcctccaacactggggatttcagctcaacatgagatttgggcagggatgaaaatccaaaccctaacaatgggcaaaaccaatttagactgttacaagtcaggatggtggctgttcttgggatgggttcccggaattgctggaactgggtgtgaggggctggtcatgtttcttgatctaggttctggttacatatgtgtgttcagtttgtgaaagtttatcaaattgtgcattactacctatgtagttttctgaatatatattatacttcaataaaatgttttaaaaatatgtatatcatatatcatttcatcttagaaacagaacacgttaataagtgactagtttttggaagaaattattatagcataagttttaaaaaaagatgttggggtggggtttttaactttccataatgctgtaaagtttgcaacactcacacagtcatagaacaaatagaactttgactttggtttcaaaatttatgcagctgcctccatatacttttgacagtttaatcacatatttaacagttacaaagcatgttttagacatcaagaggatacatggagatggtggtagggcttatatacccatggtcgtgtaaaacaggaaaaatgtcagcaaaaataaactattatgctggtctattgagtgactttgtcagctttataaaggaatgaatatatagtgttgaaggataatctttctgaattagtaagttattttttaaaaagcacatctaaatcaataccttattttagaagaaatgtaatgttaggcatactaacatgtataaaacatagtt

SEQ ID NO: 45798 - DNA, 722 bp, Homo sapiens
gttataagcaaagcccattagagactcggggactgagcaccgagaagaaaaggaaggatccaccctacgggtacagctgtcgggctaggcccgagccagagggctgcaggtggtggagggcaaaggtcggggggatgggaggaggctccagtgctggcttggataggagattctaggctgggcccagccctgaccccaggtggtccagagtcagtctctgatgctggggtacagttgtgaactgtattacctgtgacagtggcagggtggcagtgttaacaaagagtaagtgcttatctgtgaggccacacaagtgacttccctgaagactgactacagccaaacaaggcgcagggtggtggggaagacaaacaccaaaatggtggtaactgctgaaactcagggtttagccttctcttgacttttgtgcacatttaggtatttccacaccaaaaagtttctgtaaaagttcatctttacctgtaataccaataagctccaaaaaaagtagagttgctttaaaatggcagccttaatcattaacctcaactggcctctgccccgttacatattaccccaaagatgtaggcagggagagagggagggagggagggagggagggaaggaggtagacactcaccactggctcctcgttcagtgtctgcagcatccagttttccagtgtctggaagtcccgaggaccctggtacttcacagcttct

SEQ ID NO: 45799 - DNA, 2615 bp, Homo sapiens
tcgagtcagttggttcttaggaatgtgaaacataatgtacttcatatacacattgttaataaacccacagtggccctaaaagttgatttaactccaaatgaactgaaacgcagtaatagcctgaatacaaggttaagagaaaaacgtttctcccagtttgaaaggtacaatttctgaactggccatttttcttagggtaccttttctctatgcctccctacatccctttcccaagtgagcctctactgagctctggggaagaataccaagttctgcaacaagaacctgcaggctattccaacctctcaaaggtcttgtgtcctaaaattatggctttctgctctggcctgtggtcacttcccttcctcggggcatcccggcactggcaggaaagctgtgcacatgcttgtgtgaatgacaggaagctcttccgtgggatgagtgccagggtagggtctctcaggtcagcagcgaggcccacaccaaagcctcgcccagagaaccaaagcaagagggaccatctgctcaacggaggggcttttccgatctcacacataacaagtgacctggacccgagagagcagcagggaggtgacaggacagcctggagttgaggaccagtgggctccgttcagagattacatccaccctgagctgcaggggggcggaggggttccagaattcgcactaccttggtcttcccggggtagctcagcaaccctcctctgcccggaccactccttcctatcccacaaaagacgcacaaagtgggaaaccacaccttcctgggttctatttttcagttaaagcctctggaaggggacgtgcccgcagtctgtcccagccgaccccggtggccgcggcagcagcaaggccgctctggtgagtgcacgtggcccacgggcaggccgcgcgtccggccggcacaggaagtttggggcgctgggcagggaccgcggggtgacatttggactcccggctgcccgaaagggcgacgaccccaccttcccctccctcggtgccgaggtgcaagaggcggttgaattcaggagcgcggcgcagggcgggcttttcccggctgtcccctaggggtccgccccctcctcccgcaccgccccggccgccgagcgccacgtcagccgccagtgcccggcccgctgagctcacgcctcccgacccggagccccaagccctcggtcccctgcagtccccggctcccggccccgagccgcggcgcccgcgccccccgctccccgccagccggagccccgaacccgcagggtccccgcgctcccggccccgcgcccccagtattacaccccgcacccctgagccccgagccccgcgcccgtagcacgcacgccgcagaccagagccgtcggcgtccacgtggccccgggaccccccgcccgcggcgcccaagcgccccacgccccgcgaagcgccaagtgcggggcagggcgccggcctgcgcggcgttaccagggcgcgaagaacatgacgaagtgcgcggcgctctggatcccgtgcgtgaacatgtcggccgtgtacaggtgcttgctgtgcgggtcctgtccgtcctcgccgtctgccgcggggggcccgtccgccgccgccgccgccgcctcctgggcccgggcgccccagcgcccgccgccgccatggcccagcagcagcagcagcagcgcagtcagggccgccggccgggccagcagcgggaggaggcgtcctgggcgcgcgggcatcgcggcggggctgggcgcgctctcgccgcggcctccggtcccctcgcagcgcccgccccgcgccccgccccggagaggccgcgccccttcctctccccgcccgcccgcgccggcgcgcgaccgctacccgcccgagccccggctccgcgcaccggcagggaagggctggagcgagggaccgagtctgggagagccttccgagtccggcctcctgccttcccgccatgggacggctcgccccaatcccgcgaggctcctgcgcctccgcaacccaggcccgcacccctttccccaggggcccgctctgctcagagcggcggtgaacacacgaagtaacgatgaggccagcgggaagccacggaggggcaggtcagcctcggctaatctcagctcacacaagcaccccgcgatttcaggccaaaggaaggagagagctgctgtcagcagaatataggaaatcgggcaaaagacggtggggtttgcacctgaattagttagattcttggccagagctcaactgtgattctcgacctgggctcagaggggtgatgaaacccgcttcccaagtgaaccccttgctggttacccctgcccggcctcaactcagggatgaagaggaaagaaagtcaaagcggcctcttctagacaagaaggcacctagcaggactgactggggtcctactgtgccctcatttatgccggttactaaaatgaatgacagcacgcctgctatggctgaactcagcctgtggaatggcccgaaggcatccctgcccagcgactcataactcgcacctgcacacacaccttacagcagatggtaatcgaaagctccagccctaccccggggatctgaagctaaattagaat

SEQ ID NO: 45800 - DNA, 1068 bp, Homo sapiens
tggaaagtgagcaaactcttcaagatgagttgattgcattagtctttttaaaaaagttaagtactcttaagacgacggcaaggagtggggggaaaagttaagtactctttacgtgacccaggagtaaacgagatccttttggcaaacctcagaatgttggatggtgttgacggcatggactgggcaaccgggaaaccatgtgctaactggctgcttcatccctttttccttttctgcgtctgccaggtggggccctgagttcggagcacgtctggctctctgcggcatcctgcctgttatctctgtctggcaaacaaccactccgtgctcccagaacttcggagccttccagggcactggggatgagtcattctcagctcactgtgccaaaggtctttttggccgagggactgaggaagaccattgttgtggctggctgttatctctcgagccgactccacttggcagaggcacaagtccatctctctggtgtggaacaaggcgctgggctctagatgagtcaacacgctaataaacaagaggcatggaggaaatagcagccagtcttgaaaacaaaaaaaaagaaacattttgaagtgtactggatgccgagatgtttgtcctccatggtgcaatcctgctttatctcactccacagccttcctatcaaagaaatggggaagttaatagtttatcaaatgtgaatcggctgtagtgtttatgcataacttacatagcacggaaagtattttttggtgctgggggtactgttttctttcattgcaaatttatatctttgtcattcatctccctttttgtcagactacatattttaggaagtcttctgtctaccaagaggtttattgtctcctgaacttatccccatgccatcagggaaaccaccccgacggtggctcggcagttcccggagtgagataaaaaacagcaagctttcccctaatgtagacagagaagcaggatggaaaccctgctctggggaaggtcctgtctctgaagcagaagaccagggcagagggagagcatgctgtaccacacatgtgttccctg

SEQ ID NO: 45801 - DNA, 1686 bp, Homo sapiens
tttttcttttttaaaaattttttgtagagacaggctctcactttgttgtccaggctggcctcaaactcctgagctcaagcaatactcccaccctggactcctgaagtcctggaattacacgcatgagccaccatgcttgatctcaacatatattaatatctttaaaacaagagacttgccttaaacaaacaataagaccacctctctctctctctctctcacacacacacacacacacacacacacacacacacacacagtcaacagtaattttttttttttttgagacaaggtctggctctgttttctaggctggagtgcagtggcacaatcttggctcactgcaacctctgcctccctggctcaagcaatcctcctacctcagccttccaagtagctggggctacaggcgcacattatgacacttggctaatttttgtattttttatagagacagggttgtcccatctctctataaaagacatttgttgaccacgcctggccaacaattttttaatatcaaagtagtgttcacattccctcaaatgtcctataaatgttttttatcccccagtttgtttgaaccacaacctaaacgagttttatatactgcaattgattaatatgtttcttaagtcctttttaaccaatagatttcccctttcacttttttcccttgcaatttgttggaaaaaagtgagtcatttgttctgcacagtttcccacagtctgttgtttgctgaatgaatccccatggtgtaatttaacatactcctttgtctgttctctttcctgtaaattagtcgttagaactaaagccctgatcaaattcagggttctgttttttgtttgcaagaatttttcagacatgggttgtatactctcaacagcatcttggtagcattctgtctttgtttactagcagaaatactctatgaggagaaactgcccccaacaacaacttggttactctgagtaatgttcacatacaaaaggcaagacagaacacttgattctttctcccgtatttaccagtttcaaaaataatgagttggctccctagtatccactaaaggtgattagaaaggttttttgtttgtttgtacatatccctatgactcatagatttagagatatttgaagtttttcaatccattgcagtatttctcataggacaaacgcaaggccttttgcaccagataattggtactcagattatcccagctttgtccagtgggagcctattcaagctggctctggaatgcttcagacaaaactctagtattttgtagtagctcatttgctttctggcatgatctgatgctccaggttcatcctctccatctcctgctctggacttggaatgagcaggtgtctaacctcccactgggatgtagaaatggaattcggagactgagcactaaggctgctcacttttattgggttggtcattgtttctaacttttcagcggagaaggctaggaaatatgtatttttttaaaaaatagatatatcttgagttcatactgatagtcaaacttaaattaaagaccacagaatttctaattaccctcttctgtcttatctgtttctttccagttatcaaaacaccaacataattgtttgttttatcgctgattcagtcaagtcataataccaatactagcatcaacaaaatgattacta

SEQ ID NO: 45802 - DNA, 2325 bp, Homo sapiens
agtctgaaaaagtcattaagaaaaggtctgaatttaagtcttttggtgagtcagtttattattcttcttagttacaactatgtagtttaaaatgtaagtctcaaaattccttgagaaattaaatctaagacaatgtattattcatattcattcactggcaatgttccccaaatttttcatttttgcagacatacgatgggcaggtttcaattctctattttaatgaattttattagtacatatcttcttaagcatgtcaagtagaaaaaataatacaagcactgtatataagcactttatatctggtatatataaagcactacaactcaactgtcaaagactttcacgcagcaaacagcgttgtgagctttaggagtcaaacctaaagcagattctgtgagaatctaggttgtaaccttctcccagctcaaagcacacagaacacatggacatttctgaacgtgaatggttctttacagtgctatagagcgccttcgtaagtgtatctcacttactcctcgcacgaccaggaacagatcgggtaggagagtgagtaaagccagtgacccgaagtcactcaactcctaagcgactgcctcccgcctcccaggtccaatgccctttccactacacgtcggtggcgaggctgcccaaaggctctgcgcccaggggtcctgagcttgcggaatggacgggggcgggcctgatggctcaggctgcgacagaggaaagcggggaaacacgaagagttgggctggttggttgtggtgggacgcatttggcgcggggaaaaaggcggggaccgaccacgactcccccacccgcacaaacgcacgcgcgccagcccgggacccgggggtcggcccgggtcagagggcgccgcctgggagatgaggctgtgctgggatccaccaggaactatagccctgacactccgtacccttgataatgaggtgcgctgagcccgcagtccccagggagtccctcttcttgctgccaccgcccggggcggcctcacaacccacaggggtctctgtccctccgccactcatcccgaccagttccgcccacccgcggccacgctgcgcctgcgcaaacccggccgccctcttacaaggcgcgcccgggttttttttgtgtgtgtgtcattacagggcgccggagaaatttaatctacccagcgggcggttccggaaaggcgcctgccgtgtagtcaggctgtgaactggcagaagctcttgccgccatgctggatcagggcggatgctgctagaataggaaggtgcttgaactttggagctaaactcagagccctggttatttggctcaaagctggtgcattccagtacagttgtcctcccatatctgctgagaatacattccaagacccccagtagattcctgaaactgcatatagtactgaaccatgtatatactatgttttttcctgtatatacatatgataaagtttataaattaggcacagtaagagatgaacaattagaacaatttaataaaagttatgtgaatgtagtctctctcccaaaatatcttattgtaccgtcctgcgggtaatgaaaccacagaaagtgaaacctcagataaggggggactactgtatagcaaagccaattagctgggggctgtttccctactatgccatgagtgtggctgactattcctgcctttctttttagacacctgtttcctagaatgcttctcttgctccctctttctgttcaagtcagtaaactcacgttgtataataaagaatttgactggactttgactctggttcctgggaggtaccctcaatccttagaatttcccaagtgatagaagtgtctttgttattcatggtgggcctctggaaatacacctgagtttatgctaatgagatggctcatggagggcccaagatgatttcagaatggaggctggccacaccagaagggccggccaaccatgagggcttaggctttgagtcacataagcaggcccacctctggggagcagattggggctggagactgagttcagccatgtggccagtgatttaaccaactatgcctacataatggaaccccagtgagtactctggatgtggaagctcaggtgagcttactggtcgataatcattcatcaaagtgtcaggagggggaagcgttcctgaggacacgtaagcttctatttgggaaatctcccacatctcgccctatacatctcttcatttggctggtcctgatatgtgtcctttataataaaactgtaatagcaaggaaagcactttcttgagttctatgagtcattctgtgaaacctgagg

SEQ ID NO: 45803 - DNA, 1677 bp, Homo sapiens
ttcagctaaagaacaaataaaacattcagacacaagtttacacttcaaaaattctatcaacttcaacaaataatgaatgactgtatattaatttacattagtcctgtggtctagagtacattttccatttaaaacatttttaatagatcttctgtatggcatggacagcttctagtgggaattagtatatagtctgttcttgatgaagacaacactagacagatgttgcctgatgcctggataatgctgaatgtgacaaaaccagcgagacacattaagatatttctccttttcttgaactgtcaggtcaacctaagtagagattaaaaacatacacacacaacacagatgttacataagcacaactgttaatatcacttaagtaggagatagaagttgaaaaacaacaacatcaatcccccaagagctctcaaaagccaacatattcagataggagtaaaagtttcagcccagtgaacactgacttataaaggttcttcgtgttcaatgttatgttcagtacaaaacctgatgtccttcctgcgaaataccaagttttcaacaaatgcaaaatttacattaactgaggatttggaggtcaaataatttgttttttacttcattggaaaggaagatagattaagatacagttctttctctggtattctttagtaaacctaaaaaaaggaaatgatccatttcaagtcaatattgcttaatataaggaggggctacttccagtggtgtgtgactcagatgaaggaggctgagtaaatgcatgagaacagaccttcataattctgtttgcaataaagctgaactcaatcttttagtgaatggagcagttcacccaatttgctatcaagctacaagaatgctcagagatttggttagagagagacgtgatacaaactgcaggtgcttatcatttcactgggctcaaattccaaaataggtgactcaaagacttttctctaagataaactttagaattattgagagttatcaggtaaagagaaaaccagtagggcagtaacttgcagccatgaccccatgaatgggtggtgtcgttccttctcctaagtcacatttacttaacagatagtgcaagtctctataatgctgacaggagtgtttgcagaaagaaataactcagccaccctacaagcgctacaaaccccccagcagcctgcttgttgggagacatttttagtgagatgaatgtcctttgcttttcagcatttagcacatacctgttctgcagacaagcattctgctaagttaccagatcaccaaaggtgaaggataaatcactccacatgcagtaattattacagaatacaaaaggatattaacaataaaattaaaaagtaggcagtattttctcattaaatgtttatttggactcgtatttgttggcttgatttacttaagttgttaccagggagaatcttcactgcttctgtttcagaaaaatttaagtttcaggttttagtgatacatacttaagtcctacacacaagctgctctagcacattataaaaacatattcatcttgtttaaggttgtgtctacttagaaagatgttactacaactgtctcacctataacatagtcagtccatggcacagagataaataacacatcagtcaagaaaactggtcaagtatgtctttt

SEQ ID NO: 45804 - DNA, 3456 bp, Homo sapiens
ctcctgcctcagcctcctgagtagctgggactacagtcacataccaccacacctggctaattttttgtacttttagtagagacgtggttttgccatgttggccaggctggtctcgaactcctggcctcaagtgatccaccagcctcggtctcccaaagtgcctggattacaggcatgagccactgcacccaaccccctattctaataatttttaactagatgatccatttgacaatatttttagatgatctattttaagaatgtacatttattcatttttccctcaggaaacttttgccagaaactcacagagtttttcaaaaaggatgaggttacggttaccactttcacctctttttacagtttaaactttggaacttgtccctttgagtctgagataattatgaatgaccttgacttgttaactctgctacttttttggaagacattccctatataaacttactgtaaacaaagaaatgaacagatttctcccctcaccaaatttacagattttaaaaacatttctgatgggatctcccagactatttcacttacaacactggttttccaccatccctttctagctcaagttctttttcctttcttacaacaggaaacaatgcaattgttctagttgccatttcctgcttcatgttgatctgcatgccagtgtgtctatagtggtgcttggctctttctgcctaataattccttttaatttatattggcactctatcatgactttgaactttaaagccaagcagataatattctgaatcactaattttccatgaagtcatgtgagaaacactttaagtgaaccgttccggatcagggtgacacgctgctttgctacctttccaactggcaccacgttgccgcctttgggacattctttagggccagtgctcctggactattttgcagttaattcttttatttttcctttccttataaaagaaccacatgcctccaatggtgctccaaacttcagaacaaaagtatttcagttgatagcaatcttacagtcaagcagcacataatattacaaaggattttaataatcttgagtaacagtctgttcacagggatgactatctcctagtgaaatcactttaagaaagcagtgagtcactggtgttataataaacagccacactaacaggcagtataacaaaggaaaggcaacataatattcctcaaacggagttaagatagaccagatcttagaataactcagccatgactaaaattgggctcacaatgaaacaaaatacagtggaattatctgatgactcgaaggttccttgactgctgttttgtacactgtgctgattacatattccgtattgaataacgtgaacaaacaaattaaggaatgcacgaggacaaaaataaataatattgccaaagcaaacaaagcacgaagacctggtaaatatcagcaggtggccaatctgcacctcacacccaccctaccttaacacctagaaatcatttattccacatctgtatgtatttgtacccaacttaactggaatgtcatttaacaccacagtgcaattctgccattgtgtaggttttagtctgtgaggcctgttccttgagaaggtgtttatttctctgattactttgcctgcacttggactagagtgggagagatactttgactcatgataggaacccaaaaggatggtcaacagtgatttacatattaatctattcaatttcactttgaaaaagataaggatatctttaatcataacatcctggtcactatatatgaagatgacatacattccaaaatacaaaatgtaaacacatacagaatgctaaatattattaatgtaaccctaactttaacatgctgtactgaatgaaacacttctaacctgcctaaaaaccaagtaccctccagtgcacttagactcgtaattaaataactttgcagctagtgctatgaatattttgcactataggattatgaccttattcattctgctggcaaaggaattccaaacaagttccctccttttccgagtatttcttttccctactgcaaaacctgcataagctagaggaaaagaaaatttaattaaacacttggtttatgagttacacttcagtatcatcttttttatttttaattagatgtagaaatactctccttcttaatgacagcccgatgctacagcaagcaagatcttgtgggtctgaacagacgttcactagcctgctggctgtcatcacaaaggacgactgatgatatttttcctaatataaagcttaaaaagttaaatgtcaaaccatatgtcacatttaaatatatatttcgtaaaaagccaacaagtttgttattgtggttttcagatagaaattgttcttggagccctgttgggtagccatgctcacagcagcacagtctcactaaaatgaagtacagactccctcaagttcaaagactgtgtttaggctgccaccaggagagagatgcttagataccttagcagcaaatcctctttaccttgcaggctttttttgttttgaaatgaggtaagttgtgcctcatgatcattttaaattcgaaaagctactaaaacatattgaacctagcatggaataaaagaaggtggtaatcaatgtacttcagctccaataaactttctccacatttaaataacattacttatattacactttcactacagagataaaaaatctgaaataggaactataaataggtaccagttgttaaatattgcttttatttatttttttaagacaggtctcactctgttgcccaggctggaatgcagtggtgcaatcatgactcactgtggccttgacctccctgggctcagaagatcctcctacctcattcccccaagtagctgggactacagtcacagagctaccacgcctggttaatggttttttttttttttaaatagagacgggttttgccctgttgcctaggctggtcttgaactcctgggctcaagctatctacctgcctcagcttcccaaagtgctgggattacaggcatgagccatcatgcccagccttaatattgctaatctcaataagcatttagctgcacaaggcactgttttaaaagccaagaggggatgaacagaaataagacaaatcctctttggtctcttattttgtgtaaattgaatcatattctttgtaagtatggggaatattcattctacttcactcctgttgtcccaatgtaattattaataggcctcctttcacagccaagtgttttggatgagaaatcatgtggtcgccctatttacaaagaatatttgtaatcaaacttatcataagctttccaaaacaatgaaaattcccttagacagccaaggccatccaaatcttcagatatttttctgacaattttctgattctgtattctacttatctgcctcatgcattaataa

SEQ ID NO: 45805 - DNA, 1319 bp, Homo sapiens
ggaccaaatgaagaagagaaaaaattaaagacaaaaaccaaacatcatttggaaaaaatctcaaaggagcaaaaaaaacatatatccaaagtagtcttcctacaaccaatttccttctctaatacattccttctacgacaaacaactataaaacacaaacgttctaacagtgcctaaccaggcaatctcataccttgtgatgtttcccgcattcactgtgggtcgtaacacttaaactgataatccaaggctttagaaacgccttccccgaatcccctagattgggccaagactccttaggtgttctctctgccatttatggtgcaacgtggcactcttccaatttaaatggttgcaatgtttgtccacctggccaaaaagcaagctgcctgagaggaggaagcatgttcccctaaatcatcattgtattccccagacccagcacggtgctacctggcaccctgttagctataacggagtcgctgcgcaataactgaatgaaaggtgcgattacgggaaaaaaaaaaaagccagttactgaatacattccaggttggtctaagagccctgtgaggaccctcctccaactggttttgtttcctcataatgggatgatgacaatttcccaggaggtgaagttcaggccaagcccaacctgagctggttaacccctccctccaggaggtaggatggcaggggccgaggcccagaggcgccagccggctagcggcgcagacacgtggggagctgggtagcagcatcctcactccgcccgtatctggtggccggcccgggtcctgccagggctcggcaggccccgctcccgtccacctcttcccctccgcgccgcctctccttctcacctgtcgctcgccctgagcactgtatttattccccttactcagtcccagggacttctccagtagcgacaactctgcggccgccgccatcttccggccgtagctcctggcagacgcgagacctgcagaacaagaacctcccgcattggtggaaacagaagtcccactcctgcaaacttcagcggcgattggctgaacggaaggggcgtggagagcgcgcgccaaagcacaggaggcggggccggtggaaggggcggggctgagggcggggtgtgagacaggtggagaagtgatggtaaatttccactcgaactgttggggagctagttactggtagaaaggccccaaggccgggcttcggtggctgcagtagactggatctggatctctaaatggcaatctattgacatggctgccagcggtaactcgttaactcatttgctagtctaagagaattta

SEQ ID NO: 45806 - DNA, 1611 bp, Homo sapiens
aactatctcaattcacttagaaaaacgtttaatcaaaaaacaattctaggcttctgatatcctaatgtagaaaaaatgcagatactcaacacttaagattttgttagcgcaccaaatcattccatcttttactttcaatattccttaaataataaaaagacgggagagataattcagttgcaaagactggaggaaacttgcagaacttctagtggaagtttatgccataaacttaatagcccagccagaacaatcacattctactgcaagccaaatggagaaaagagtaccttggagtgcccctatttaataaacacggaacgaggaaacagttaactgtaaatacagtctagaggtatccaggtgactgacagttctccagagaccccgagaacagcgtaaaagaccccttgaggtcacctcacccctgcgagtccacggattgggacctgagggagttctcgccagcccgagggcgaaaaacgggcgaggaggaacagatgctcctccctggaaaccgcccggccggtttccgctctttcaaaaaagggaatcacccgtttcttccatcccgacctcatccattcctcgaacgctccttctggatgaggaagatgggcagtgtcaaggttttctggaggagaggagatctgggtcccaaacacaggaaaggccccgaaggcacgcgtaccccaaggccggtatgtcacccggaagggtgacggcagcctgcgtggcgtctgagctagacggagcatctccccctcccctggtccgtcgccatcacctcctcttcctcctcctcctcgcccactcctgcactttccaccgcggcggtcgcctccccggaaagcactctcaactccggcgcccgcaggccacttccgcctatgtgtccctgcgcgcgtgcgcagacgcgtggccccgcctcccgacaggcctgtgtggccggtggcgggcgggccgttacctcccgcgcatgctctatggggtagagacgctaggccggcactgcctaggtgggccgggcggtgcgagggtcgcctttcagcctttacctctacccactgaaatggagtaggtcggtgagcgccgatctgctggagaatctcattatcccatcggcgctctgcctgctcctggcctccaagcctctgaagcccctcgggtttcagctgccggctaccctcgagcccgtggtgcccacgagagaggcgactttacgtcagcggccctgggctgagatttgagaacgcgaccaagtggagaatgttggagccagattttaaaatccttgtcttccttctgcgtgctacttgatctaaatgagatacggcaaagtcacagaacctgtttttatgtttttgcctgattcatacgggcttctccggtgaagatgggcctgaagtaacgcttgggttgcttctgacgttataactcatcctgtagctgcagcaaccgtggtccttgcaacctcataaaaatgttgccagcattgtttcgatagtgctgcttaattcttggaaggtaaatctcaaagcttgaggaccagccatcaaaacttttgtaaaaggttttccccgcgtttagggcctcatccatcaccactga

SEQ ID NO: 45807 - DNA, 2598 bp, Homo sapiens
gtggactttgggattgaatgcactctctgaatccaaagcctatactcaagtgggtaaagcttgggatgaccagtatgagaaaagcagagagaaccattaggtttatcctctaaatagggaagaagtcctttctaaactctatctaccaacatattgcattgtatattttattcttcccctccacctcctccttacagaggcacataaatagaggagagacagagatagtggacatgaagggtcctcatagcagagtcttaaaagatgcaaagtgacttccatgaagcaatgatctaagacccaatgagagtgggcacatggcgatatggttagataccaacggccagaaacaggaaaaatttgaatgccttatcatctgatcatggggagagaagatgacatcctcccattctcactgaggatggcacctcagtggcaccacatagactccttgaaactaaggtgacagcccttggataatgagtgagtagagaatatcgtcaagctagtcacagactgaggaaatactgcactgactgattaaccctaaatttgactactgaatagaatggaggctcaagacagaaatgaattgtaaaaaaagataaagtaaaaattatttgtacacacgtttgaaacctgagatttatgtcctgagttgttttattcataaactgtttaattgttacagatttgcatcctaagagaacctgaccatgaaatgtttacaaaggctattgaagtgacagcagttattgttggttttagggtcataagttaggtgtcaaatcataaaaaactggcctttttgaggaattgcattttattttgattttttcttcaagatctataacatagtaggaaattcattattttgtaaacttattctgtaccaatttctccagctgaattttacaagcctagaaaacagttgctgaaaggtctttgatgcctccacttgatttttactcatgttttatatttgccgtgcacattttgtagtcaatgatacaattcattttggctttatttactgaagggcttggccctgatgttgaaagtcatactgcaatattgtttactcaacctttagaaggcaggaaagttgttaaacataagccctagtgcatttttaaaattctgataaaacacaattttaccacaatatctttaaaaatctcacatacactatttacaaataactttcccttctttatttcagttattttttaagaccattaggttggtgttgtttatggcaaagtggtaatttaataccagatagtaaattcattatgtgatttcagtgggcagacaattacatcatgcaatttctctgtgtctcttaagtgactcatctgctggcttatgttcaatgtaggaaccaggtcatcagctcttctgtaaagctgaccaagcaagtcatcacaatgtgatgtaaataaatatatataaataaaccagcaccaacatgtgaggggtactagtgatggctggacatttgcagtgagtaatttagtggacatatgattctactgctcttaaaaaaaaattaatgctgcttttgctggtgaaggcatctttgctgactataataacagcaacctaaatgtgtatagtgctttaacaatttttgaagcactttcgcaggtgatattatcatgtggaatatttccccacaatcttgtgacacaattgtgaatcatattgtcctcattttcagataaggaattgttacccagagaatttaagtgtttctcttgaagcaattgctaaatggcacagtgcattagaaccaggtcttcttggaatcatgttcttcttcttttccccataagacttgaacatcaacaggtcaggacactaaagctaaacaaaactgaatgttattaaactgacaatattctactctttctagctgattacagtttcatatgactcgacctaatagtaaaatagaggctttgggtatccttggtcagaaaatctgagaatttagttgaagtaaatgaaggaagaccaaacaggcagggactatggccatggatccagagtccaagctggatgtacatggatactgacaggaaaacagagaaagtgagagctgtttaaaatgtgaaccacatctatgttttgggaatagatatttgcttttaattttgcatagcaccatgggataagcttgaaatgcttctgagtgaatgacttctatagattagagatttaactgaatctaaaagcaaaatagatctatgatttggagatcagatgagatttttagcctgatttatttagaaaattttgtatgtttgggactcttatctagtagattttgactgtaccttcattaaataaaatagtgtaatataggtgtcgattcacatcaacaaaagtaggaggctgtcatgagacacaaggaaaaacatggttgtcatgtcaaaaggcttcagtttaacaccaaattctcctgcatgatttggacaagtaattgaaccccatgcagattaattttcttaattaaaaaacagtgataacaatacctacctcatagagatgttgtgaggattaacctatggattactggagttagtaaccctg

SEQ ID NO: 45808 - DNA, 948 bp, Homo sapiens
tgactccagtccttaggagggtggttaatttgacatgttctggcagaattaattttgctgccataccagtaactttctcctaataaatttttctctctggagatttcaacactttaaaagatgatacaacgtaccttttgcaaagcagaggatgataaggttcatgtaggcaatggagtaaatgattacttctgcaccccaacatataattatggaagcaggatgaaggaactttgaatatgcttgctagtggcacagctgaacatggggagaaatgtcaagtcgaggttgaggttcaaagttaggaacgggtttccagctttgcagctgctgtaattacacaattctgtgcattgaagccatttatctcctgccaactgtggtaattaattttgttttcagttagtggaggggggattgatcttccctttgtgaaaaactttctcacgcaaatgtttcccagtgttgaaatgttgaatggctttcctcctgttgtacaggtatttactggaatctgagctcatgattctctgaatccatgactaatgcaaagtcagagccaagtttattgatgacttctatttctctctttagggatcaaagtttttcaaagtatacactacttagaacttttaaattatctctaagtctatttgcacgtaatgcaagtatagcaacctgtacaggtaaataccttttagtttcataaacaaggaatacaatctcatgtaggcatacgttttcaattaaaaatttcttataaacatatagtttgtgtgtctcacagagttctttaacccaaatacatgccagtggccttgtagagttgagtagtgtttataagaaggcttgtcactgggcagctttatgtcaatatccagaaaacttgggccatactatcaaaccttcaccaccaatgttttttactttgatttattgtgaaagcct

SEQ ID NO: 45809 - DNA, 972 bp, Homo sapiens
ccggatggcagttaacatacacagctcagacataactctcttagataagtgcacatccatctttctgacttagagaagtcctgcagaaaatattgcttgagcgtaaaaaatgttatcataaaattcatgtatttccccctcttttgacatcaaatagggtagatagattcttgaacacaaatgttacctctttccctacttcattggtggaaggggtatactatttctctccttgcccctgtgactttgtctcatggtggacgaggtgttctttaccaccccttggtctggggcttgagtgtgtgttttactttggtcaaatagatcttatcaggtacagtttgttcagaggcataacctgtgcttgcccaattgggcttgcattcttgtattcctgccttttatcacgagaagataccttgagtaatttttctaagaggatgagagagacacacacagaataacttggacccaatctgaagcctggaccccaacccagctgcagctgacctagctcagctacatcccaactaccctgaagatgtgtgagtgagaaaaaacttgcttatttttgtatgccactgagattttggatctgtcaataactgagacatcagccagcccctccttttaattattagcaagacaatattgattgtgtgtgaaggtcacagggcatctgaggttgtacaggcacgattgtctgttctttctggctttgtactttcatggttatgaaacacctggagccagagcagggagagtgtttgcaattcagccctacccttatacactgaccatggcagagaagtacaagaagatggtcttggtctttgtcttggtttcagccctacccttatacactgaccatggcagagaagtacaagaagatggtcttagtctttgtcttggtgaggcatgcctgaaatgcagaagtgggtaaaggtcttagttcttgtgatgcctgtgaag

SEQ ID NO: 45810 - DNA, 1625 bp, Homo sapiens
gtgcacaaagagagatataactaaagtgcttagggacatgcaggagaaagtggttaatttttaccataaatatcagggaagacttcatgcaaaagataggctttgagtttttcatgtaagtttagatcagattctgagagatagaggtatgggaaagagtgaagtaaacagcacataagaacagtcatgaagaaggcaatttcagtgtgcagcatttagagcttgggtcagaaaagcaggtccactacaagtgggagctggttgctatacactgaatgtttgcagtccacaaaatcaatatgttgaaaccctaatctccagtgtgatggtatttggaggtggggcctttgggaggtaactgggcttggatgaggtcatgggggtggaactcatgatggaattggagcctttacaagggaatgaagagacaagagctctctttatgccacgtgaggatacagcaaggccccaatctgcaagccaggaagagtcgtcacgagaaccagaccatgcaggaactctgatcgtggacatttcaacctccagaactgtgatccagtaagtgttgtttaagccacccagtctttgttattttttatagcagcctaagcggactgagacacgtgaaggtggactgagacacatgaagcagtcagtgtggggctgttccttcactatctggtgctgaagctttaagtccacggggcaggaagttgggagaaaagagggcgtgaaatagagaggggttcgaacaatctggaactcttgaggctgagctggttcccacaaggaccaactgggacccattagcccctcttaccacctgttagcctccatctttgattatggaatcgatttgctggagaagctggagcttttcctcatggagctaaatctgctgctgccatgggtgtgataagctgaaggaggggagtgggaaggagctgaggagctgcactaggctgctaccccagccaaccagttgaactggcactgggacaaccatgtatgctgtctgaagcacagcctgacgcccctgtggacctttatagaatgcaaagagtatggctgctacttcacttttacctttcaaatcttgtgcaaattcacttatgctccacccccaacccagaactctgcggataaaggaattctgggaaatgtagttccagtttgtctgaattgacctattgcaaatccacaacacagcaccagaatattacctaggattatattcgacctgtttcagtgctacagaatattttatcttctcagaaaccatgtagtctccttagaacatcacagtgagtgcaacctcccacagagctaacctgtgtaattgaaaccatttagggaacaatgtattcacttgctaaagatcaaccaacttgttcatttttcaattgtttagggccttgctggaatttaacacaaggcagagaataagatttgagtaaaagagagagttatataaaattgatgcttttctctcttttttttaatcattgaaaagtgaatggagagaccctttttcatttttgctggacagcttacaaattctagatacatcagagctcttacatacagatgtagaacaatatggtcttgggaagctgaaaatgcta

SEQ ID NO: 45811 - DNA, 1484 bp, Homo sapiens
tctcagcattttgtaactagtttctttgtcaataatctctcattattctggcccccagcctgccaatgaccttgctttaattttagtgggatggtttcgagggaatgtatgttggtgaaaacaattatctgcttccctatttaagctagaatgccttacaaactgcttagcagaggaatgcagctcttcacaaatttgccccatatggatcctgcccatgaggcaggttcaataaagtcgaccagtgattgttggagtgatgtgcacaaaggcggaaagggaattgaggcattggcaaagctaggaaggctgatgatacttattaatagtgtgaggcaatgtatctaaacagaggttgaaatataggagaacctgggtttgcttaatggggctattagctgggcagtgagcctggtgtgtacagaatgaaaaaagaggtgattgtgagtggggttgtacgtaacaggactcttgtgtggcattcatgtgctgtctttccagttactctgacacgtgcatcctttgatttagctgtgtaatttctttcattattattcttttaaactgacaaataaaaatgtatataattagtgtatacaacatgatgttttcacatatgtatgcattgtggaatggctaaatgaagctgattaatatttgcattccctcacatatgtatctgtgtgtgtgtgtacacttaaaatctactcccagcaattggaagtaaacaatacattgttattaactctacttgccatattgcacaatagaacttttgaactttttcttcctgtctaaataaaactttgtgtcctttgaccaacatctccccaacttcgtaactctcctactgctgataaccactatcttactttctgcttttatgagtctgattcctctaggtacctcacattagtgaaaccatgcagtatttgcctttctgtgaccaacttatttcacttagcataatatcctcaaagtgtatccatgttgttgcaaatgatagatttccttcatgtttttaaggctgaatattattacatgtgtaccatattttcttcattcatccatcagtggccacctaggttgcttccatatttttagccatacaatttcttaatgttacttgagcacacctaagactgtatttccatcatttgacattttgaaattaagacattttgagaatattcagggcataaaagttgaatactgttataaatttcctattgattataaactagatcaatgtaaaattgccctctactcaatttcatatttgtcttaacaaaacaatgattaattagctgatttattcactcaacaagtatttctttaagtttgattacattccaaatgcttttaggagcctatgaacaaaattcactgtccccattttgtagagcttacagagaatgtagtcattattacaaataatactgacatcaatatttgtactctgggtttttctttgagggggggaa

SEQ ID NO: 45812 - DNA, 1312 bp, Homo sapiens
ctctagtaagaaagctcattcacaaaacattatagaatttgcaaggatctattttgtaaggaagtgagatctggttatatttttcctaaaaatcagtactgtttgattctgtttttaaaagtccgatcaaagacaaattggaagctatacaggagaaagcaggagtgcttctgttgttttaggcagttacttttaactcatgtttcaggtcaaactttagtgaatgatgaacaaaaagataacttcagccttatgtttggattgtcacactggatgctatttattctttgtgggcttctgattgcaaatgaggtgagcatggactttggtgaatcagttttgttgacgctattgttttatcaaataactaatttattaaaagaatgcatgaagcttcagactgtaatcagtccgtattgggagaaaaaaaatcatttgtggaacagttcaaatgccaatgactatagtattttccagctctgaaaaaaaaaaagaagtaactagaaatgaattatgttaagttactaactgaatttcttctgaaatccccagaaactgaacaagagatcagagatgttttgtgggtttctttttgaagtcaatcaaacaataatggtgattgacacatttggtacctaaatggtttaacttttggctgttgcgtcgatttcattaaattcaatgagatttctgttatgcagaacttgccaaagaaaatttgcataccagaaagcaagtagtcatggaatttatccattagccttttttttctcctccaccaaaggtcaacaaatgcaaaggtttgattctggatggagttcatttggatgtgtcaccaggaagggtatcttagcattgcaggctgccgaaatttggaagaatccaccctcattgattgtctttgttctttgctggtttacacagcaaatatagtggaatatctgatctgcaaggccagacatataaataatttcaccttttcagtggcagttgaaggcctaatccatagcaaagttactaaagaaaaagttttataggtatttagttttttcccatgttttcttgatcattttactcctaattaaatctctcacctcattgctgatattaagaatggtggtaggaataattttagcctttgggttttgttgattgatttaaaaatgacaaggtttttgttagttattctgactagcccttaaattattattttagaaagtgctttctcgttgtctgatgatttgagaagtggcctgaaaaaaaacaaaggtattcctcatgctgtggttaaatggaagctgagatctgccaa

SEQ ID NO: 45813 - DNA, 1294 bp, Homo sapiens
ctatgaaggagagagtgaagcactgggttttgggccaatttatctaaaagtgaaagagcctggtcttggggaaatgatcagtggtggaaggaggaaatgcacatgcaaggcccgcagtggatcagtgttctgcgatgattgaaggcgcccttggacttggatgggcatcctgacattgtctagtcctgactgttcatttctcaagattcttgttagctgccaaggtctagtaggatgagaccacattaatgtcaatgaagtccagtcagttcgagacagctttgtttttctacaattaaaacaatgaggcaatgactctcaatcatgatctcttgggtctatttcccctggatactaactaatggtggttccaattcttttaaaacagactatattttttttttctcacatgagttcacacacacaaatgcatgtggttttggtccacatgcatttcatatgactctgaagtatagcgttattggtgaacataaaagcaatcagacttgattaccgttcaagagggactctgaaaagagcatccacgaataatgccctggactcctggaaagcttggtgtatcattccttcttcttttttttaagagcactggaccttagacagtagatggcagtgtgagatgggaaatttaagtcttggcagcgatatgcttgaaaccagcccagtaaaaatggctttttgacttggaagcatttatgaaatgaactttcagtcggagttttgtctgacagccaggattccaccctgcgaggtgttggcaacccacaggtgaggctgtgtaagtgctttgtttgaaccgaggctgttgcactgctcggaagcaaggtggggagcatttgagcaaaatcattgtcacagagccaagcaaactgccactcaggtctcttggcactcctgttccccctggcatagttagagccactcctctttgcctttctgggaaattcattgtgtttaaatctaataagtagaagctttgatatatccaaaatgttgttgctgcttcaggtatttacttaatctttcctttcctttctatcctaaaccccttaaaagtctgaagcagtgagtgagggagtttccaaactgaaaagcaaattagattattcatgggagaattgctcaatctgaaagtacactattccccatggcttatcaaatgatggattctatttagaatctttaagaaatcatggaaaatagggcagtgttgaagcaggtttgggtgtctcttctattaaagactcttgacagtggcaggatttggtatcta

SEQ ID NO: 45814 - DNA, 814 bp, Homo sapiens
gcttgaacagtgcttgcctttgttctttttgtatagcttctactatggagagctcatgttctctatgccttggcaaattttcatgctcttttctcagtttgggtcagcttctgacattttatcctttgcattttcaatgccatgaattatctgtgaagttgttttcttttgctttgttttgtcagcatgttcatccttttcatcacaaccacattcttcttttgtcagtaagtttgccctcactaagttcctctggctgcacatctagaatctccagaagggtggcagcatcagcattccacgatcagctatttcttctaggactctgttaccgctgatcctactttcattttcaatattaccacttttcattttttgttacattgtcacgtaggttgactaattttctcttttgataatccacatttgtaaaatgttacttggagtgattggtgagagattaagagtcaacacagctacccaccttgctgtctctgtgtgaactggtaacagaggcacagtgaccaattaccagcagactctggaggaagtgacatggttgtgcactgatcgtgatgtagatctttaactaaacttgaactagagttagcagcatggtttttcttcgtgcaattactcacagttaatatgccatggtagctgaaattggaaccatgttgttgggggaattgattttatttaactaaatcaagataattgtaattttgaaaattgaagctatgcaaaattatgcagtattgagtaacattgaaacagaattttagagattgtattaactagcttttaaatgatg

SEQ ID NO: 45815 - DNA, 1573 bp, Homo sapiens
tttaatattactctactttcaagtttaagtttttgttattttacacgtgctctgatgcttctcttgtttattaatttagccaacagctagggttccttgttcattgagatttagaaatacccctatcccaattctggtttccacttcctgcatccagtgtagaattggcagagtgggtttttggaactcttggtgtgtggagcctgaggatctctctgcgggaggctggggagggtgtgaagctgcaggactgagacccaaactcagcttggatggtaaaggaaggagcctattagtgtatcgcaaagctccttacttccttcttggcaggagttgttgcttggagccagcaggtgcttaatgctgttaaatttatgagtagtgaaagctgttggatttcttaacatctgggtaacataaattatcagaattttttttaggctgacatagttggaaagtgatttcgaaatccatgaaaagccattaggtaacctttactggaatgtgtttatttttgaacatttacctgtgtgactgtaagctgtccctagatgagctgacagaccctggctgagcaggaagtggcagggtcaggaaaagctaggccacaagttttcccttgagagccttaggtaagacacggagcacttttaatttatatatttattgttttcggggaattttttctcttgctcagaattaccaatatggtaagtgcagaaccaacatatcaatttgtaaatgatttccattgtttatttttccttttaaactagatgtgatactgagagctgctcccttatccgcctttctttcccttctctctgttctttcatcacagtagataattgagttatcacctgtcaggcagaatttaaaaagtaaaataaagtaggaagaaaggaattgaccatttctttatagtaacagctatttatataacattatgttgctgttgtctatgtttgtctgttttataccgggactgataactgcaaataggcatttcttaaacttttagccactgttaattttaagtgatgctgtccataaaatgttatcacgcttgtattttcatgttgtaaatggaccattttgagcttgaagtgtattgagagattatttttctacctagattttactttctaacagaaattgaagtagtatgtaatattggcttaaaatattactgttttccacactctttttattgattgcataagaatgcaatcaatgactggaattagtggattaaaaagaaaaacaacacaacatgaaatgtgttagcatatttcacatgatgttgtcaaaagagccatggactgtgagaactgttgggtacaacctcagcctcactcttcctattctgtgaccctgggcagactacataggcagccagagtcacagttttgctttcttacagtagaatttgcagtgacattgtaggtgacagcccagcatccactgggcccttgccttactgatttataggaatgcagttaggggacctgacataggtgaaggggagggtctgattgtatgaacagttgttctaacccttttttctggtaat

SEQ ID NO: 45816 - DNA, 673 bp, Homo sapiens
acagaccccggtgtgtgatgttccccttcctgtgtccatgtgttctcaatgttcaatcccacctatgagtgagaacatgcggtgtttggttttttgtccttgcgatagtttgctgagaatgatggtttgaaagagggttttttaaaaggaggaaacaaattactctcatagagaaatagagacaggcttaatcattaaaacaatgcttagtgtcaaatattagaacacacgtttcagaagaagtgaatactctttggaaccatctgttttggctttcttcataacctttgggaatgcattttggagaaagccatcacaaaacttcacagaattgtacctccttcctatggtagctgctttgcacattccagaaatttatgtctttctgggaagtgacatagcacactctgcttgcctgctctttcgcacgagggaaggaaggaggtggtactattggagctcttgttcatcctctgcttttgctcgctggtgtgcttctctcaagtccagcaccatttaccatgggcatctgaccatgtagtctgtgagatagcttcattaagcctaagtacttgattggaatctcaatattaggtatagtagccctaaatttgtaattttcacaaatggattaatgtgaacttactaaacctaaagcttatttggattataa

SEQ ID NO: 45817 - DNA, 2302 bp, Homo sapiens
taaaaaacagtcactttaccttgtgccctgaaggtattattattattggcagatatcctttattactcagcctatattctggacattaactcagaagtttactctgagcatcattcagtgggatgacttgactttgcatcattttggttttaatttgtagtcctgctaatgtgattgggttccacccgtatgcgtgcactcgctgccttcaattccagcctgactcacacacagccaacttcatttggaccacaaattgttttggcctagctggcagcggaaacccaaaacaaaaatctgggagagtagggatatcatgttaaaagataaccctcagggtcaaacgtggcctcttagaaatgcaaccaaatcctgtagcagcgctccagtacacacgtgcatgtttttattttctctttttctctctgtcttgctatgtatttctatgtggattctttgtctgccctgacaacagatggtgttttaataaagtccggtaggaatattactgtgagtaaacaatgcagcgcatgccaattccataattgctgggtactgattcagcctcttacctgctgcatccaaattgggagggaaccaactgtgcttgcacctaccggcagcagcccgctcgcctgcagctgtggtgtgcttcagcagctagcctcaccacggaaggtaaattgcggctcctgtcatgtgtcttggcaccgggtctagggaatgctgccatctggcttgtcatcaaacatggtcattgaatctctcagagataaaatggctttttaaaaatcttgctgtttttttaaaaattgacacacataaaatgtattatctttctctttacaggcatggtatattctaaaataagtgtttgagcttatttgagcaatagcttccagagtgttgtttttcctcactgattcccacgctcaaagggatttatagtctaaacctattatatgttaatggaaaatttaaattcatcggatctggccaagaaatgcaagctctcatttatatgtctcattggggaagggcaaaaagttaggttaactctctgaataattttagtttgtttttcattgtatagaaacatgtccttaactcttttactcaaaaaagagggcaggtgaagcaaataaagattgtaatccaaatgtacgatatttgtcccctccccatagtcccctcaaactacctgctaaatagaagtctccaggaaaatcaaagtggctttggcagccagaaagagaaagtcagtgcttactcattttgtaagaaggccagcagcatgtgatgtttatccaaggatcatattttaagtgacatccagtttcttcaaatactgccattttcaacagagtgctctaaacacttttggtagtgcctacaattataaaagcaaacaaaaagcaaaatgaactgcagaaacagcagcgtagccttcacagtagagaaaggttaacgtctgctggctgacatattcagagaaaagcctcttgttgcccggtttgtctgttcaagtaaataaaatatattaaactgataggacaccaaactgctagagttcatgccaattttttcttttcagtaaaggctgccaactccccagctagactgatggttacatgaaatgctagtattgcatcattttcccttccatcgatttttagatagaatgatcctgtttttgaatattttgagaagaatctgaaacaaatgcaaaaacagacaaaaataatacactgaaaactcttacacattacccattcctaacaagtgctcgtccaaagttccccatccatacctccttcctggtttatttgaaacaaattctatccatcctgtcaatttaactgtaaacatttctttatcttttttttttaaaagtcacagatcttttttgtccctttctgtaactttctgttttagcattacttcaaagaaaatgtgtaatagtatgaggaacacccttttaaccaaaatttgctaatgttttatatgtgctttgtctatttttgtctctttatatatagtttcaaacaaatgcatactttttcagaatcatttgagtgtatagtaggtttctgttgctacagtaacacataactcagaaactcaaatactgcatgctttcacttataagtgggagctaagcaatggctacacgtggacataaaattggcaaaaatagatcttgggaactccaaaagtgaggagcctgggagaggccgagggttaaaaaaattatgtacttggtacaatgttcactatttgggtgatgggtgtgctagaagcc

SEQ ID NO: 45818 - DNA, 688 bp, Homo sapiens
caggagagtattacatcatagtcagtaagtaacctaaccaattaaaggaactactgcacaattacctttttgcaaaatttgcctatgaaaatccttaatattaaaaaagttacctaaaagaagttaccaaaagaatataacaaaataaagtttctttgtaataacgttaaaaatgtgactgctagctaggatttgatcttcaacatgacttctggcatatttttcaagtgtttatttatgagagttaaaattacacttaaattgattatattagacatccatgacttttttatcagaagaaacttaacttcgatttaagatgcatactgattgttcattatgattgaaactttccatgtcaaatgattcatccactaaagctaaactctatgtcaaggactcatatcctgattatttcatttgacttacccccaggagagtatccagtataaacactgccaatgggtccagaattgtccatagtcccatggtaatgattaactttgacaagacatcaggacaggaggcaaagagtagctgacagccccatctgatcaaaaccaaaagaagcaggattgcattcagcattaaaggccccatcacaaccacgggaagctcttctccaatgtgaagtgaggaagttgggtagcaaagctcaacgatgtgaagagaaaaatggaatctgtgg

SEQ ID NO: 45819 - DNA, 967 bp, Homo sapiens
gagggattgaaaaactactgttctttcggccccatctttcataaaaatgtctcattttaggaaacatgggtgtagtcaaggtagaaaaaaaatttccttgtggtctattgcatggaatccaattcttaagacatataagataaatatttacttttttaactgtgttgaaataactatcatcaaatagtggttgcaaaaaattgcagtgtatacctcatgttcaaataaagtccaggttttgcatttcaatccatctctcctgcctcagtgctccctttcaaagggacctgagacccagtgcagaagtgggtggggaaggctgagcccagcagggtgagaacgatgaggtctctgtaggttacaacatctgctgggcagataacatctgcagataatgacagggcaggggtgaggggtagaaaggccaagctatgcaaaagcggcagagcatgggggagggaggggagctgttgcaagagttcctggcatccactatttcccactgaatcattaatcggcagcctcaccatttaacctgtgtggatcgcagagcggcatggtgccctcgacaaatggatattgtttaacttctcttttcactcgaagaaaaacaaggacagtgattgcaatgacactggatgtttgcgctgtttgataagtgatgactaacacgtctactacttttaacaatttttgctttcctctcctaactggagctatgtggcactgaagtgagagaaagctaatacagtaaatggaaaccgctgtcagtaggaaccagattagtcaatccttatagcaaaagtgaatttcagataacagctcaagcatgaccactctgatcacagcctcctgtttatgtatacagaggaacaatgaagtgccctggcaattactgcaaatacattcctcaagctttcaggcgatgccaagcttaaaattgtggtcaactgaagtggcagaagca

SEQ ID NO: 45820 - DNA, 1714 bp, Homo sapiens
acaagccccacaactcacaacgtgcagtggaatcctaggggtaggaagcccacagcagggagaaaactgccctaagggaaggtgctttaccttgctgacccttataaaatcttatctactaaatgaatcactcaaacctcgcaggggtgaggtaagaatccctggctatgtatgtaacagatgcattccttggtagtgactacacacaatgcacgtaaacatgctcgcacgcagcctggcacacatcagggcctcagtaaattgggaatcatcatcatatgcaaacgcctatagtatgggggtctggagatgacagcgaccggaaagcatggcgtgcggactcaagaggacaaccattctcttcctttagttaaaagccattctattaaaaccctatacaaggcacgaccggttaccctcggagaccctactcagagaggtaaggcaaagcgaggagcctgagaggaacttttcctgggcttgcaaggtgtgcgcgaagagggaaaaggtggctgtacggcgccccgcggctgcagtggccgggattgagcccgcggcggagcgagctgcgcttgcgcgaggaggagggcggagcggaggactccgcgagcgcgcggcagcgaacgaagcgcgcaccagaactcgctcgcgggaaagcagcggagagcgcaggcgcgcgccgcatcgcccgctcccccgcccccagatcccgcccacttggctctacgctcttctccccgccccctttcctttcccgcgtagggagggccgcggcgcgaggcctgtttgcgtcgccgccaccgccccggcgcaagcgcagtggttcccccggccgcggggcggggcgggcggggccgtgccgggcctcacctccggagcactccgcccagcagcgacgcgttgagacactcgggtggtgagagccgccgctgcacttccgccaccgtgaccttgtacttcgaggtggagctgaggagcgagaggcgacccggaactgaacagaagacttcgttggggttcaccacgccgccgaagaggttgtccttgttaatagggatggcggagacggcattgctgttggacttggacagggacacggggcctgcggagacagaggggaggccgcgtgttgggcgtcgtggatcacccccaaatcctgcccgaccccggccctcatcccggccagggccggatcccaggctttgggccacagtccccgcttttccgtccggctctgaaattctgtggctctgctacttcccttcctcgggctcgagcccttccctacctcacccggcggccgggaggcggccctgccctcccccagccagcctggcctgcgtttctgccttgaccctttccccttcgccgtcaagggtgctctctagagatgggtggtgaaattggtgacccctgaggcgctgagcatccgagcggagtgggccccagatgaggtccaggaccacgggttcagggtgcaggggagggaattacatttgcaaaccgagagcaagttacttgtacttcaggggttttgctgggtggggttttagtgtcggggaaaaactgcttcaaagacccattattaaaatcagccgacaatttagatggctaaagcaccctgtaaacgagcgttttaattgaggcaccacgctgggaagtggtggattttgttgtccacaccacacgtcccgtctttttgataaataggccc

SEQ ID NO: 45821 - DNA, 1182 bp, Homo sapiens
gccccagcctcaggcaccacagccaagcgagcgcgccttgggctcgctgctctgcacgcagctggaggtctgggccgctgaccctctggccacgtagtcaacccgaggatgtgtgccccggggctcggccttgcctcgggtgagaaggctagtcaccattcagggtgcaggtgtcatggcctggaaatggcaatatctgagcaaacaggtgggcgtcgcttcccggcggtgcggtggccgctggctcgcagcgcgctccagctttcggcgccgccgccgcccctttgctctgcggactcagccagttcccgggtggcccagctgggtggctccgaggcctgcccccttgggctgcggcgggaggcggggactgcagtgccgagtgtagggcgccccagccgggctggcggttcacgctgcgctcgggcctctgccgggagggcgccctggcgccaaacccgggcgggcaggggggtggagagccgattgagtttattcccattcagaatttagaggctggtggagacagagagtctcctaaatggatgcaagtctcctgaaagtctgggccggaagcctcgaaactttctgccacgcaaagccccagctagtctccagggctcggtcctggttccctttgtgcaggcccggaagtgtccgcccggttttcccactgcctggaggggcccagggtcgcggatagactcggacaaggctccgtttactttcagtttgtcttagttgactaatggcgggactggttgtaatgcgtgctctgagattttctccaggatttgtcactttaattttgcaatatgaggtaaggccatgttttttaaagtggagacactctctttgcctttcctgccttcctaaaggaagcacatcctcttgatgtgcccgacgggacctgcagactccagactccactgctttttctcaaaaccacacacttgaaaagaatacacttcgattgctgttaaaacttgtcagatttccatgttttaatcgctggcaatgtcttaataatggaaccttaccacttttgcacgtgttgctgaaaagagagctctccagtaaaagtgccgtgcccatgagtctcttgaggctgtgcaaggttacttatcaaggatctcaaaatgacaggcaggctacctctggatttccaatcacatgttcaaa

SEQ ID NO: 45822 - DNA, 801 bp, Homo sapiens
ttgcttgttcactctgatggtagtttcttttgctggaatgcttaacttttctttcctgcaagaggaagactgggagattgagaggtgtgcccagggtgtcagctcagtgcctggtagaggcaggtaacatgagctttgagccctggcctgtggattgtgttgtgcttggactggcctgttacgccatctgcttgcttctgcctgaaattcctgtaacacaagataaaacctctcattctgcaatttaccaataaaccttataaaatctgaggctaagccttgtgaaatggcaaaccctagaaagccagagagctggcatgcggtagttcagcagtggctgcaggaaatagaaggaaagggagtgaggagacagggtgcaagctggaatgtgatcacaggggagggggatctctggactatgggggaatgacgggcagcttgaggccctgagatgaaagacactccctttaagaaaaacgtctgtgactcagagccacaaggcgtgtcaggagaaagttctgatgaaactgcattccattcctggaggaatacgcattgccattgaagtacaaactctaaaatgatgtaggattaataattaaggcaacactagtagtggatggtggcccagagagctttccctagctttgttaattttcttctctccacagcttacgtaagcaaatattcacccaaagagtagagaatgttgagacatttagcattatgtattagtctgttctcacagtgctataaaaaaaaaatacctgagactgggtaatatatgaagagaagtttaat

SEQ ID NO: 45823 - DNA, 1490 bp, Homo sapiens
tctagaacctctattggttacttacggcataatgagatatatagaggttattgctaggtcatccttcttgactcaaatctcatttaagcaattagcttccttatgaaacttcataagggtcattgtggatcccttggctggctgatggggctgagatcttgggataggcaggtttttccttgcgcctcgaatgccacgttgaatactcctcatgtctttggagacatgtccttcccttcgagctgctcccagtcaggtgaggaataaaatgctatgatggcgtgaaaattctcccttggtctcatccatagatttgcaatcacctaaaaaaaaaaaaggaagagtgtgccaagccaccccatatagagccactgtgtggcagcactgcctctcgccaaagcttgggccactcggtgtcaggcaaagtgcagtggggtgagtttccagttcactggcggtacaggtagcccctagaagcgatcgtgtgcagtgagaatagctagcatttcagagtgttcactatgcgtgaatactgctcagagtgcattctacttattaacacatcaactcacaaaacagccctactggtattatctttattttactgacaaagaaattaagacagataggaaaagtgatttgcccaacgtcacacaactaggaactagcaaagccaggatctagacccacgcaaacctctctttgaagctcatgctttgctaccaaatatcgtgtcattctggcattcacgaggaaatcttgaaaataaagcaaaaagttgtaaaatggtatcaagtccacaatcgctgtcttgatgtagtgcaagcacagtggtatacaagggacatccgtagatacagaggagagggtcagcaaaccttctctggtaaaggccagatggaaaacattttaagcttcggtggtcagatgtggcaacaacttagccctgccattgtaacgtgaaagcagccataggccctgtgtaaacaaatgaggacggctgtgttccaataaaattgtatttatggacaccgaaatttgaatttcatataattttcatgtgtcacaaaacatttttcttctttggattttctcccaaccattttaaaatataaaaccattctagctgagagattgtctaaaaacatgcagcgagccagactggacccccccagctgtggttttgctgatctctggtatagaggaaagaagggtggctaaacttaattcggtgagtgcctaccataagcaaggtgttgaaagtgcagtgaccagcagaccgaaatagttctccatgggacattatgttgagtgaaataagccaggcacagagagacaaatattgcatgatctcactcatgtggaatccacatagaagtagagaatagaacagtggttaccagagaatgggaagggaaaggagcaggggggtgatgagagatggatcaacaggtgccaagctatagatagagaggaagaataagctctgg

SEQ ID NO: 45824 - DNA, 2312 bp, Homo sapiens
gtgtatgcatgcgtgtgtgtgaacggacttcttgtttagtaccattttgctgctgctttaccaccccaatctgttcctggacacggcgatggactctgtatatgttatctcattttattctcacaattgacctctggtggtaaaattattctcattttttacagattaaaaaaaaagcctcctttaaagcatttgtaaatctggacataagagcctctctcctaaaattcaagactgagatgctcttctctccttcctctaagcatcagggttctctgtctgcatcctatgcggaccagggcaaaataaacttgaaattcactatgttagcctgtatgcaattttgggtgatgatgggctattggtcgttttgttgttttaaaaaaagaagttagcctttattcatccgagtgccacagtcactttgtgcagtaagttaggtggtgaggtaagcttgctaattaatgggcattttaaaggactttacccagcagcagacaaaattaagccctggaaagaatttagcccagtagccagtcatatgccatgtcgtatagcatacccagccaatggggagagcgaggtgtggctgtggaaaaagacagggttaagcaatttttttaaagcactacatatttattgatagaatatctctccaggcagtattcacatgctttaaactgaagctcgtagcttggcagtgcagtttaagcaaataaactcaggctgttgaacacaatgattaacaggaagcaggggaggggacatagttactagactctggccgggacaagaggctgaggttaaggtcttagagccgatgacttgcagaatggtcacctcacccacttgtaatttcatggtgggaacaggtggaccccctggaatcagaacctctctgaggacatctgtttttgtgtagacacaggttgcaggttagcaggagaacaggcaagccaaatgcaaaggagccacttcagaaatgtgtcacagaaaagtgaaaatgcaacctagtggtaagtgaagaggggaagaagaaagaaaaaggaccagaaccgtgaactgaagggacagggaacagccagacgagagcttcagccatcacgaggatgatttcggaacctggagaaaatgtaagttaaatatatctacactctgatcctatctcaagagagagatattttactcatttcctggttgtgaatgatgggctcttggaagcactgtctttttagcgcgtctcttatctctgccctgatttttgtatttgtttacaatactgagttatgggagaataaacgttttctgagggcagctctgtccaatgcttcactgttagcagaagcctgtcatcagatttttgaggggaaagttttttacccaacagaaaatgcattgaaaactacccttgatgaagctacctgctatgagtacatggttcgaagccactatgtaacagaaacactctctgaagaagaggctgggttccctttagcttacacagtgaccatccacaaagacttcggcacttttgagaggctcttcagggcgatttatatgccccaaaatgtctactgtgtgcacctggatcagaaggcgacggatgcctttaaaggtgcagtgaaacagttactcagctgcttcccaaatgcttttctggcttccaagaaggagtcggttgtctatggggggatctccaggctccaggctgacctgaactgcctggaagaccttgtggcctctgaagttccctggaagtatgtcatcaacacctgcgggcaagactttcccctgaaaaccaacagggaaatagttcagtatctgaagggatttaaagggaaaaatatcacccccggagtgctgcctcctgaccacgctgttggacggactaaatacgtccaccaagaactgttaaaccacaaaaattcctacgtgattaaaacaacaaaattaaaaactcctcctcctcatgacatggtgatttactttggcacggcctacgtggctctcacaagggactttgctaacttcgtcctccaagaccagctcgcacttgacttactctcctggtccaaggacacctacagccccgacgaacatttctgggtgacactcaacaggattcccggtatgtacgtctcttaacttttatttttacgaataaacactgcatggtcaatactaaataagttgctttgaaaagagtggaaaaaatgggacaaacttctttacggttttaaatgtcaaattaaaaaaaaaatttcatctgtaaaatggtaaaatggagatgtgttatatcacccactcttgtg

SEQ ID NO: 45825 - DNA, 2517 bp, Homo sapiens
agcatcccaaatgaaatcatttctgcaagacccaaactagcctctattaacacgtactaacaattcagaacaccagagaagaaaagttattggaaacaaaagggtctaagcgctgaagcactgtatcgcacttgaaatggaggctgaagatttgagaaggatggactatgcatcttgtttaccaaatgacctactacggtgtttatgagaactatacgaaccaagatttactctgttgggagcttgtaggaaagctgtaatgtctaagacatacctgaatctctaaaccttattaaataaaactttttttttctttgaaagggggcctggctcgtcccccagactggaatgcagtggagcgatctcggctcactgcagcctcgacctcctgggctcaagcaatcctcccacctcagccttccgagttgctgaggccacaggcgggcgtcgccatgctgggctaatttataacatttttgtagagacggcatcaaaatatgttgctcaggctcactttgttttcccaactctcaaatgaaggctctggccgggcgctgtggctcacgcctgcaatcccagcaactttgggaggtcgaggcaagcggatcacctgcggtcgggagttcaaaaccagcctagccaacatggagaaaccctgtctctactaaaaaatacaaaattagccaggcgtggtggcgtatgcctgtaatcccagctactcgggaggctgaggcaggagaattgcttgaacccgggaggcagaggttgcggtgagccgaaatcgcgccaccggactccagcctgggcaaaaagagcgaaactccgtctcaaaaaaaaaaaaaaaaaaatgaaggctcactgctccctccccaggaggtgccgcaaccttggccaatacagccccagagttagacaagcagacagagaaagtgtgcagggctggggttctggcccgggcagacgggaacgcggacacatctagcactccgagtccgtcaaggcagcgcgagcgctgcgccgctggaacaagtcaccgcgaaccctaatcccacccctccttaccctattaacgacagaaagcctcgttccgctggtccctgaacaaaaactcctaccctactagtacacagcccacaacaatgcacgctgccggcgctacagcccctaagcaaccggccggaagtcggccccacctcctcctgatgtcacggaaatgaagggcttcgcagaggatgtcccgcccgctcccttcagacgggcgtagctggcaccttcctgagatatgcctgcttgcccccgatttttttctccttgcagtgagaacctcctcatgtggcatctttacttattctcttcttggaaaatccatgtgacctccccgcgcttaaagtgtttccacgttacaggcgacttaaaggcagccctggagcctgacgtataattcgagcgccgatgcagaaaggagtcaggtgtttttttttttttttttttggtttccggttctgtcacctccaggctgagccgggctggcggaagaggcacgtgcgctgctgaatggagctggtcgctggttgctacgagcaggtcctctttgggttcgctgtacacccggagcccgaggcttgcggcgaccacgaggtgagataccgcgtagttagagacagtcggaggcggggccgggaaggtcgggtttggttcctacacagcagaggtgaacattggagcgcctgctgttcactggatgatttgatgaatcaaacctaagagacttaagagaaaagctaaccttttaaaccgtagaatggacattttatcaaaatgaggcaatatctgccttttctagtagacaaaaggtccacgggacacaaaggaaaccggcatttctgcatacggacaaatgagtcgtagattgtggatttaaggatcgatcccataagttgacagtattcagaatttaatgaaagaagatctcgctcttttgctgaatttctgccctggaattttacaaattactagaactagattaggataaatcccttataggtaaagcgataccaattcattatttgttgggaacttatggcgagctgggcggtggagatgcaaagatgctggaggtatggatcttgccttagagacgttgcctacataaggggtggaggactgaggagacgcatagatggagagaaattacagcagaatatgatattactagatgtgtgaatagataaaaaggtcaaataaattatcagtagtcaaataggtagataggactatactcacgactaggaatccgacctcctaacatctagctcacttttattcttgaagcaattctaagcattttctagaaaattgagtacagtacttctttatgaagtcaaggcgtcggtctttaattatccagaaaatttggaagtatatcacttggcctattgctttcgtttattttgtttcctactccagttatttgctctttgtctttggctgaaaagtgatgtgttttgaatagtcaaa

SEQ ID NO: 45826 - DNA, 855 bp, Homo sapiens
cccatccccctttaagatgcttctcaagcagcctcactccctaaaacaaacggatatttggctttgagccacattattctgcagcccccgtattttcttccaggcaggcccttcctggtgtagacaagatcgggcttgagtgacactcctccctgatggcctgcatctggtttataccctgtaacttgttcctctattaatggggtccttcaaaatccagcctcagattccctggtcccgcagcggtggcctcacctctggcgtggccgagctcacgtggtccggcttgtgcaagtcccaggtccaactccgggtctcctgcttttggccactcaggattggacctgggactgatactggtcggccctgcaggcgctgcggacaggggaagcacagagattccccgccgcgttccctggactcaggagctcgccgcgatgccccgccccactctccacccgctgaatgcagggcgcatgctgctacttggcggctcaagccccgcccgcaccgtccccattctctgaccgcccctctcccggtacactgcgcaggcacaacagagccgctcccctctcctcgccccgccaccgggacggagagcgcccgccgctgcatttccggcgacacctcgcagtcattcctgcggcttgcgcgcccttgtagacagccggggccttcgtgagaccggtgcgagtatttggggattattcttattttctgccacttttaacttttagggattatttaggagtttcacggccgtctgcttttcgtccccccgattcagcgggccttcaggccgtgtggtcggtgcttttctcgttgggtattttctgcttttaaaagaagttg

SEQ ID NO: 45827 - DNA, 933 bp, Homo sapiens
aagagatcaagatcatcctggctaatatggtgaaatcccatctctactaaaaatacaaagaattagccgggtgtggttgcacgcccctgtagtcccagctacttgggaggctgaggcaggagaatcgtttgaaccctggaggcggagattgcagtgagccgagatcgcactgcactccagcctgggagacagagtgagactccgtgtcaaaaaaaaaaaaaaaaaacagatggtttaccaaggaatatctttggaaatccccgtgaacatgtgcaaaggaatctgtaggttacattcctaaacgctgtgtcagagcatctcagcagttcaagttgtgattgccctcagaagaaaatgcaccaatttaccctacttccagtggtggctaactttgtggaattggactttttaaaaatctttgacacatgaagctaggagtctgcaaactttttctgtaaagggccagatatgaatattttaggcttcgcaggccatctttgtcccagctgctcatctctgcctttgtaggatgaaagcagccatagccaataagtaaataagcaagggtgactgttccaataaaactgtacttatgggccttgaaatctggatttcatatgatttctacatattacaaaatagtaatcttatttttattttcttcaaccatttaaaaatgcaaaaccgttcttagcttgctgtctgcacaaaaacaggcaatggactagaattagctcactgaccatagtcatgccacccccgatctacccaaaaaatgttatctaatggtttcagtgatttagttatgaattattacatctttcatacatttattgaccagttatattttttctgtgagcagtctttcatcccttttgtccatgtttttggtttttttgttttttaattgaaaacattggatagtctgagact

SEQ ID NO: 45828 - DNA, 1385 bp, Homo sapiens
agcgaatggtggtgcaggaaacacagaagaggagcggctcggaagtgggaatggagataacatcatactgtggacattcggaatccacagagctgcgtggaaatcagatttaacttgctctctctccccatttaagatgcttctcaagtagcctcactccctaaaacaaacggatatttggcattgcgccacattattctgcagctgccatattttcttgcaggtggaaggcaggcccttcctggtgtaaacaaacaagatcgggccagagtgacaatcctccctgatggcccgcacctggtttataccctctattaatggggtccttcaaaatcatcagatgccctcctcccgcagcggtggcctccacctctggcctggcccagcttacgtggtccagcttgtgcaagatccaattccaactccgggtttccggcttttggccactcaggattggacctgggactggagctggtcggccctgcaggtgctgggcctggggactgaggaagcacagagattccccgcccggttccccgccaacggcgctagccgcgatgccccgcctcactccccgcccccgggatgcagggcgcgtgctggtaatccgcggctcaagccccgcccccactgtccccattctccgctcacctctctccaaggacactgcgcacgcgccacgacgtcccgcctttctccccgccctgccgcggccccggggcgcagcgcgcacgcaatcgcgtttccggagagacctggctgctgtgtcccgcggcttgcgctccgtagtggactccgcgggccttcggcaggtcggtgcaggtctttggagagtattgtttttattttctgccacttttaacttttagggattatttaggagtttcacggccgtctgcttttcgtccccccgattcagcgggcctttatgccgtgtggtcggtgcttttctccttgggtattttctgcttgtcttaaaagaggctgtggatgctcggagcacctgagctcctgaggcaaaggcttacccttgtagcatagtgttgcctcgtttcctggtggttttgttgctccagctctttaaaagcctcccttactcagtgccgcctcgagttaagaactgtgggcaagatcccaagcccgctgcccttccccgttttatgggaaattaattctttctttttttggggggtggggaggggttctcgctgtgtcgcccagcctggagtgcagtagcctgaatatgtcttattgcagcctctgcctcctgggctcaagccatcctcccacctcagcctcccaagtagctgggattacaggtgcatgccatcatgcccgatttgtgtgtgtgtgtgtgtgttttaatagaatatgggtttcaccat

SEQ ID NO: 45829 - DNA, 1991 bp, Homo sapiens
acaaaggcagtatagaaataagtgtatgatggaggtagatccatattactgtgggggcacaaggaggggagtgggcatttctgttgagggagtcaaggtaggcttcacaaaggaaccaacagttaagctgagtcttgtcagttgatgcatgaatcagttgacatgaactccttttgtgagttgtctgagaaattcataggtaaggacggggcaaatgtctcagagcgagcaatatatacagtgcctcaaaggcatgaaactatgtagcataactgggttcaaccctttccttagagatctaattcttttttttttttttttttttttttttgagatggagtatggctcttgttgcccaagctggggtgcaatggtgcgatctcagctcattgcaacctccacctcccaggttcaagcgattctcctgccttaccctcctgagtagctgggatttcaggtgtgcaccaccacacccagctaattttttgtatttttagtagagatggggtttcaccatgttggccaggctggtcttgaactgacctcaggtgatccacctgtcttgcctcccaaagtgctggaattacaggcatgagccaccgcaccaggccaagatctaattctttttaatggcttttaagttgtacggatgattactatttagtttactattcccctactgatagaaatatgtcttgtttaatgcctttgatagccgggagcagtggctcatgcttgtaatcccaacactttgggaggctgaggtgggcagatcccctgaggcctttgatattacaaaggatggtgtaccaagaaatatcctcatggaaatccccgtgaacatgtgcaaaggaatctgtaggttacattcctaaatgctgagtcagagcatctcagcatttaaaattgtgattgccttcagaagaggatgcaccaatttatcctcccactagtggtggctttgtgtaattggactttgtaaaaatctttgacacattaagctggaagtctgcaaacttgttctgtaaagggccagatagtgaatattttaggcttctcaggccatctgtgtcccagctgttcacctctgcctttgtagaatgaaagcagccacagccaatcaataaacgagtgtgactgttccaataaaactatgtatgggccctgaaatctggatttcatatgatttctacatatcacaaaatagtcttattttgatttttttcaaccatttcaaaatgcaaatctattcttagcttgctctctgcacaaaaacaggcaatggactagaattggctcactgaccatagtcatgcctgtaagagttaaagaaagaagaaagaaacatgaaacgtggctttgtagtcaaagacaggttttctttacttaaaacctgagaggcttcccggctaatttcggttaggagcactttctcttacagaccctgcacttgatggatcacctggcaccgcccaaattgataaactggctcatctgatcttgtggcccccatccaggaactgactcagtgcaagacaacagcttgcactccctatgacttaatctcccaccggaccagtcagcactcctgagtcacctggctgcccctggcacaccaagtaacccttaaacacttcaatccttgaatgctctgggagactgatttgagtaccaataaaactccagtctcctgcacagctggctctgcgtgtgctctttctctattgcaattccctgtcttgataactcagctctgtctaggcaaagggcaaagtgaacccattgggccattacaagattttgtgtctttggaaagcacttcacatttttattctttttttttttttttgagatggagtctcgcttagtcacccaggctggagtgcaatggcgtgatcttggctcaccacaacctctggctgccaggttcaagtgattctcctgcctcagcctcccgagtagctgggattacaggcatgtgccaccacacc

SEQ ID NO: 45830 - DNA, 971 bp, Homo sapiens
tgagccgagatcatgccattgcactccagcctgggcaacaagagtgaaactccatctcaacaacaacaacaaaatgtaacccttctgtgagttgtaaagtatggtgagcagtaaggacctcaatttatttttttccctaagagctaatgaattttcccagtatcacccactgagccgtcctcccctctttgtgatgccacgtttgtttaccttgtgctgactcatatgttctgcaacattcagctatttgtcaattcttatgccagtacttccactgttaccatcatcaatttaaagattactttaatatctgatggggcaagctgtccatccctatcaccgctctctaattccttattcttgttttaacatatcttgactatcctttcccatttgttcttccagatgacatttagaaaacattttctcaagattaattttaaaaaaagcaaaataaatttttgtaattttcacatggaatttatatttaaatgatgagaatacaataaagtttattattgcctttttattgaagccttgcagacaaaaacactgggtttaaaggccctagacttggaatacatctgtagatatgtcaggtgtagtcacaaaggaacaaagcctgggtgccacaatgctgccctcttgtggcagccagaggctgcacactccagtcccagcaagggatgatactgttgtataaagtgaaccagaatcccacccctaaactgtaaaggcagcataggaaagtctactatgtggaatgattcatgagatgcctttttgcttccatgacagattccttcataactagtctgtcgcaggtctgaatttttatcattgcagattgattccttgttgcaacctcagggttcttcatttgaaccacaaaactcagaaaatcattggtgtggctatttctgcatttctcccaatgatattatatgcctagaaattaatttattacatac

SEQ ID NO: 45831 - DNA, 1276 bp, Homo sapiens
gggacagttttcgtcacacactttctgatccgactctgcaaaccagggctcttaaaaggctccagggaccgcgtggtggaaggagggggcgtccccgggcgccgggagtccggcgccgttgggggggacgggggtgtgcggaattccactttcacctgagcgtcctttgggatgcaccagcgagggctggagtcggacctaattcctgtttttctccctccttttagattttgcaacagttctgaactcagttccgctgcctccctgagacccaatcctgcctctctgtcctaaaaacagtttccaccgccagcccaagcagcaggggagcagaggtgggagatcccggaggagagtttaggggcgggggtctcaggctaagggacgcccggccgtcatcctcccacgccaggccggcccccgcggtccaggaggcgggaaagtggtcaagaggtctgggagacaccgaccgccttccctcgggctgaccactcccgcccgctccgcccctccggggaccctcctccctccagtccttcccctaccggcgtcagggaccggtctccgggcggagattggccctggtagcacagggcgccgaggggacatgcccggccagcctcgcaggtcgggctccggctgggtcggacagagggtggtggccctgcagcccgctggggattacctgtccgcgcctgctgcttacctcgttcgctcccttgtgaagctccggcgtcttgtgtgtttcatctcctaggaaacggcgggggcagcaggcgggcctacggccggcccagagagggcgtggcctcgcgggaaatccccgccaattcccgcaggccccgccttccccggggcggggcttcatggagccgggggactgtcggctgagctgcagcaagtgtgccatttagacttggggtttaggggagttgattaccttttcagtcaggtctttgtcagaagttggtttgtttgccctttattttgttttggttttgttccgattcattctacaaagtcttgattaattaaaatatggttcccagaccgggcagagcaagagaaggaagtctgtttgcctcatacttgcacttgtttacttgtgcctggggaaaaactgttcttgtatgcagttccttaaattggtcaattccttgggtatgtattacctcttgagctgcccttctaagtttgtttccatttattcattcagagaacctgcctagtatcagccacagagttagatagtggtaattccaagaaaaatgactga

SEQ ID NO: 45832 - DNA, 1740 bp, Homo sapiens
ctctactaaaaatacaaaaaaaattagccaggcatggtggcaggcacctgtagtcccagctactcaggaggctgaggcagaagaatggcgtgaacccgagaggcagagcttgcagtgagccgagatcacgccacctcacaccagcctgggcgacagagtgagactctgtctcaaaaaaaaaaaagaaaaaaaaacattgaagggttattgacctaaattccatttacctctaaaatgcttataggcaaagctgttccataagcaacttcccttgttacaataacagttgtgggtaggcaatagagaacatctgtttccacaaaatatattcataaatccagttttaaaatgaaaattcaggctgaactgtatttcgtaaaactgaatctaaaactttaagtaggactgtttttcaagtaaggagcattacagctattttttctatttatgttttgtttgttttcaaactatttcttacacattaacatctactttatattactgtaaatagtgccacttgggtacacccgattaattattgtcactttcactggattcaggtgggagccggaatactgccagcatggtctgctctcacgctgctcaaaatacccgttcaggtatttcccagctccgccacagaggtctacagcacctcctcaagcaaccagaggagaagtcagaacattaccagtatttccaggaaggtggggccagcgggttggtccctgactgtgtgtgagctgagcatgacagcctcgggaagttgatatggagcatgcattagattcagctcactctcaaaaaaagttgtaagtgccaaaacagatgattaatttgctggcatctgaaaaagaggagcggcatgtttgctgcctggcacatatcacttggacctattccttatttgtgactctgatcctgagagaaatttcaaggaaacgtatgtcttcgggaactttagaaagcttgggaaagaggatgaagatgatgactaacattgactggcacctactattgctggccagcatataaggaactttatcttcattatttcataatatctttataaaaaatatctgggctaaaccaagcctgaaaatttttaaacagtatattcatctttgtttccatgtagggcatctcgggaggcccccgatgtgagaaaggtcagttacctgagatctcagtgtgacagaatatgatctgtgttgctttagaatgggggcggctgaccagaggcctctcagtcttgagcaaagaatgttaatctcacaaatgtactcaccatcataacaaatgccaatgaagtctttcttccattgctgcacccacaaacaaatgtttaaactgtttcagcttgtttgctaaggttcaaaatccattttccaacatttgtagagctaagaaaacgctaaaggtcacaaagcccgtattatttctatattgcaaaaatttagtcacagtggaagaagggcagaaacaaaagtaaaacaagggaagatgtggagaacagaaaaggaaagagatgaataaaaagaggcattccattcctttattcattaatttattgattcattaaccaattatttgaggattttatatactagcactgttatatgctgaaaaataaagtcaaatgagatgtggtccttatcgtcacagagttcttagtggagagagagtaatacacaaataaataaaaaaattgcagtaccagtgtcttaaatattataagag

SEQ ID NO: 45833 - DNA, 1532 bp, Homo sapiens
caacagatgttctccctttgtaaccaaagaaccaggctctgctactaaaactgtcaggcagttcatcggacacgggtgaacacacacacacacacacacacacacacagcttactgtcaggcagttcatcggacacgggtgaacacacacacacacacacacagcttactgccgaggagaaagaagcgttactaatccagagtggaggactggcctgggaaatcgggcagagagaggagttgtcggaaagaacacaccagaagcccctccgagcccagacactgatagaaacccagccgcttcccaagccaatctgcaaacccaggaggcacccacgagtgcacagacacacccccggggtgcaggcgcggtgaagggaggagaggggcaagagcttgaccgttagggcccgaaccccagaactcccgaggcagggtgtgtgccgcgcgcgggaaacgccgttctccgctccaggcgtcggcgggcggtggcgagagcaggttcgggggtccggagggtcggagggtgggctgcgcgcgggaatggccgccgcgaaggaggggcggcttcctcgggcatcccgggcgcccggccccgtgcatgcaacaggggactgggcgcgagcgggcgcctcgaggtgccggggcgggaccggggagaggggaccgagacaaagttcccgagacccgcgggcctcgggccgacccgcgcgcccccggcccaaacgctcagctcccgctccccaggcccgcgcggacccggcccctccgagggtagcgggttccagcggcgaacccgcagcgcccgcgccggcgcccgctcggccctttcccgcccggtgcgtgggtccaggagagaaagaaagcgcggcggtgtcggtggcggcgcgcggccccactcaccatgatccgcagcggctgtggcgcggcgacccgggcgggcggcgatgcgctgtccagggtagccgggtccctctgcccggcgctatctcggcgcccgcgccggttacccccacccacacccacgcccggcgcgcgcacacccgcccgcgcctccccgccccctcgggctcgcgccgccgccgcgcggcgctccgagcctcggggccgtttcgtccccgccccctctcccacaggggcctcgccggccgccgcgccaggagggcgcgcgggggaggggcgcagggcaagtgaggcggcgccccccgcccctgcggcctcgcgcgccccctcctgggcgaccgacctcgccctcgcgtccgcggcgtcccctgccggccgggcggcgatttgcaggtccagccggcgccggtttcgcgcggcggctcaacgtccacggagccccaggaatacccacccgctgcccagatcggcagccgctgctgcggggagaagcagtatcgtgcagggcgggcacgctggtcttgcttacagttgggcttcggtgggtttgaagcacacattagggggaaatggctctgttcctgcaggtttgcgcagtctgggtttcttaggtttagggggttgggtggg

SEQ ID NO: 45834 - DNA, 1794 bp, Homo sapiens
acatggggaaaccccatctctactaaaaatacaaaaattaaatgggcgtggtattgggcacctgtaatcccagctactcaggaggctgagacaggagaattgcttgaacctgggaggcagaggttgcagtgagccaagatggcaccactgcactccagcctgggcgacagagcaagactccatctcaaaacaaaaataaaataagtatacagctctccaattaggtttatgtctttctttttaacactgcagttgcttgatgtgtcttttaagtctcctttaatatctacatctgttcatctctttttctcgtaatttgtttgtaccgtagaatttccaatagtctggattttgttgatggcatccctgcaatgggaatgccatagcttaacaagtgctctgcattctgtatgtttgtaaatcggtaactggctctagaggtttgatcagattcaggtgagaatttttttggcaaaaataccatacatgtgtggtgtgcttttctatcaggaagcacaaaatatctgattgtccactctttctatatttaggcatgctcagtactacatccagtgattcattaggggctgaaaaaaactgtggtattctagctctacattcctttttcatttattagctagaatactttaaagaaaaatatcccctatatactctttggttacctaaggggtatagtttgtataggaaaggcaggataaatgccaattgtaaaataaagagctggttcattaaacaatataaaaatgcagagaacaagttcaaaatttagatatgagataggcgaagaataaacagcatttagaaatactcgtgctaactgccaagatcaataatgccatgttaaccattgttgcccaacttgttttttatatcatttatgttctacctgaaaatagagtggctctttcaaagaattcgttttatttatataaactctgaaaaggaaaaaattaacagaaggctttaacatgattgatcgttttcaaggggataggtcagagttcaggagagtgagtcatgaagaatttgtctaaaatcttgtttggtgacctcattgaactaattggatggaaaagtacatgtaacagtaatcttgggacaaaatatagtctatgtccaatccctaactaattctgttaaatttacaattaattccatcagtacttcagcttagttcagtattttacttataatgttaattttgactgcctttttagtttctgtcacacagtagacatttggtaaatatttgagacaaactggccttttgttatttaccccatgccacctgaggtttctatgacattctaaagagaattttatccgattcaaagctctttgaaaagtatattattttattagataatggaaatatagtccctgattaaatgccaatttaataatatatttatataaacaatattgtgaaacaaatgtggtcattacccttttgagacctgcaccgttataagatgtttgcaggctgggcgcggtgactcacatctgtaatcccagcactttgggaggccaaggcgggcagatcaccagaggtcaggagttcgagaccagtctggccaacatggtgaaaccccgtctctactaaaaatacaaaaattaggtaggcgtggtggcaggcacctgtaatccctgctactcgggaggctgaggcaggagaatcgcttgaacccaggaggcagaggttgtggtgagtcaagatcttgccactgtactcgagcctgggtgatggagtgagactccatctcaaaaaaaaaa

SEQ ID NO: 45835 - DNA, 1289 bp, Homo sapiens
agagtttatggtaatacatgtgatactaatagtagctgccttttgaggcctttttatgaaccaagcactcatagtgctttgcatatattatctcagttaatctgtgtaataaccctcagcccaattttacagatagaaaaactctcccatttgagacttccagaggtgaagtaataagaaacagagctgaaccacgtcattctgactccagagttcatgttctcaacctctaggctccgctgcctgagtaaacgtattagaagttaatgccatgctgagtgagtgctatgttattctcagtactttcatgggtgtttgaaatttttcctaggttaacaaaaaaaaaattgaatgctgtcataaaatggccatgtggtcaatctaaatcaacaaactttctgtgtacatggaactgggtaggagctgagcaaaatccatagataaatgatgtttgatctctgccttccagatgctcacaggccaaaggttggtggcgggagacagacagatacaaaagcagattgaataaaaagtgggctgtcgggagtctgtagtagagctgtagacagaaagtgatggaggcagaaaggtcattctaatttgggggtctagggaaggcattttggagaatgtgggagctgcaaggcccttgaatgatgagaaggatattagcaaagtgtaggtggatgaggattgaagatgatgagtattaaagtgtgataccacattctaatgaagttcctttggggcttctctttctcccaattgactacgtggaaatgcacaaagcattcattaaagctttctccccagctcagcaacttgcgacacagacagataggaactaaactctgaccctgccttcactgcctttccaggcaggatccaggttggagtgctgatgttaaggtcatgttgtccacctgtattaactgccattatctgtttaggtcaggcagcttgccaggtctatcttggcaggaaagcctcggttcccaagataacctgttttgtgcctctctgattacaacctgactgcaaccctgcattgttcttggtgagcagtgagcagctatcactgcacaaggtgaccaaactctgtgcttagtggcagatccatctgagattccttttgggtgtgctaagaagcaaggctctcctttctagtacttggagggactacttacttcattttacatctttattagaaaaacctgcttctctggctttacgaggctaagcaaaaagggcgtgctaagcagcaaggttttcatttctgttttgtcacc

SEQ ID NO: 45836 - DNA, 2936 bp, Homo sapiens
tttttatacatggtatttgttcctaatgttgcttcttagggaatacagttcacatagtagggcagctgggtatggcaggatacatttattaaatcaagggattgctgcttagaacttttgtgtttgtttttggagacagaagacaggaaactgtaatttttagaagagtaaaaaggtatctcagggagcaaaagaatcacaggaaaactcgaaggctctgattccttctaaaagagggacacatttaccctctattcttctgggggcacctctttaacaaatgaatgtaatctggcggaagtggggagtttcaattttgggtggagatacagtagttgagattactacagtgtcttgtttcgtagaggtgtaagccagtgcggcaaaatctccaagcttggtctcaaggaggcagctgggtctaacttacaactcaggcaggtgatttgagggcagtgcagctgtccttaagtcacccgcgggccatttctgaaatgctttacttacgaaaagatagaacataacatctgttgcagggggaaaatgagatttcgtgtcctgacccgcgtctgcggcagggacctgagttcttcctccaagtcccaaatagccaaccttcgcccccggcaacagggctaggtgcacgagcaaccagtttttcaggcagccgcctcctctttcctctctcgccgtacttcatcgattacggctagaaacaaaacgactttgtatacggagtaatggttgaaatctcactggcgcctcagcaggacgggcagccagatccgcggctttggagaaggccagcccacggtcgtccgactgaggcgacttgagcaagaccaaaggcagagccgcccgagaatgaaagcagcgaagcccgagtggcggtgcattctgggagttgtagtccctgcgagacaacgccgtcccgactccaccaggctctgcactccatctcccagccgaccccgcgccgcggaggaggcgagcttggtgatgagctgccccagcggtagggggcctggggcggagaagccgctacagccgcggccgggcgacgctgacatctggcatccctggggtctcagagacacgggtggacagcgacgagggccttgtggccgccgtgtgtacccgtgcttaccctctgtcctccctacaggcgcgcggcgtccgccatggaagcgcatccgaccgctggggtctctgggtgccgcggcctcggctctccggggcgatgagggactagaggcgccctgaggcccgcctgcctcccgcgctctggccaccccggcgggaaaaggatcgggcgggcgggcggtcccacagtgcccgcctttgcgccgccccaccccctgggggcgctgccgagggggcgccagccgcccatgccgccccggcgcccagccgcgcctggcgcccgccgctgaagcgcaggacgcgccgccgcccgcgctcaccgccgtccgcgccagccgccccgagccgactgcccttctgcccccaagatgtggcacagcgtcgggctgactctgcttgtgttcgtggccacgctgctgatcgtcctgctgctgatggtgtgcggtgagtgggggcggtagccgcgaggcagttccacacgccgggtcgctgatctgctggggttttttttgttgtttgtttttttgaaaaaaacaaaagggcgtggacggacaattgtcttaaaatcaactgttgtcccttagcctctagggctgagcgcagaggtgggccctttactcatggccggccctcgggcatcctggggagggaaaggacaggctccagggcttcctgcctctgagtgaaactcagccttgcttcaccggcagcgtctgctctttcattctcaccacaggctgcccagattgtaaccttggcctgcattcgaaggtgaagtgattgattggtcctttttcatttgcacagattctgaccttaataatgagaggtgtcaccttcgtttcatcagcgagtggggtagagttgggttttcagcacgcgtgaaattgtttacttagagttcagccttaaactcaattccaagcagagatgtggagaccaggcagagcttagaaacaccggctatattaaacttgcagggtcgggtaacctaactctcagttctataataatggtgctatttcgaatgctgtgcgtattttccttcttggaatgagaggacgttcaacttttttcttcaaataatggtagcccaattttagatctttttgatttctttgtacatgtatagtagctgataaccacaggtctcttagcaaagtggctaagcaattgtgaaaatctaaaaagtacgtagaacacgtgtcagtgagtttacacatatttataagactgaagtatgggttcaggttgatgtaataatgggtcagaattcatacagatactatagggcttgttcattacacgataaatgtacaaattaatacttagtgacgctgtggaatatatgtgtgcacttgtgcatatgcatgtgtatgtatttataaacttatatgtttattttattttttgagatggagtctcgctcttgttgcccaggcaggagtgcaatgcagtggcctgatcttggcccactgcaacctctgcctcctgggtttaagtgattctcctgcctcagactctcgagtagctgtagccgggattacaggtgcccgccaccatgcccagctaatttttgtatttttagtagagatggggtttaaccgtgttggtcaggctggtcttgaactcctgacctcatgtgatctacccgccttggcctcccaaagtgctgggattacaggcatgagtcactgcatccggccttgtatgtatgtttaaaatttgttgtgcttttctgtaacaccaggttaaagcttctaatttacagcctttcttttctgatgagataa

SEQ ID NO: 45837 - DNA, 466 bp, Homo sapiens
caatttctgagatttcatggactcctcttccttgaatacaaacatggagttcagatcaagaggctctgctctttgggctgggtctcctgttttcttatttcattcagttcaacaaactgaatattgagtgtctaccaggaactgggaacacagttcctgtccctaggaatttatgtagttttctctagagctctgacagactccttcacctagtgaattctgatgtccaaagttcagattcctaggcaggtttcccttctgtctacattggttgtctctgctttctcacctctcattcattccaaggtgttttctacccccactattcagtgatgctgctgttgtcaaagtcagtaacagatggcctccatattacccagcctgtggtggtcgcttcttagtcctaactgagcttaaattgtcatattcattccttacagttaagtgatgtctgctagaaacattt

SEQ ID NO: 45838 - DNA, 1956 bp, Homo sapiens
gggactacaggctgcaccaccacgcccagctaatatttgtatttttagtagagatggggttttaccatgttggccaggctggtcttgaaatcctgacctcaggtgatccacccaccttggcctcccgaagtgccgggattacaggcaggagccactgtgcctggctccatatttctatctcttgagccaactgccttctcagtcagttaaacactggttaaactcagcatctgcaaggtcaagcttatgactttctccaaacctggtgttcctccagtgtccctatccagtggcttaagtcgtcagcctgggtatcattcttgatactctctgatgtcctatatccagcacatcatcaggtcttgttgatttttcttctgaagtagctcttgaaaccatatactttcttccattttcttattactgtctgtaggccaggtaatgtagtggtcataaaattagacataaattgtggtctgtgaaattagacttctgtatgcctcttttttcatctgtaaaatgggtattaatagtagtacctatctcatagggcttttgtaaggcttaaatgagtcaatacacaaagcatctagaagtgtgcccagcatatatcggttattccctaccatgataatgctcacttgggccactgcagtagtggctgtttcaaatcactacagcccatctttagtattttctcttatcgttaccgagaatgagcttttcacaactcaaatttgtcttcttgcttagaacatgtgaataggttcccattgctcctagaaaaaaggtagaaaagcttcgacatgccggtgacatgctgcacggcttcatttgctgcctcgtcatcctcttactctacatgctcatggccacatgagtcatcgttcagttgcgcaaacatgctgtcctcactcagacatccccaccctactcactggatccttccactggccgtgcccctcactcacaaacttgccttctctctccttatcttccagtccttctttcaatttcagcacacaaatcactttctcagggaagtgttctttgaacacagccccctttccagacaaagagtttgtctggaaagacaaactgtcacagagaagtcttcctttccctcagtggcctgatcccagacaagaattgaacatttgttggtggatttttttaaattaagtgccaccattcccactatgttgaattaattaaacaatatttcaatataaagtagaacttatatcaaaataacattttagcctgcaatctttttattggaatctgagagtgtaaaatataaaagatgccttattcctgcctaatgagaatctcctgaaagtggcgattttctttaatcagcaaacacaaaagtgtatgttaatgagatacatatttttcaagccccctaattctgcatcttctgtgtccatttcactccttcatctcttctgcaaaggtcaaaggatcctgtccagtgctgctggaacagcagcttgtgaccacgaggtggcgacagttttcaagagttggcaggtgaggacgccttctattccggtctggtcaggggtgtgctcctttagaagggtgtcactggatggaaatttgtttggtaattatgtggcaccctgttttgtgtcataggcattttacctagccttctttacctaaagcggctggggcgagcatagaagctgttgatcaaactggagcacttgagagtgaatgggaggagagtggactatacatcattgggccaggacaacagatacaaaccaggattgttctggccacacaggggcatcttttttctccctctaaagccaagtcaggggacaatatttacagtctctctgacacctactgatgaaggcttgaagttggagagaaaaggagcgctcccaaatagcatttgaattttatctccctgtgtagaactccagaaagcaaatcatt

SEQ ID NO: 45839 - DNA, 2318 bp, Homo sapiens
ggtctcgatctcctgacctcatgatccgcccgtctcggcctcccaaagtgctgggattacaggtgtgagccaccgtgcccagccttcaacagctttacttttctagaatctgttttcttcttagcgattgctatggtttctacaagttccccaaagccctgcagtcttaccttgccagatgccaaggcaaacataaataggtacaaggtgatattccaaggtatttaatcataatggattatattttatatatcttaggctttatgcaaatatgttcatcaatatatcatgtcattagatggggggggtactttcccattttatagggaagtaactgaagctcggggaggttacctgacttgacatagttggttggccagaaaggattagaactcagatttcctaaatatagcatgccatttcatgtcattacatgccatttcacttcatttcatcttaaaaggcttgtaaataaatcctcaatccatctctctttatttgtatgcccttgttctagcaatagtcgtcattatctcccctactcatacccagcttttgaatgaacatgccctgcccaaagtcctcagtagataggcctggatatatgttgaaaacattgaattctgctctcctacctttagattggaccaaggccaggcaaaccataggcttgtgttgctggcgaaagagagacaaatagcgaggtagagacagaaagagagagagagagagagaaagagaaatggcccaatcaacgtggcccaatcagactctttcttgggaatctgatgaacaagagaagggagctaaccatcggaagaggaagccgagatgaaaagccatctatagaagttctgagtggccatttatgggttctgcaaagttacaggggagccaaatgagtagataattagagaaaaccagaaaataggtgagagtgaagtagactgatagaaagaagcaaaggaactacaagaaggagagataatttacagttctagttctccccagacctggctctatcttcactttctgttactgaattcccctactgtggctttactataaacctgcttgcttaggctagcttgaatgggtcttgtttcttgagaccaaatgccttaacccaaatagtcctcatatgttagatatgcaggtttagcctttaaaaaaattgccgtttagatggaacccaggtacacccagttgaactaacaaggtcataaaccttctctttgcttttaaaccccattccgtgctttggagctgattcctgccagtgagctggaagaatcaaaatcataatctcttgaagtgatacctttccttagtgctaggtgggaaatctttccaatgccaagcagtttttgctctgattgaacttacctgatgatgttccagctgcatcttgttctgtttcatgatattctctttttccaatagctctttctgttgcctctcaaactcctccttaccctgttaattttcaacataaagaacatattatgtcatcactgtgattcacttatgctaacaatttcattgacggatgagtaaatactctttattttccactgccttggcaacatctcaaatgcccagtgaggcactgtgaaccctagacgacaggggtggcagaaaaataaagcccattgccatatagggtgccagctttctggggcaccttaaaattttcggagagctactcatgattcccttcaaatctcatatataatgttctttttatagtctctgggttcttttctcatagattatatgtgaacctgtaaacccccaaatgcaggtctaaatgtggtccacctctcacttctagttccctcaaatcatctatagatttctgctccaaggcagtagttcccactgtgcagggtcagacaaccagtaagatgaatgttcaatgcctccatcctctctctctccacttccttcctcagcatcaggtggggctcagttctccttgccacactttcttgcgcttgagggaatttggcataatagttacgtagttctcagtataatctgtgactctcagtcaaattaaaagaatggcagaataagatagtaagcctagtcctaaacaatggatcttggtagatttttttttttttttctgagacagagtctcgctctgtcgcccaggctggagtccagtggcacgatcttagctcactgcaacctccgcctcccaggttcaagtgattcttctgcctcggcctcccaagtagctgggactacaggcgtgcatcaccatgcctggctaattttcgtacttttagtagagatggggtttcaccata

SEQ ID NO: 45840 - DNA, 5556 bp, Homo sapiens
agtcaagcaagtctttttttaaagatttgtacaaccaggccgggcgtgatggctcatgtctgtaatcccagcactttgggaggccgaggtgggcagatcacctgagatcaggagtttgagaccagcctgaccaatatgatgaaaccccgtctctactaaaaatacaaaaattagccgggcaaggtggtgggcacctgtaatcccagctacttgggaggcggagacaggagaatcgcttgaacctgggaggcggaggttgcagtgagccaagattgcgccattgcattccagcctggacaacaagagtgaaactccatctcaaaaataaaaaaaaagatgtgttcaacgaatattgtttatcatgaaattaaataaataaatttattctgttttctctctctcacagtgttctcctacttagccagacatcatattaaagcagtctcttacctcttcactctgataagcacagtcatttagcatgaaatcattgaaaaaggagggttaacctctgtttgctttggtgtgggtttataagaagttactaatgcactcttagaaatatgcattatctataaaatttagaacgaagtgcaactgagtttgaaggctttggcactggccaaacaaaaaggacctttgttaatttttaaggaggggtgttagagtttgctcattgctttggctcgggtgacttgtctgagaaaagataacttctcattttcaaagtgagctcataaagtcctgcccttcaagagctgaatgacctccagttttgtgtaatattaaaatgtatcttgaaacttcaggggtgacattttagatggcaagtacagttctctgcatagccccaaaacccatgtatcgaggcaaacaattcatatacattaggattatctttatgtagaaatgtacaattctggaacatagttgtactttattgatttataaatgaggaaaccgaagtaccctctgccctaggagtattttttgggtgtgtacgtattttgtgtgtgtataggcaaggaacaggagaaagtgaggtgaagtcagaatttaacttttctggaagctttcatttcctctaaacctattttttgcttgttgttagacaagtcatgctgctaatatatagcacttagttggctagtatctgagtgtcgctctgggcaaccagattgcacaatgcctcaaattccaataagggaagtccttgttccttagccaacagcttatgggtgtctgtgtgtgtgtatgtgtatgtgtatgtacgtgtatgtgtgtaatttgtgatgactcagtgtctaggaaggtacaaacattgtagctaatctatttctgtttcttacattacctttcaggaatgggcctggaagacctggctaaaacctttgaatcatttcctgccaacatttggccgtgacccattttggaaggtagaaaatggtccttaaagatgatgtcataggatcttggtaaatctgaatattacttcagttttccaagtgccacctcaaagcaatacttaccccagtccagaccatcacacacattgcaatggcagaccattccatttttaagaagcccttgagatcaatggaatatacaacacattctgggaccatagggaagggagaaactgctgggttgcagagaggaagcttcatgagggggatgaaccttggagtgggttttaaagaatggataggagttcacagggaaaatagaagggaaaggcattctaggtaaatcataacatatgcaaaggaagttctgcccctcagtagaaaaagttaggccaggcgcagtggctcatgcctattatcccagcactttgggaacctgaagcgggcatatcacctgaggccaggagttcaagaccagcctggccaacatggcaaaaccccgtctctactaaaagcacaaaaattagccaggcttggtagcgcatgcctatagtcccagctactgggcaggctgaggaatgagaatcgcttgaacccaggagccagaagttgcagtgagccgagatggcaccaccgcacttcagcatgggtgacagagcgagaccctgactcaaaaaaaaaaaaaaaaagcctagttttcctccttaggtgaccacagaggagttaactaatcttgtctaaattgggcaaaatgcacagaagttaaactctcagataagcccttctttacatcactcatgctttgcatcaaggtgctcattgattgtatatgaatagttacccttacaggacacaggcagtgacattctggaaggtccttcagcgagggaaatgactgtatataatctgacacctctcataccagatggtaatgagctgaaccatgggattcgagcagcagcgtgtgagggtggatgtgtgataagatcagaaccacctttcagttaattaaaggttaactctcatttaacactttgattcttgcttccacctgttcattggttcactgggctgctatctgtgggctgatgctctaccaagtgctcagcctacagcagtcaggaggcagccatggcccctgtgctgatggagcttgtaatttagccccaaactgatcttcagaaagaggtacaacaaatagttccagcagttagaataaaagcgacacatccaaagaaaaatcagagaagcacatataatttcccatgcagatcaactgtgaaatggatgaactcaggtagcaatttcactgatctttgaagcagagaaatgagactattttagatctttttaggcttttggttttgaacatttgtagatttcatttaccccaaaccataatcccatattaagtagaatttttgctgttaaaaattgaaaactttttttcttcctttataattcagtttttcaaattattcgactatgagtaacttatttaatttaggattgcctgtgggttcttggcaaccatgatgcatatttagaaatctttgcaaagtgagaaaaatataacctacatactgttttctaatatgatgaaatagttataagccctaaataaaacaattaatggggcagacatgatatggtttcctagacattgacctaaatgtttattaatttctattttgcagtttttgtgtttcatattttggagtcaaaagatcttttattcagctcccaaacattcttataggcactgggcatattgcctacaacgcctaatggataaaacggccctgtgcacaaaacacagagtgaaaaagaccaatgaaattaagtaaaggtgtcagcgtatatggttttcagataacttggagagtttttttccaccctttgcagaattcttgcagaaccaaagagaaagccacacactcaaaaaacacagcatatgtgttagcaagaaagcacttgtaccttcggtgtgtcgtaagaaacacaacagggctgatgtagtaggaaataaactctgagaaaggaaacgcaaggtgagaggaatgcattcttttaagcccctgccatgctaagcactgagccagggactttctatgtatgcttctgtttaattctcacgacagcctatgaagtagttagtatcattcccattaaacagatgaagaaaccaaggcgtagagatggtcagtaacttaccaaaggatatacagctatggagaaacaacccagcatcagctgaaccctgaaggccttactctctccacaattctcacactgtctgcttgtttcctaaaagggtggggattttatgactatatttctttctctaaatgctgatttaatatgtgatgaatgtcagttagtgtggaggggatgcaagagggtgggtagaggttggagtttccaagagagcaaagttgaagtgatagaaggcagaattcactgtcttttttttttccttaagtgattcattagtagaaaaaagcagtgctgggtaaaacttcggaagcccacagtctgtagcaatatcaagggaattttgaactatggaaagtcccaaatcataatcagattggagcatgtcccagccccttcatggtccctttacagtgtttctcaaagtctagtcctaggccaccacccacaaaactatgcaaggagctcaataagatgcagattcctgggcccccaaccagacctactggattaatttctctgagggaaagacctgggaatctgcatttaaactcactgccctacctctctgggtgattctatgcccattaacatttttaaaccccaccccggtggctcagaataagattccactgcctccttattttcttattcaagagcttttaaagaccatagcttaaactaccaggcatatctagttctgggctcatattatcttacagatgaaaaatttaaagagaaaatgagcaaattgctttattaagccagtcagtaaaactactaaaatgcaaactcagaaaaatgaaaaagccacgcctgatccccagtgtgctgggattatctcttagggcctaggcttaagtcattagaatgattcccacccactgagaatatcctatacccaggaagatgttgacagatgttttttaaagcagttgcaattgcctggaaggctaaaatcacctcctagcagctaagccatctccactatgaaagaaaggaaggaagggaggaagggagggagagggaaggagggagggatggggggagagagagagagagagagagagagatagaaaagagaagtgaggaagggagtgaaaagaaaggaagaggcaaccacactcccatggatgtgaaccactgctctggggtacatggagagaggcagcctagagacccaggatcaggatactgtggagaagcccttggtatttggcagggaaggtgccagggccaccctcttgccctccccatcctggccatgtcactaccccagaccctgactgtgtgatgctttaggcacggcctactcttcagccctggctgcaactcctggaagggctggcacaggtcattttcagaagttgatttcctcctgcaggactcatctaccttttgctaaacagaaaatgttctactgagtgtagacttaaaaaaagcaaaacaaaacatggaatgtgagtgcccgagggtcaccccagcaccccagccctttgacatcaatccaagggaagatgagtccgtatctctgccctctggaaggacggggagccatggggaaagcctgcagggcagtcccagcagatacaaggggaagaagtctgaaggcttaggcttctctgacttggagctgaaaaggttgggtctaaaaaggaaaacacgctaccttcctgccaaagtcaactgtgatgaaagtttagagcccaccacctcccagccaagcatttcctgctctggcctccccttctgcctcacactggctcagatgtgggagagctatttttaaggtgcaaacaaccaggactaagaatgagtgaagttacttatttatagttacacctttcaactgttatttttcccctctggagatagaagccaggttttgttttccctttgaatctacaattcctaggacaaggaagactgaaaagcc

SEQ ID NO: 45841 - DNA, 523 bp, Homo sapiens
tgtcagctccaccactatccatatttctggagtgcccgttctatcttcctcaaattcacctagatctcattgtttggtcaaactgtcttcaaagagagtcaccctttccaatgaagggtacaaaaggttaccaacaaggtgacttatcttaaaatgcagattgttcaggaaaataatcctttgcaggctgtcatgttccctagctgtgtggaatcctcattagccagcaggaattactgcagagagatggctggaatgttcaaagtaaataagatggaggggggtgttgttggcaaagtataaacagggtttttttttgtgtgtgtgtgtccccttttcatgcccgtactctttgcaaccatctatcacctaggaaaccgtcagttactctctggcattttaagttagaaatatagtatttcttcccaatggccctgtttcatttgtcttggcgagaagtcctggtaattcagcctatatgttcttgcagagtattgccttggtcctagtggttggcatttca

SEQ ID NO: 45842 - DNA, 5391 bp, Homo sapiens
catgttacgcactgtacaacttgctaaatttggtattatcaggcaccttcagtactctaaaggcttttatctctgtgtaggtaagccatttagctctgcaaatgggtttactaaataaataaataaatgcataaatacataaataaccaagttgatatttttcaaagcatgttttagtgattttaaatccatagatctcatacaaggtttaaaaaggaaaaggacaggagtcctacatttggattggttgcaaaaatcatacagagaaaaataaagcattttaaaccaaaatatcaaagcaaggaaataattgggaatttaatagcttatgcatgaccatattgactaaattaaagatcctctgtcattattttcctcggtcttgcttgaggaaatacgaatactttcaaagtcctttccaaagcgtttcacggcacacaggttctcctttccctgacctaccccattcaaccagaacacaggactctgactttcagaatgcacctttcttaatggcattgtaagttccgtctgtaatttttcttcagtcaaaacgttaaagaatgaatttgttgcatggtagacgagataaataatttagaattttaatgtaggcacgtaagggctcagaaatttggcaaagccacaaaagcgtctctgctcagccattagcagccaggccaaggggccgctgagcccccgcccgggctgggcctgaggtgggcggggcctcgggcctggcaggcacaaacggggtggggtctcgggggcttctgctcaaacacagctgcgcagagacccttccatcaccctcctgggaaacagcacaaccatacacctccagaccctcaggagggagccttcactgggtaagcaaaccaaggccatcgaggcaatcacctaaccccgccagcccccgcccaattaagaacatgctctgtatatgaaggggattttgtagaaaattcttaataaatgaagcccccgtaatttactatcacataaccacagactgaatcccttctaagagaaatggaaaattaagtacgtatgacagtgactgcaaccttcctgtggacaaataaaaacatacagggaaataaagacagattagataagtgctaaccagaaatgtctgtccggagtaatagcttacattccacagttctcaggattactgcaagtaccttgctgcctggcctgaagctatgtatattaagtgcaaaataagtgaaggtttgttgttccgtagttgtgatccctggggcagccaaaccagataatcaggttaacaacgacaatcttatagggcctgattcataagtctttcagtaaacattttaaggtttgtgctaaatttacagtgcatagagcaacgtagtattttagagataattcctgtctctgggattttaccatctaataattatctggttttactacctaagtggctcgaattaaacaaataactgccaaacatgcacttcattttgctttgtagagttactatcttaaaaagaaattatcctgcaggaatacttgggatgaaatagtcttaaactttctgggagaagaaaacactggccatattttagagaggtcaacgatagctctttctctttctcttaatagtggttaaagtcatgagttctggagccagatcgccttagttctaatcccagctcaccactttctagctgtgtggcattagataaattacttagcctctctgtgtcatttgaaattgagtataaaaataatacccaccttgtagagctattgggagagttgaatatgacaatcttgtgttgtcacagtaagtctcaattaatgttacttcattacttttgtgtctctcctctacttacaataacaaaatcctttcctgaagtaaagttgttcattattaactagagagaaagaaaactttataaaaaaggaaagtggatttcttcagctattggttgatttaatagtcatcatagggcataagtcatgtgttcggtcggagaagttagcttttttgctggtgaaggtgcctacaaggtaataaaaatcatgtatttacatcatttggcaaggtgttcaacaccagtaaggcccagtggagaagcaggtttctccatgaatgccaatcgcagtttacgctgtcagtcactttatcagttgcctttagattttctttccataaagagtaaagctaaccacgatgagatcattgaataaaagtgacttgagactttgtcgctttcgtcactttctagattatagcactcaatgttaatttcagccatttatactttccaataatagacatatgaacatactttctcttttttctgcaagccagttcttattcaacaacagggaaaggaggagcaaaaaagtcactccaggctgagtaatatctggtcctatcattgttctaaataaggaaatatggggtgagccactttaaggaagataactttcctgccaagtagagggatttgtttctggttgcatcctaaagtcaaatattaatagtcttcaggatgaccctttcctctgatcttccctactgatgaagataatagaaagctgatgaaacagaaatagctgatacctgtgtcttcagacagtggtaacgtaggcattactataaagacttttgacatttagacttaaagcttttgaataagattcatagtttttgaacaaaagctttattactgaggctagtcagtggctatcagttagaccaagtatttacaaccttacatcaaaaaaggatggaccagaaaaatttagaaaaaaagcgaagtagcttccagctagtgtacagttaatataaattgtcaatccacaagcctagcacccttgcccaaatccatcttaataataacacttttgtttaaaatagcataaaataaaatagtagcactagcactcatgtctattcatcattcaagaaaaattcatgtccaattcattgcagtctgctttctttgtgtcccctggaagctgcttgcctccttagatgggagtgacttaaaagaaaaaggggaggggggaatatacggagcaagtcaaaaatccttttggcaagaaaaatccacaaacaatggtgtaaaatgcattggaaaataatgctgctgaagtactatgactatgacactctgtaagctttcaggcacaatgagccagcctgagccttcgcactctcaccccattcaaactccaataaaaatgttttcaagaaatggctcatacttatttattcctacatccaatataacataaggatgtcaaaattttccatcctcagctgtgtaatctgggcttttaatttctcccaccaaaagtgcatatggcatactccttccgagaccaaacgattaaagcaaagtctggaaaactttgcactaagagccagtctgagacagactatgcagtcctcattcctctcattacagttccccagggcagtggaagccaggcctggggaagccaaggagacttgagccaatgcctgccgcgattcaagtcagacaccctctgatctccagtggctgctgtgaagcggctccaagtcttaacttctcaccgaggtatttccccggcaactttcagagcagatggactcgggtgtactgtgaacccctggagtgggtctcaaagaccgggtctctgcttgcttgtctgcttgcatgtcaacctcagtgaccgagactcatcttagaactctccgggacacacaagggactgacagtaaggaacacgcatacacaagcacacacccgcaggcacagctttcagcttgcaaggtaacctgtaaaaggcactctcttaccttatacttcatttcggcagcggtgggttgagccgttttcctacactagttaagacagcattaagcactgcggtgcccgcccctccattgagtgcagcgctagatgaaagcgagaaggtcccgggcagagccgcttgtcagtcgcagcgcctccctcaagtctctgagctcactgttgtgactgaggcaggctgatcgcggacctcatttgcatgccgccccgccattggctagtgggacaaggtaatgctcaggccctgcccacccctaattctgaaaaactgacaaagaacttgtaatgtgatcgcttctttttgctttatcagacggtggaaaataaaacagaaagtggggaaccgtcctgaaccttactctgtcctcccgcccccgccaaaaaagaagacagaaagagaaagaacaggaaaaggagatacattctttttaagattaacccaaattttaaagaaactgaattcacaaaagcagtctgacagtcgcgcttcctgtgacctagcaactccttcataaacccatttcgtttcaaagccattcacctcacaatctctacatgaaacgaactccgggaacaaaaggttttctgtctccgggcccctttttactaaccacccctgctgatacctctctctctctctgtccctttttctttccccctcctcccgcctactttttgtgtgtgtgtgactgtttgctttttttgttcttttcaacgttcaaagtactttgcgatgtcagtctgcaaggagctggaagacaattctcccttagtgaaaaggaaccctctagcacacgcaccagcgttttcctggacagcttctcaccagggcctcagagttgcgggtcacacatattgagcgaccttcagtggctttgctgaggataaaggttagatgtgacctctcggatggggttggccagtgcacgccctatacatcatcaccgtccactgagttctgtgttctttgacggctggcatttctagctccagctttgaacactgcagtgtttttccttctgacctctgtcctgaggatgacccattaacccaccaacacttattatccaggagaacgaaaatgcccactgtttgatgagcctggttaaaaagaccagtctctctccagcgaagcacagaacataatttctataaaggttccattttaggatttctatagagaaagagaatcacccagaaaacagaaatggtcaccttctgcaactcttctcacggacagagcagtgaggcgaaaaattcctttttcccgggcaagactgagactcggtgaatccagacaatagctgtccctgagtgggatgcactccaaccagactacatgacttggatggaaaaatcagcccttatttttttttttcctgaccaagttggatcagaatctgattcccttcgcgtctaacacacaaattcccaatggatgaaaactctacttttatgatctaagcaaaaggaatgagagaacagctgtcctacaaaagtggtttccagatacagggttggcaggttagtttgcagttcagtgtgg

SEQ ID NO: 45843 - DNA, 669 bp, Homo sapiens
tctgggcctccggttccacttcctgcacttgccagcactccggtgggcatcccctcctgtcatccttgccgcctgcctgctcttcaaccaagcactcttccttccagatgcttgtgcaggcaggagtgagggaaatggcaccggatgccattctaatgattttccagctgcaactgggcactggcataaatacagcaaaaaatcaagaggaggctagaaagaagaaatacttctgttgacaacttggaatgaacccacgtgactgctctctaagagtgaagggcaaagagtgaagagcatgtgagggcaggaaatgactttggaaatcacctaatccagccactcatagagagggcagagctgtctgtcgctcagagagattgagtgcctcacacagggccccaccagtttgagttataacagcaattggtggtgaggtcaggcccctgaatctcttggtctggtctattctaatgatttctttttagtttctttgcctaactctctcactgctgtcatctatcttccacgttgctcactacgtgtttaattcctggaatacagagtcgatcacattactaccgtgtttaaaaacctctagtgacacttcaatggcttaacaagcaaaatctggacactttggcatggaccaccatctgaacccaccct

SEQ ID NO: 45844 - DNA, 2435 bp, Homo sapiens
gcacaaagagcctttgctttaaagacttactttctcggcaatgtgaaaattttggcagctgcgttagtgacagattggtggcaacattctactggcctagctgaacatttgctctccttaccaccccataccctcccagactgtgcaatcaagagcatgcggtctaaattcccttcctgtcctaaggtgccaacacacaacccacactttggagagtagaagagggaaaacataggctttgttcacttcccagattctctgtgtgaagcaagtttaggaatttatgtgtggttggaacggggaaatatgactattctggaagctgtatatcagtgtggctccacatttccaatttggcttccctatcccagaatagggttcttagagaaaagcatttccatcctcacatctcagaaagccaaaatagaaaagtctgagttaaacacagtatacattcattaaaagaataaaataagttaaagctcagttaaatacatggaaaatgggtatgtggatgaacagagctattcatggaattcaggtaaattatgacatctgcttaatgtgaaaatcacaaataaaatcagatgacatttaaaatgcaaaatcatacattaaagtgtaaattctgggccaaattctcacccaatacaatttgatggaaattgtcttatagaaaatgagttattcaatttttttcccatttcctgatggtgaaaatctggggtaaccagtgttttaacaggaaatctaaaggaaatgaacaatatgaccttggctaatttttaattctgatgatttcatgacatgcatagtaattgcatttttggttttgtttgactttatttcaaagctattaaatatacgttcgatgcaggggatatgttccagataaaccattgtttgaatgttaaaattcatttaaatcagataaccaggcaggattttgtagcttttttgtgtgtgtaagggggaggattctgattaaatgtgaaacaactcaaagaggttcaagagtctggccttcatgattaatagtctgcagtagatattagaaatccagacagactgaaggcaaaatgccttctcttggtagacagactgtattctaacctccaaggactctgcatatttagccactctcaattcaactgcctttgccagcccaggcttcattggattagaaagtagtggaaaaaaaccctcccaggagtgatcgtctagaattcctttagtgtttaatctgtctggcgcatggatggccctcttgaactgcagggagcacatggcagagagaaacgtcttgggctggctggcttgtgcttggaaagtgaaagcaagctgttattttcgccttcccaattcacattcctggcctttgacatcatgaggtcattgtttggttggctggaagggtgtcacacgtggataggtgccatgaggtcacatgtgcataggtgccatttttgtctgggacatttacacagggtacttataacctcttttggtagactgagccctgttgctctcaagaaaggaagtttgttcttagtcctaacccaaattttaatgtatgcttctgtaagcctacatccttgcaaaccttagtcaagatagagaccatttctctcacaataatccatgtagatatcagagcatctcttagtcttcttaggttcaagtctagacttgagcttattagctatctgaacacgggcatattccttaattcctctatgtctcagtgtcctcatctttaaaatagggacagtggtagagcctccttcatggaagaagggaaacggcaaccatcagagttccccggatgtggaaggcaggtctggggcaaggaaggagggtcagcctctgctgccattcttgtagatggagaaggggctttgcaaccggctacctccccactggaaatgcagattgagcccaggggctgggcagtggcgagagggggcccaacaaaagctggactcccatcacctcctcgaggtgacaggagcatgcccaggctgcagtctgagtgagatggcgcccccagaggaagaatcagggctctgtgaggaaccacatgccccagcatcccgcgctcataggtcactgcttggggaaccaccagggatagtggagtggtgtctataaagattgagcaagagaaggggtccccaagaattcaatctctagcccagttgttccttgagtaagaaagcaggaggcagatatttaggaacgaatcaaacctcaaggaacacagcatccatgggttctttttgcaaataaaaagtgtgtcttgaaaaccaatccagccaaataaaaaatgaatcaaaataaagaactcagaaactgagaggctgtggattcgtttaaaacagaactgagaccaaacaatttggggagtaaggctgaaaaaaagaatttaaaggtca

SEQ ID NO: 45845 - DNA, 568 bp, Homo sapiens
gcatttcttatttgtcaattaaaatacatacatacacacacacacacacacacatatatatatatacaaaattttttttaaaagacctcctgcatgttctcagctagtgaatggtctagcaaggaggccgacatgcccacaggcagcaagctcagcactttgtcaagggtgctaggatagaaacaagcacagagcaaacagagcaggtgtgactgatgagttaatggtttacttgtattaatgctcgttcagtataagctgcaagctgggaaattcttccaagccactcaaatcactcagcattggacttttgcttttctggtgacacatctactcaaactgggggaggatgttcttgtagttattggctttgctaaagcagcacccacattaaaaaaaatgagaaccgaagataggaagcacatgtttcaacctcctcaaacgggaagttagattctactttagataatcactactttaaagtgttttaatcataagaaatcatctcaagacatcattagatactgatggatcaatctatagtaaatttgtggagatgtcataaatt

SEQ ID NO: 45846 - DNA, 1233 bp, Homo sapiens
ggttgacttgtgaatgagagatgagaaactgcagacagtctagacttctctttctagaaacttggctgtaaagaaaagatgataaacgggaaatgggtgacagcatgcgtggccagtgcacccgagaacaggaaggcacacgtgatagttaattctatgcgtccacctgactaggccacaggatgtccagacatttgggcaaacattattctgggtgttctgagggtgttttgaaatgagattaacgtgtaaatcagtaaattgagtaaagcaggtggccctcccgatgcaggtgggccttgttcaatcagttgaaggcctgaatagaacaaaaaggtggaccttcccctgagcaagagagaaatcctcctgcttggtcgtctttgaactagaacattggctttttctcacctttggacttaaatggagatatcagatcttcctgggtctcaaacctgctggcctttgtgctagagctatgtgatccgctctcctgggttccagagcctcagacgcagacaggaaccacaccatcagctctcttgggtccccagtttgccaactcattctgcagatcttgggacctgcctgcctccatgatcacatgagccaagttcttacaagaaatcactttctaaatatatatgtgtatcttattggttctgagaaccctgagtaatgcagcacaaaatggaaaagaaaagagaaaaatagaaaagaaggaaggaaggaggggtgagaggaaggtgtggagcgggggatgagaaacacagcctctgtgctttgcaagtgtggggagacggcgggtcactgcatcattgtctgtgatcgctgacggcgttgatgactcactcatgttacataattagaattcaccttcagactttgctgtcttaccatttcgtctcatagaaacaaggcttcctagcttggcttgttttcttgttactcaggggctgttgctagcataaggtcatacttagaaagctgaaccctcaataagattactcagagacttggcagctttttccctggccattttgtctttaagttaaaaaaaaacaacagaaaacagctcactcttctaaaatgacattacacatcactttgaaatatgtcctgtaggccagccctgaaatgtatggtctttctggacattcattggagagaagctctgtttttaaaaatgtaaaaaaaaaaaattgttttactctaaaagagcgtctctgataa

SEQ ID NO: 45847 - DNA, 5948 bp, Homo sapiens
actctcttcccctagttagttatcccacaatcttctttggattatgacctgaagggacacttctcaggctactgactgtgatggaatgactagtttcagactatttcgtctcctgtaaacaattagaaaacaggacaaggtatgtgaagcaagatagttttcagacaatggaaaataaacaacaccagactgcaaaaatggggagaggggagtgtgaggtgagccccacagtagtccagctgtctgcctggagacttgagtttgagcagagcacaggactcttgctgggctgaagaggcagggatcagaatctgaggcaactgaaatagctggaatctgtgcaaagacaaagccctagaagtccttgcatgcgtatgggaagcccctccctcagtccacggctgagggcttgactgtatatgtgcagggaaaaccatcagaggcttgccagatgtcagctgctatgaggttgagactgaaacagtataacagaggttgagaagttctgggtgtaaatatgcgaacatttagattaaaattaaaattgagttcctcagtcacactagtcacattgaagtgttcaatagccacatgtggccagcagctgtcctattggatggtgcagacacagaacactttcttcattgcaggtactattgaagagtgctgagctagagcttctacaatgtaacattcacaatgcccagtattcaatgataaatcactagacataaaaaccaacaaaaaccatacaagggtagtgtaatccatagtaaaaaatgaaagcaaaggaactattctaagatggaccaaatgttggatttagaaaataaagacattaaaacatatatgttttacaatatatattcaaaaaatatattaattaattagagacaaatggccctaagttgtgagtaaatgaggaatttttagtagataaatgggaaccctaaaaagaaacaaatggaaattctagaattgtgcaatgcctgaagtgaatcattcatcggaagagcttgccagcaggttggagatgatagaagaaaaagtgaagttggagacacagcagtagaaaatatcaaatctgaagaacagaaataaaaaatattaaggaaaaaatgaacaaagggtcaaagacctatggaacaatatcagacagtctaacttacgtctatttggtgtcccagaaggaggagagagagagagagagcagaaaaaatatctgaagaaatagtggccaagagcttcccaaaattttaaaaaatgacttaaaaatccacgaagcccaagtaagatgaagataaaggaagccccacctaagtacatcagtcaaatgactgaacactgaagataaagtagaatgttaaaagcagccaaagaaaaagacacatacagaggaacaaagttaagaattattactagtgctcatcagaaacagtagaggctagaagacaatgaaacaacatctttggagatgtaaaaatcctattcacacagaattctatataaattgaataaaaatagtcttcaaaattgaaggtgaaatgaagacattttcagataagcaaaatctgagaagattcatcacaagcagatctgaactacaggcaatgctaaaggatgttcttcagtataaagagaatagtaccaggaagaaaccacacaaagaatgaagagtaatagaaacaataagtaactgagtaaacaaattataaaacattcatacaatagactcagtaataaaaaaataatgactgataaatgcagtaacatggcttcaactaaccaaaggaagccacattcaaaagacttaacatgcatagttgcatattaaattctaggacaggaaaaactaacctataatgatgtaaatagtatctgtggtagcttgagtgggagtaggagactaaatatgaaaaagaaagagggacgtttcaaggaaatggaaattttctgtagcttgattagggtagtggatgtatacattagtcaaaagccactcatctgtacacttaaaatgtgggaattttacagaagataaattacaccatggtaacattggctgaaaaaaaaaaccttaaaaaaggtaacttcggcccagtgccgtggctcacgtctgtaatcccagcactttgggaggctgaggcgggtggatcatgaggtcaggagttcgagaccagcctgactaacatggtgaaaccccgtttctactaaaagtacaaaaaattagctgggtgtggtgtcatgcgcctgtaatcccagctactcaggaggctgaggcaggagaattgcttgaatctgggaggcagaggttgcagtgagtggagatggcgccactgcactctagcctgggcaacagaaggtggctctgtctcaaaaaaaaaaaaaagtaccttctcaatgaggctttccctgagtaccctatttaaaactgcaccccactactccactactccctagcacatatctctgtctaacacactggatatttttgtcttgctttatattacctcctagaatgtaacttccatttgggcaagaacttttgcctgttatgttcagagctgtggaccataccaagaacagtgcctagcacaaaatgcatgctcaataaatttacatgaatgaatgaataaaggaatatatgaatgaatgaatttaccttctttactgctatcagatataagatgagtagacaggctaaaatcatactgtgaaactcaatatgctgtgaaactcaagacaccagattttagtctaattccaatttacagggcaagaaacctaagtaaaagggtattaaacatagactaaatacacgggccagcagttggcatgctatgtgaggtgcttcatctaggctcttgggtgaactatagatgtttacaataaaggtaaccagatatctgtctgtactttatccattggaagataggactgttttagagaattaggataagggggagagaagtgaagttatttctcaagagacagggtgagtaggctgctatctatcaccaagcaatctactacatcctggcctcttttaagttttcagtgaattagtaagtctaaactcttaggtgtagtgggctcatgacacttgggttgcatacatctctggctacaaaaatgtgctgataagaatatgtgatagacataatattctaacatgaatgtgagcgcaattccacagttagaaatctcacataacatcaaattccagagagttaaaaaaattcacctggtccactctgttggaaagtccccgttgttgaagatgtttatcctggagaaagagggcaccttcaaagtggcgaaaggctaagataggagtgtggacaaaatatcagcagcatcccatggcaacacattcctgtcgtaagcatcacactcttccaaagaaaagatcaagctgcatttaagtttcaggtggggcatgtttatttcaggtaagcagttgataaaataagattccaatctacaaagtcatgtggatgactctgcagtgtgtgacctcaatgccacctccttcggggcaaactccagcctatggctgatctctactgcacctagatggcatagcacatgctttagcatgtgactacaatctgcttggtgctgtgtccaggttgttagccagcactgcgcctctcctcctgtgtccatcatgagcatcagcctctccagccctgatgttcagaacacagttaccttatctcctcatttgcttttattactaaaaatccctttcatttcttgttttcccatctctctttcttttcccctactctccacccattacagagtcagtattcaaaaaaaagtggagattgggaacaggtgtggaaaagagtcgaagtactcatacttctcatttcaagcccttctgctggttaaaattataaatgccaggagtcagccctttcaacaaaaaggaaaggaatctgggggaattcttgtggaagtagagaagatattatggaagaaaggtatttttgtaagatcttgtctagaatagggcggtggagaagagggcttagaaagagggaccggggtgaggcaggatgagaaggggagtgagagtaagagagaaaataaacttacagattcttagagaagaaggagggagaagaaatccacccaagggaatatcaaagataactcagcagggaagagctggggctagggaatgagagatgaagatgagctgatttaatgctttaaatctaagccaagaaaactgagtgacaaggaactgtgacatctgtgacttattttgacagtgtcttgttttgggcagtgtgagggagtgtcagggttttgagttacttgtacatggagctgtcttggttctcaggacagcaatagaagagatggagcatcgagcaagacagcaggtgagagagagagagtgtgtgtgtgtgtgtgctacatttgaacaccttaaaggagactcacctcctgccaactatatgtggagccaggatctccgcacatccctatgctgtgatagctacaggggatcgtggcttcacttccaggggaaccttagatcatacaagatgggaactgctcttagctctcctgtcttccgccaccaagtttccaaagagacttcctggagtaggaatgatcttttcaccctcatcaacactggtagaggacttttctctgagtagaaagtacatgacacatcatgcattggttgcaaacaccaatacagtaggaagtaaagcagcattttagctgagatcgaaggccaagtcagtgtgagagacagagcataaacaatttccaagtttatcttgtaccaccattccctggctcatgccttgcaggccaactggcctcctggttgttcctcgaacacaacttctgcacctgctctgtttgcgtaaaagctctgatctcagacctccaggtactctgcccccaggacctccctatctaaggcatctcctacaacaccatgtctcattttcaggttcttcatggcacttgccactctctgacatggtctagcgtgtttatttatttatttggcttttttgtgtctccaccattagcatataagctccatgataacagggatcttgtctattttctccagcactggggacagtgtctggcacacagaaagtcttcagaagatgctctttgaatgaacaaacatggctgtgaatgtaatatttgtaccttttatgttccatggaagggttttgttctgcactaggtactgattcagtacattctcccagtcctactattccatgtcatgatggtggcagcccttaactgactaaagaatgtgggagaccagtgctaacagttcaagacccacccaaaagagcaacgctgttaattaagggaacaaatgtctgtggttcactttcgttgtactgttataagaaggctcggaggcccccccccccgaggtgagtggaaagccctctctttactgggtaaaataaacccaattatgatggatacactagaattcccaggcaaagatgtcttggctctgtctttgattcatctccatagtttctgtttgaggctggtctggactctcatcggggaaggagggggctggggaggactggagttatagataggatctggactgactgctggttgagcagccactttcaacttttcaaggctcttgacttgctttgatcactcagccagtagctgcttagggcagcaaccctgaatttgtgcttagtagggggctggctcatgggcacccatgtggagaggatgtgcaaacctcttttctctgtgggagctcatgctcagttggcttcagcccagagcatcttagtcaggactggcctgaaatttgtgttgtgaaaggtcagccagcttctcctgttacctgctccccaaactccatttctatgctccaaccccttcccctcatccttcatgtatctccatgg

SEQ ID NO: 45848 - DNA, 1917 bp, Homo sapiens
gaacctaaaataaaagttaaaaaaataatccttggcctatctagcttagagaggctcttagtttgaaagagacaatggatggtgtgcaaattgaaggtcacattatccttctaggctgagatgttcatagttcacagttcttcaggagctggcctgggcaatacagtttgatctaatacacaataaactaattgacaattggctgttaatggccaaagagtgcaagggttataccatttacatggcatataaaaaaggtacatatatatctccaatcttttcatgtacatccagtcctaaggaggaaattattacaggtacaggatttcagtctgacctcaagaggcaacatcttatgggaaaagaggcttttgaacacttaagccgtggttttgacaattgtccttttggccatgctcaagggtatacatacaaagtcttgtatcatctgggcagggccaaagatgctaccacaggccaccatcaccattacataactcattattttgcaactcttgcctcatccaaactgtgtttttctctcagttcagtttctctttcaaaggacctgattacaaattgcaaaggccaggcagacctgggcaaccccaaacagaagtctcatcatctgctttggcaacttcctccgtgactaactgtgggagcagaaatacagactcacagactctcagagtggacaggatcttagaggtcggcgagcttggtcttccctcaatgtcactggtacatcaacacaatgattggcttattgagcccctacttagtgccagaggtcatggtgggtgctggaggggatatgactaagacactgaacaaggccctgccgctgacctcacagtggggagacaggtgagtgagcaagtggtcgggatgccctgatacacatagcgtaggtaaacactcgggggctcatgtcagggagtgtcaaccagggtcggggggtggtcagaaaggcgtcttgacagaggtgcagtctttccacacctccttgtctttcttgacatataatcgacaaacacaaatttatacatggtaatgtgtacaacttgttttatatatacattgtggacgccacaatgatcaagcgaatcagcatttctatcacctcacagagttgccattttcttttgagaagtggattcttaaagggagaaaagaagtgagctggcaagagattcacaggtggaagggagatgttccaggaagagtttacagcatgtgcgagggacatgagccagaaaggaagagagatgggaagaaggaagggagagacagagagggccaagtgaccaggaccaggaccaggaaagaaagctgagctctttgcatatttagggaactgccaggagtccccaggctggaatgtgaagttcaaggcctggagcagagggagctgagactggaacagtaggatggaccagttcaagaggggcttcatggagctggggcttcatcctgatggggttcaggacatattgcccctgaaaatagaaaattggcatttgagaaaacagcaaaagcagaaaggccactctcaccttcccttgttctacccttctctctgaggccggtcatcagtcccaggaaggatttcctgactttcccctgaagtaggacattggaccctggtgtgagtgatgcccgcatactcagaggaaaggaacatcctttttctgaagacacaaggacacagaggagaatctgagccaacagatgtggtgacattccctccaggttatcacccgctttgctcggtcatgcctctccatgactgtccactcttcatccaatcgagcatagcaaatacacaggtttccctgtttctctggttcttcatttcccctcaaaggcttctgtgtcatgtaaaacttatattctatgcgtttgtatgttctt

SEQ ID NO: 45849 - DNA, 7508 bp, Homo sapiens
gcttgtatcacccccaaatttatatgttgaagtcccaacccgcaatgtgatggtgataggaggggagggctttgagaggtgattacatcatgagggtgaatcctcctgaatggatgtagtgccgttatgaaagagatcccagagagctctctacctcttttgctgccatgtgagaatacaatgagaaggcagcaatctgcaacccagaggagggcctcaacaggcaccctatttcagaatgttagtctccagaactgtaagaaataaacatatgatgtttacaagccgcctagtctatagtactcggttctagcagtccaaacttatgagtacactgacataattccattttcatccctctctttctctctcttctgtgtgttctgcctcttgctttgccttttcatgtcttctgccatttattagcatgtgtagactcagctagtagcaaccagggctaccatgagcactttgattcttatattctatgagcttcacatcttatttttttatagatgccattatttgttcttcaaattatggtattaactgcagtcacactattctttcactataactcttgcttgcttttctcaccaaagggagatatttgtgtaggtgtcaaaatctggcactgcgttgactatagtcatccaggaaatagtcacctactcacttgggatatgtcatgagctgccagacccaaagatgaagctcttttattaagtggaagtgcattagcatttgagtgttaatggagcagacctttaataaacagtcaccatgtgtgaattctattcttggatctatggggacagaaatgactaagaagtttacaaaatcttcatttattggaagggacagatgtctaacaactaacaatgctaatgctgaaataaactattgctctaagactctgtttcatcttactctacaaccatatggcaatctgcattgatgatgcataatttttaacttaaaattgaaaggattcttctagccctgttcccattttgaaatccgtctttgaaaaaaaaaatactaaaagatatctaaattggttgcagtcaatgacttcatttcaatgcatagactttggtggtgcaactgatttggcatctactacagttgcttagcattcacagctagctattggacactctgctgccctgcccactgacataaccaaagaccagaaaacctggtgaaagataagatagaggtaatcccatgattaaagagattgattaactactttgcattgggagaagtaggtgggagaaatttctttgtcagattttttttaagcctaaaaatggtttacaatgggatgatttcaattacggcgagatgattcactatctagatcttatggaagaaaattcttatggatttgtggatacgtatcctgaaaaatgaaggacatcaacaaagcaagcctcatggaatgggggggaagtctgaaatatgctcatgtggggcattaagtaccagaccataaatgcactctgagtggtttaacctgagaaagaagcaacctaatggtgcttatagctccaagaagctctgtcttcagaacacaactggaatgaaaggctccatcttctctgaacctgaaaagggagggacccaccaacaacatccccagttacggtttgaagaaggatgctactttgctcatgttagggtgatgtgaatagatgcatgaaccttttttggggatatgtgaattcagattccagtttgttccattttgactgtgtagtcattctaaacctgagtatttttttttctgcataatagtaagggctaaaaaaatctgtagggcttcccacaaattaggcactgttgtaagcaacagatatatatattaccttatgtaatctcacaacaatcaaaaggtagcaagcagtaaagagttcacatagcaggtctgagactgctgtctcaatcctgcttgcaaggctggcccttggctggcatctgggaacatgtgaggggttcctgctggtccgtgatatgagtggctcactgtgacttaactgtgtgtgcaaacaacatggtttatgctgaacacctgctttccttctgggagtctggaatttgtgtacatgccagacagagggtgtctaagtgaccagctccaaatcaaaactctggcactaagtatctactgagcttccctagtagacaacatttcatacctgtcataactcgttgctggaggagttaagtatgtcctgtgtgactcccctaggagaggactcttggtagctcatgtctggtttcttctgttgctttcccctttgctgattctgatttgtctttgaggtaatagaacttagctgtgggcatgtctctatgatgaatcctgtgggtcctcctaatgagtcattgaacctgggggtggccttgggaattccccccaaaggtgtgtgacattataattatctccattttaaggtgaggaagctgattcatggagaggttaagtaactataccaaggccacacagcaggtacatggcacaactaggatttgaacccaggcaagctgactccacagcttttgcttgtaacccttaaggaggctccaaagttccctcattaagtggttgtgaatcaaagcaggtgtgttcactcagtacatattaagtgctcaataaaacatagttactctactgtattaggatgtaatctcccgtcccttctacctactaactagaaatctatcatgcatttttcgccatcccactaacaagcagaaagtccctgaggctgaaatatctttgaagaagagggagagaaatagaatggatgtcatgctatttttttaaacaataataactattatggtacagttcctttataagccaaatggagcctctgcatttcctctcctctttccttacctgatccctggcctctctcaccctggcaccggggtaagagcggtgagggtcagtgtagcaggctgggcattcagaaaaactgactggagcaagagttggaggtgggtgggcagatttaggggagctcttctcatgatggcgactatgttttctgccactcaccccccagatgggaacacgctgtctgacaaacagagtacttaatgttctgtttgttgaaatcatttctcaatcaccctcacccctccctacctttcaagtgttctagttaatgcagaaacatcccgtttctttccattgaggaaaccaagtgaccccaacattccatagacctattcttgtcctactttcaaaaaaaaacagctcttcctgctgaccgcctgcctataataagtcatagcttagttagtagatctgaatgtcctagttagagataagttggctgaagcacagtacatctacgtgtagaatttggaggaaaggactgaagaaagataccgtgatttaaaaacctcatcttcaccctacactccttgaaataagtagagaagcaaagcttcttatgtatagtaagaaatatagattaaaaggtgaatagcagaagagtggtggcttggagttacattaattgaaatcaacaagaccaaatccttccctgcaagcacattttgatgaggtaaaactggaaggagtccatggatattcagtacttaaaaaaaaggcttgatcataacaaatgccaagaaaaagaagaaagaaaataaaatggggccgggcgcagtggctcacgcctgtaatcccagcactttgggaggccgaggtgggcggatcactttgagctcaggaattcaagactagcctggccaacatggtgaaaccctgtctctactaaaaatacaaaaattaggtggatgtgatggcatgcatctgtagacccaactactcggggggctgaggctggagaatcacttgagcccaggaggcagaggttgccgtgagccgagattgtgctactgcactccagcctgagtgacagagcaagagacacagtcaaaaaaagaaagaggctgggcgtggtggctcacacctgtaatcccagcactttgggaggccaaggtgggcagatcatgaggtcaggagtttgagaccagcctgaccaacaaggtgaaacccagtctctattaaaactacaaaaagtaaccgggtgtggtggcatgtgcctgtaaccccagctactcagcaggctgaagcaggagaatcacttgaacctgggaggcagaggttgcagtgagccgagattgtgcgtgggtgacagagtgagagtctgagaaagaaggaaggaaggaaggaaggaaggaaagaaagaaagaaagagaaagaaagaaaggagaaagacagagagaaagaaagaaagaaatgaagaaagaaagaaagggggagcaagacagagagagagagaaataaaagaagaaagaaaaaagaaaaagaaaggaagaaagaaagaaaaaagaaagaaagagagaaaggaaaagaaagaagaaagaaaagggatttaggatgaaaaactggtagtaccaaagggtcacttcatacttacagtagattttctcatgggatagccattagaggttggcactttaaaagcaatgtatgagaggtggaaaccaaaacagaaactgcctatcttgaagtaagatgcattttagtctgatgaaaaccagcgtcttcacaccaacaacgtgtgctgaaaggatgcacagcaaggagttgcctcgtcattgaatgagctctaagcaaatgacttaggggacccaggcttcagtcctagctgtgtcatctgatcagttgcccaacttcatgtgagttacgtcatctttcccaccgtgatctcctcagtttcactatctgtagagtgggagatacaataaacatgccccaggaccactgtgaaagtgaaataatatgagtcaatgtgctgtgttaattgtaaaataatatctaaatcttggctgttaatattttgatccaatgttgttacctagcaccaagattgaagagataaatcaaacattaaaaagaaaacctagattagtttttgctgtactgaacattaagaaaggagggttacctcgagaggagaaccgtataaagctcaattaaaatggaaagggcactgcagtggactctatgattggtcaaaatattaggctttcttcattaatccttcctccttggtttgtctggttaaaatcacacacagtggtctgaaagtgcagtgggcatcaattaagatttaggtcagagcctctgaggtagccagtgatttagtttctgggattaaggaagacaaaagcttaccgatggctggatgagaataacattcctttctattgtgatcatcctacatcaaggaaatgtttgaaatttagggagtctgttaaagttattatatggccgagcttttgaaaaacacagcagcacaaatgtgttttatcagtctttactgttggtaagaatcctggagaaaggaaatttgatcagtctcccaatgcagtttactccaaaatggatcactagtctagaggaccaactgcatctatcagagtcagatctatctgccaagactccccacttccctcaccatcattcacacatcctgtgctttctttgcaaatgatacagactgtcattaggtttagagtaagctgcaattagcaagtctctcaacttctcttacaaggaacttatttttagtggaaagttttgtaatggttcctgtctaatgtttaactcttccctggagaccaaactccctagctcaatcattgacagcaggattccaggagtgaatggcatccctttgaaccaactagtgactgtaattgcttaaacctagctactagccatttcggcaccttctacacagcaccccttgcaaataagtccggcagagctatggaattttggcctttttgtctgaactctcgggattgtatgagactggaccttggttcttaaaagggctcttcagtgtggtcagggctggtgatcaaaagcatcagtctcagcacctagtcacatgtgtttttcgtgttttcgtggatgaggctggttctgtgcttgccaaggtcaagcaactcaattacccagggcctgcttggaagctactgtgcgcagtctggccctcagtggcttctccccttgcccttgggccctgatggctgtttgcaagctgggaagaagacaccagggctggggggtacccagaaacccaaacagatggagaaaagtttcaaaaaggcaaaacaatgaagatttgcttaatttacagataaaataaaataaacataatttaatctatcaactatatttattcctgtggttcttcattagcacagaaaaattaagaattgtttatattttaagagtaatacaatgaatctttcttctattcctgaatgagtcacaccgaagtaactaccacaactcttggatacgctactaatcaacacacaataaaacaaatgatcgccatggttttccaactttaaacccacttggaaaaagttccatgctggtgggagctacaccaccacgtagctccatacgaatttgttgactgatgactgacacacagaagggtctacagaataataaaggaaagctaactttaaaaaaccctccttctatttcatttgagtgcttgtacatatctgcttatgtttatcatctagtcatgaaatatcatttcggctttctttacagaggttggggtgaatttaactggatcatttcatgtatcctataagcctttgggttttgtttttttcttgatcttctggaattcttttttctgtcaaaccctactcattctttacatcccttctcttttatgaaaactcattccctctcctcctcttcctcccactagctaatatgtattgagcacttaatgtgtcagataccactttaggtgctgtgtgtgtgttgactcatgtaacattcaaaatcatccattgactcataaaaccttcaaaaccaccggtgaggtagggctcttattacctcctttgtgcagatgagaaacagagaaacagaaaagtaaagtaatttgctcaatagcacatggcaggtgggtggtacaggttggatttgaactcaggcagttggttctctcttaagcactccaaccttcttgaatctgtccatttcctgaaccctgatgatcatttccccaacttatgttgcttgatagttgctttgtgaatgttcccatgctgcagagaaagaatctccttagagagtatgccatgactttcttacattgcttagaactttttttttgctttgccatttatttttatcaattatttattaacaaattaacaaaacaagaaaacaagccaaaacaaaaatggtcaaaagataagcctgacgaggggagaagaattattatttttaagtaaaataatcttaaaaacacattcctactgttaaattttattaggaactccccatttctccaaccattgctcctgtgtactacacaacctggcatgcatgagtgattgtgcacgtgtacacacacagagttttt

SEQ ID NO: 45850 - DNA, 1595 bp, Homo sapiens
tgcaaaatcccttttgccatgtaaggtaacatagtctcaaattctgagaattaggatgtggacatgtttagggctattattttgcctatcacacatagagatgaaacaactcatgttcgtgcaggatacgtgacttacccaagatcacaggctggtaaatattggatctattagttaaactttttcagcgagtctgatgcaattagattctctggtggaaattcatgatgaaagagatgtaaggaactaatggaaattactgatgaaagggacataacaaagaaatgcagagcttgaatggacttagttctgagtctcacactttgttctcagtctacagataccatgatcttgatctctcaaaagcaggcattggcacaggaggtgcctgtctgtttctgctgccactcttgacatctctcagatgaccccttctggctcctttcaatttccttcttttgctgtttggcttggcttctgctgtctcctgcttccaccggctgcctcctttccatgagtctctcggtttctggatcctattgccacttgcatttctctctgtgtcattttcaagttccctaaaagaaaatatctgatatagttcattgttcactgcagggcactaggcaacccttatcgtgtagagattcccactgtgttatctccctggctgccagccagtttgctgatggctgtcttcaaagacaactgccatttcctggtttcatcagccaggatcatagggtcaaacgtgacaatctgcacgtacgaaatcactcatggtcacctccctcagcatagcaccacgggcagggtaggcacagagagacttttctccgaatcctggactggaattttcttcctggctcacccctgcatatactgaagctgagccatatcggggtaccacagctagaatgatgtagctgaatgaatgagcgtgagaaggggccaaaggggaggaagacatcagtcccgagaaccaagactgaatatgggcatttggaaaacagtttaggtaattgcattcagtacttcaaggctctaattgctgttctttaacaaggaggccacattggcttatgaaaagttctaaaattatataatttttatcagtaaccaggacctcaagttgctcccacaaaccacatagggccttgcaaaatgaggctttgggaaggggactctgatgtttctaaatttcgcaccctttggtttctccagctacattagctctgaaaggggcacaaaatggcctcattaactggggaagaacgagtctaaacgagtttcagaagaagaaaaggtctcttggatccattgagccctgccaccacccccaccaaccttcctaatggaagaatgctgctggaaaagtgtcatccgatatttcccacaaaaatgtgtgctgtggtcacagctcagagatgccaacacaaatctccaacacagccacctcctgactgagaatacattctgggctgtttttagtttgagcctcagtaatcggggacaaaagctgatttcaattttaattaattacatgggagtgaacggccatctgatccataggggtcatagcacataatgccctc

SEQ ID NO: 45851 - DNA, 1597 bp, Homo sapiens
gaaaggcaagtgcagagaggccaggaggaggtgaaaagtgtgtccactgctgatagaggaagtgcgatggaggctgagaacagagtggcggatgtagtgatgtggatgtcattgatgaccttgacaaagcagtttcaatagtgggtacaagagagaatgggaagagagaagttggaggcagaagtataggcaactctgtcaaggtgctttgctgtaaaggagaggagaagaatggggtgatagctaaaggatggtgtggagtcaaagaaggtttacatttgcttttaagataggagattcaatatgcttgaacaataatagaaacaagctaatagacactgacatttttatgatgcagtggagagggaatagaattattgaaatgaggtctttgggaaagggaaaagggatgggacccagaaaactaacagaaaatttggttagttttcctcaagagaaaaggcagattataggtgtgggggtgtgagttcaagcacatcctcttctggctgcttctgctgtttccacgaaatagaaaataaggccatcggctaagacctaactctgtgcaggaggtgaagaaggctcaaggagaaagaatggggtgtgagataaccaccttggagggtaggagagtaatggactcagggaacgtggtaggatcattgatgggtaaatactgagtcaacattggctgttgcatgttagctctacaatctgctttgaaccctgatatctctcctgagttcagcctgatcttcctacagtccctgttttagagactgtcactcccatgcacccagtttccaaagcagagaactgggagtcatttaaaattccttccagtaaataaatcatctctccaattggtgaccacattttgtcacttctagctccttaatatttcttaacttttcctcctgagttgagagccttgccagttttcactggattagttaagtaactgtcacattgttattgcttaggctatttcctccactagactataaatttttaaaattcagctcaacactcttcaataaatggtgctggacaaactggataatcatatgcagaataatgaaacgagacccccatctctcacatatacaaaaatcaaataaaaataaattaaagactgaaatctaagacccgaaagtattaaactactaggagaaaacactggggaaatgctccaggactttgatctgggcaaaggtttgttgcgtaagacctcaaaagcaaaggcaatctaagcaaaaatagacaaatgggattacatcaagcaaaaacgttctgtacagcaaaggcaacaatcagtagagtgtacagacagcctacagaataggaaaagatatttgcaaactgtccatctgacaagaattttaaaaacaggatatataaggaactcaaacaactcaagagcaaaaaaaaaaaaattaaaaaatagacaaaagatctgaatagacttttctcaaaaaaaaaaaaaaaaaaccctacaaatggccaatgggtacatttaaaaatgctcaacaccactaataatcagagaaacacaaatcaaaaccacaatgagctgggcatggtggctcacgcc

SEQ ID NO: 45852 - DNA, 3971 bp, Homo sapiens
agatataaaatccacatcatattgcctgaaagaaaatcgcaacacacattaattagattcttggcaaaagactgaaaaaaatgtcccagaactgttgaagcaagttatttttagacaactttactctaaaatatgttggttcctctgaatgagttcacagcgtatactgcatacccctttggtctgatcctcttgaacaaaaacacctccatttttcctttttattacataataaaataaaatgagcagtctcccagcgccatcccagaagtactcctccactgaatgctctttttttgttggcttctatctacacatttgccttcctgtgaaccctttgccctacttttgtaacctaaagacattaatagaaacttaagttctttccaccattcattttgttttttggttgtccccatttttaactcatgaggtcactctgtgtttcatcagatttcctacactgcagccttctgctatttttctactagaacagccgaggactaacactttatatggcattgcaagggaagaaggattaagccattggtagttgcagagatctgacttggtgataagagatctgccagtgattagagaccccacctagttggtcttaaaatggaattagtccagatggtgccaatgggaattaagggactgcatggtcccagagcaaacacaatacctgtcttttggatgctcttaatctcaggggcaaaggagggaaatggggctttcagaggctgagccacacattcccccgtgattatagtggtaaatacttgtgatttaaagtgactgtttatcagatactagaaatgtcttttaaatccttaaaggagtataaaggtctgtttgagagtcacgtgttatggaaattaacaggagttttaaagtcatttatacatatttctgagactgcatctacaaaggttttcaataatcttcattaaatatatatctttgggacgaaacacaagattcatctagaaaacatgacttgcggataaatatgttttctttgtgtaccttttttgcttacagaacctcttctatgtatagctggacaaatttcaggcgctatatgcaaataggcataccaagagtgcttacttctttgtttccagtttcctagaatttggcatcagagttaaagtagattcttggtaaatgtactgtttttaggtactaggaaaatcagaggctgtctgtactcacaaggtttttccccttaaatttgtccttatcaacttgtctgatgacaggaggggcatggtggctcatgcctgtaatcccagcattttgggaggctgaaaagggaggattacttgagtccaggagtttgagaacagcctgggcatcatagcaagactctattctaccaaaaaataatttttaaaaattgtctgataacagatcaatgtccagtcttcagctttaagctcaaatctttggtgaaatgcacataatctgactgaaatatttttttgtattgttattcattatactttaatgtaaatgaacattctcagagactttgacaaggagtggagaggaaagctcaggggactgagttgctgtgggtgataatgaggaaagcatctctgagagtgaaaatgaatacatcctgacagcttagttcaacagttattcatggggtggccttgctctcgttcatgaaactagtgcatttccttcaaaggggaggagcttccaaactttaacatgctatgtgtgcaaataggaatggaatatatagtgtcatggaatctaagtccagctgccatttttggaggctccctcttgtgggcatgcacccatctatgtcaatgtgggcaaatcaaacttgccgccattaagaagtcttagacgcgtgcatataatgcacgttcttcatggtcaactttcttactgctggatgacagaattgacttttgaggctgaatgatgccaaaatttcttgtcacattacagagtttgcatgtagttttcctttctttcgatatctttggttttggtgtcaggtaatactggtcttatagaagaaagcctctcatcttttattttttggaaaagtttacgaagggttggcattcttctttaaatgtttggtagaattcaccagtgaagccacttgcacctgggcttttcattgtgaaaagtttttgttgttgttgttaatttttattactatatgtgtaaggaaaaagaaagattagtggttgcctagtgacctctaggtagtgactaattgcctagtgatttctaggagaagctcagggtttctttttggggtgatgaacatattctataattagattgtggtaaggttgtgtaattatgtgaatatactaaaaatcactgaattgttcactttaaatgagcgaactagtatgtgaattatatttttgtgaagtcatttaaaaaacaggtattgattcttttcatcctctctactgcttctcttgtttctatattattaatttctgctttcttaaaacttctttagattgctctttcttaaacttaattatatttactttattaattaatttaattaaaattacatgtttacctttaagaagcacttacagctaacatttttataggtagtacttttattctgttgtaaatattttttaattctgtcataaatgtctatgtccctaaaatcataggcttaaaatacgtaggtatttgaatattttgcaacatttactgtgatttccctttttgtcctcatgagttacctaagaagacatgtcaaaagttttccagatatgtttgtgtttcctatctcttagtgaatttcaatttttgttaccatgtgtacttatctttactcttactaatgcattatgtctgaaattctattttgtctaatactgatattgttacacaaaatttctttgcttatgttaaaataaaaactttagactaattaaatttggcagactttatttgagcaaagaaagattcatgaatcaggaagcattcaagccagaaggggttcagagagctctgcctagcaatgcaagcagcaagcttttacaggctgaacacagaagcaaagtagagaaatcacctgattggttacaggtaaacttcaactttatttgaacctggtgtgatgtggcactttcctgtttgggcatggcataatgagttggctgcctgtgattggctgaaactcagctatttgttgaactcctaaattaagtttcagtttgtttacgcactaagttaggttgcagtttgttatgtaggaattcaaagaatcaacacagcctcaggctaatggccttctacttatttaacaattattaattgcaagttttcacttttcccattactttcaatctttctgtctgattgtgctggagatttttagtgtttcttatagacatcaactagctagcttacaaagctctatctgttagtttctgtcatttatcagatgcatttaattcattttcactgtcataatcactgatatatttgcatttatttctactaccctattttccttttactatccatttttattggatttaaaaaatgtatttccatgccttcttttggataaagctgttttttaataatatccttcatgaatattaccccccactgttggcttggaagcatttctatcattttaaggtatttcaattaccatctctaatcttcaactataatatttttcctaacatctaaatttattgagaaaattcctgaatgttacaaaacccctgggtatatttaactacctattaaataactacctcctagagattttaaagatttcccaaaattgctaaactagcttttaaaattgtcaacattaaattaataaaccgacaatttgttaatattgtgtttaccactctttcttgtatcctatgtgccttccctctgggtcgacttttctttttgcttaaatatatcctttaatatttgtgctcatgagc

SEQ ID NO: 45853 - DNA, 1667 bp, Homo sapiens
agcataggaccatctcaaagtttcgaatcatactactttacaaaactgcttatttatatggcttagaaacattgatagttgatcaactagattttgtggcaaatctttagaaatgctcattcgtcacatcttttgaaacccatccttttattggtagtggttttccctggtaattcccaatcatgtcatatttagtgaaaacaatatcagcaatcacagaggtccatagccctttcctccagggagtctccgaatggtttccagattggtgggggtgggggtcagtgttcaaaacctccttgtgaagaaagagggggagggaattcatttccaatcaaggtaaggggaagtcagctcacaggatcaaatcattatccccaatcattcagtccatctgtgctgtgacatttcccttctgactgcatttccaacaagctgaaacacacctatttggcaaggactcctctcatgctggctggggagccatcatattgccatcacagctggctatgacaggctgcaggagtttagaaattgttcttgacatgttgggaagcatttttatgtcctgtcatcacaaatgcatcatttccttgtaaatagtactgcctgctctccagttcttgccatctagttccatggcttatttttccctatgacacttaccaccacgtaacatgctatatatttgtgaattttctgcttctatccaccagcatataacgtccacgaaagccatagctttgtctgtttattcacaggtatgtttccagccccaggcacttgataggaacttagtaacaattcattgaatgaaattatggatttacgtacaagaacagttaaggagagttagagaaacctatgtgaaagtcacagtgctgtagtttattagctgtaagatcttgggtaagctgctcaacgtctctggttttcaggtttctcacgtatgaaatggagtaataacatgtatcttattgaggattagatggtggaaaactctcaactaagcacagaacctggcttatagtaagcattcaaaaaagggtggttacttgaaaaaatacagtacttttttagtgactcctcacctggaaagttaaaactcagaatcctctcttcaactgtgaagtttaaacctcagggtcgagtcacattccttcaccagtcatgggcagtgacctgggcatagccctggtttcctgagtctccagggcagcaggaaattcccagcaaatctaaacagtcttcaagaataccttgttccacacaccggggccacaggcttgctttatatcacagcccagtggggacaacttcggagaaggaagacgcactcatgataccccacagcatggagctttcaacaaacagatggaaaaatattggttcagccccttctagctggagattgttagattggttttgctgaatggtgcttttcccttatttggacaggttgggaagttggggacctggggttgcattcctgcaccccacattcccagctcctttccacccttggtgttgaaataggagatttggaatggcaacagctcactcaccctgctcagtccctgtgcttctgaaagacagatgttcttggctgggcacagtggctcattcctgtagtcccagcactttgggaggcagaggtgggtggatca

SEQ ID NO: 45854 - DNA, 1572 bp, Homo sapiens
gatttcatctctaaataaataaattaataaaaagatagatgttcttgcttctcctcctcaggctttctggaggaagcacacttctgaaagcaaataagtactaaatgtagaatcttactagttccttagagcacacaaggaatattttagcaatacttttaaataaatggcattttacaaatgcaacactaaactgataagcattcctcacacctcaagaagtgggtatatgttgcagcgcttcaaatgagtcagcgatataatgtcacaaattaggcaaagatatgaaagcctcttttaaattgcgctttcatacatgtgagatattgtcgtcattactcatactcaatgctatatttttcagattaaggaaagggaggcaaaggtatttcagaggcagggtgggcaaacaatgatttctattcaaacacatgtgcacgcacagtgtttacaaggctctcatgcactaacttctcccctctggacagagagtggtcatgtgggagccctgaccccacataaactgtgtccattcctagctctggcctttgctgaccctccactcaggaatgctaggaatgccctccctctccttccctgtccccaggctctccatctacccaaatcctgctcaatcatttggacccccatcttagcacttggagaatccttccctaagcatttcagtgacctaccttctccttactcaaaacttctgtgacatgtttgtgctatcctgtttttataattggaagtttgtttctgtaaccaattcccttcaccccactcccctcattgcctccccaccacagaccctaacaaggtagagggtatgtgtaattcttgcacaaaaaggttacaaattcttgtatcccctttttctctaatgggaagaaagaatctgaaatgcccctctggaaagtgatgtacccagcagacagaaaagcagccttcaaaagcttctgtagggcttcgtgttgctatctatggttccatggtcctgactgatcctgagtgtcctaaccatgggttttgggtccagaggacagcctggagtccactggagggtgagcagaattgtggggtgaggaggaatgtggggcaagtgacactgacacctttcagtacattaatgtgtaaagcatgaattctgtagaagagaattacactgtattagcatggaatagattatgctgtattaagaaaatgtgcctatttcttgacactgaaacagatcacatgatctccaaaagtaatgctagtttttgtaatgggtgtgtggggagtgtgtgtgtgtgtgtgcgcatgcacacatgcatttgaatccagttatctgtgagataataaacaagtctctcttctgcagctcatggtagggagaacccccacaaggagactgcacttcaaagtccctcctggatcccattcagatccaaaactgagcacctgctctgtgccaagaaatgctctatggaaatgaatcagttcccaccatccaggaggtcacagcctgctcagatgcaaaagaactccatgcaggctaaggtgcagggacacacagcctggggaggc

SEQ ID NO: 45855 - DNA, 2011 bp, Homo sapiens
cacccgggtccctgtgctcagtccggctctctctgtagttctccctggccacacctctctgtttactcataattctcttttcctaactacgtggtgaagtggcgtcggaagtgatttcagatgcctccctccagtatgcattctcctgcccagtctaccctagtccacctttctcaggctttgccccacagttggcctcttgcactctagccactctctctctcgaaaatgccctgggtctcccaatctcctggctggactcatctgaacccccttacctgaagaagtaacccctttcccttccacacttccctagctgcatccagtcctactccctcctgaaagcattgctaaaatcctgcctcctttatgaagcctcccccagtcacctagcttggagtatcacttctcagcctggaaaggctttactgtcgtcctgggtgttaatttcatttgtttatttgacaaatatttgttgaacacttagaaggtactaaagacaccatgttagatgtgggagatacagtgctaacagcaacaccatgaacaagcttcctgtcctatgatgagtccccaggctggctgcaggttctttgtagggtaaaactgggtctaagagctctttgcacctctcagaagatactaagaattcaatgagatttactggaccgattaactaacaaatgaatacattcttttttaacacaatgccatgcagagtttgaaacaacactgtcagtaacccctctaagtaactaaggctgaatatggaatgaataggaaaacatttagtccttgttttaaatatcaagtgattgttttctgcatcaaatttagaattccggttttgccaaacacatctcagagaaacaggctggcccctgagccagacagcagttgtaaacatctcttcttcctgtttagagacagtactgaattccagagctggacctgtgaaataccagcgctcctctccctctagggcttagaaacgaatccctgagggtgtttgtgtgtttagacttcagtgatgcccagtgctggttgagtggttagctcaccacacaaaccaccaggaaaggggttcaaaacaagacagatgggacttagagcaaagggaacacaattactcaacggtccagaatctcaatcctagaagccaagttatggttagccacattgcttcattattgaccttgttttttggtacatatattctttcttgtacactgtgtctttttctttttctaatcagccttcttcccaccaacatggattgtgctgaaagatggcaaatacttgtatgctgacagttttctacagcttaagacccggttcttgatgggagaaaaataaacatcatcagctgcttccttcctaataaccatactattttaagggaacttgagattttgtttataaactacactgatggttatgtaaccaatgagatctatatttctggcacatttcctttcatacagactcaattaaaattttcagccctcatagtaatctttacattttgtggtttacttgacaacctggtgaaccttgacatttacctgaaagtcagatatgcgttttaaggtatcaggagaaaaagagttttcttctgaggtaaaggaggcagtgtgaggttggtttcctgtcttcaattagcattagatcataggtttctcggctgggggtcccatgacatcaggtggccagagagatggaggaatagcagctcatgaatcacctgacagcaggggggatatggaacaattctttcaagtctagctgggactgttaacacccatgccaggaagagctgtgtcagtcttctgtagccctgagctgggcaaggcagtggatttctggagaggcctctctttgcatgcctcaataataaaagactatctttgtcttagtttgttttctattgctataactgaatgccacagaccgggtaatttattttattttatttttaaaagatgtttatttggctcatggtttggagact

SEQ ID NO: 45856 - DNA, 4943 bp, Homo sapiens
tctagcctgggtgacagagcaagactcggtctcagaaaaaaaaaaaaaaagactcagctcaggtgtctcctcctgcatgaagcctcccaatgccctcctctccctcacccctagcctggcctggattctacacacccccatagcaccctgtgtcacctccttccaaagcctctattctcctgtgctttatttttcactccctctcactagactgtggatttctcattgaaggcgggagtatgtgccgagctccaagagtagaatcttgagcagcaggcataaaaaagtgtttaccgaataaaatgtgtgtgtcagtgaagcccttggaacagagatcttaggtcatcaacacaaagggatgtcattgtgcaagaaaggaccagggggaacaaatgccgggcaagggccacggagcagattagagtacagcacagatgttcaagtcaaagtggggccccaaatgtttctagaaccgttgagataaaggcaatgaagtaacagaggagtttggaatggaactgattttagaagcccagagtgcagaatctcaggaggagatgaatttcaatatggagcatcagagactgtggaatatttatctatctgaacaacagctctttcatgggctgagttgtgtccttgagaaagttgagctgctctcaagtcaagctcttctcagactttaagttggaagataagagaggtatggggagaaaaatgagaggctggaattggcacacaccagaattttgcctgggcatttaccatccccagtctctcctccccccaaatcatgaagcctctttctcttccgggtttgggtgccccagcaagactcccagattcaagaaggccattcgtgtctaacacatctgccaacagggaatgagaacaccatatcctcgccctggtcacgcccctccctacttggggtttagctagcccacagtttcatgggaaactcttgtttcttaggatctaaaggttaacttgaaattcgtttctgatgaaaaacgtaagaaaactttggaaagctgagcttgggtgttttaccttaggttagcttccaagtccagaaactctgcaaactgtaaaaactgtagtgatggatttatgtggttccctgaccaatacagatatttgtaataataataatagaggaaaagatagcacagcctcagaattttttccctttactcagctgaaaattaaaccagacaggcaattactaaggttttgccataatatgtaatatgtgtacaccgcatttatggcacattacatcttacatggttattattctgcattcttcatccaatcatcttattccttctggtatttttatgtggtgaatgactacaagctgaaagtcaagtgagaaaggcactggtactgcaataaaacactgactcaataaagaaggggctatttaaaatgtgaccaccactacagtggaccacaattggggatgttgacagtgaattcttgaagactggaaaagtactaaggtattaaagcaccatctgtaatactatttttactgctgtgactcattctgtaattcattctactatcatgccacaattataactcattcctctttctcaaacatcaagattcaatagctttttgagtgcttttgtaatgctctctgcacttaactagaaaaaaaatcaaaagaagagaatttcatgttaaaatagaaatgtgatatttaaaaaaattttttttttagatcttggagaatgctattgtatattctgacctattattagaggaaaaggaaacagttctattaatactaagtataaactcagatctatttggaaagcgctttcaactgattttctaagttgtgagtcactagctgtttttggtgtttggtgtcatttactgggaactaaattgaatcctattttgggtgtatcagcaaagatataatggattatagtaagtcaggcttctgttcagaatttttttgttctgtttcaaacagtgtttggtctatcttttctttctttctcaattccctaacttcctgtatcttttctttgggagctaatgttttgttttctttcattcatttctttcatacttgttctaacttcccacttttctcttttggagaatttaaattatcaccactcagcagtctggatttttcattctaaagatagagctctgccactcagctgagcaggtggagggtacaatttgacttcttacatctattctaaatagtaggattttaagagagaggttttatattttttccccaatgtaagagaaagtagccacatgaagtatataagggcctaagtacaacttattggcatagtaacatatatgttatcataatttatatatgttatctattataattacatattcaaccctatattctgactttgagatctaaaaatcagcatgtatatgttgtgaactattatgttctgacccaccaaagagtagtaaatgacaaaggaatctgttgaaatatgcaacttttccataattactaggtatagtgaactagttaaacaaaaaatgtaagatcaattatttccactctgtagctcgatgtctagtccaaagtgaggctccaaaggtcatactgaatcaaaccacaagaataaacacatgatcaaaatgaaatacataactgcctgttggaatagacttctctgggctgcttacttctctcacattttgtgagtatctttagggccaggctcttctcaccctctggggcatgttagttgaagacttatttttgtcaacagattgtaatattctgaaggcagtgattatgtttcctattgcttagtgtcctctatagggctaagtggcaaagctctaaaagggcagatgaccaggaaatgtttgctgaattggaaaaataaaacaaaacaattcaaaggaggtgctggtgcttctttactttacaatcccagactcagttatagaatgctggccataatctcagcaacccaagcttgctttctttttcttttcttttcttttctttttttttttttttgagacggagtcttgctctgtcacccaggctggagtccagtggcataatctcagctcatctcagctcactgcaatctctgcctcctgggttcaagccattcttctacctcagcctcccaaatagctgggattacaggcacgcgccatcatgcccagctaaatttttgcatttttaatagagatcgggttttgccatgttggccagactggtctcaaactcctgacctcagatgatccacccgcctcggcctccaaaagtgctaggatttacaggtgtgagccactgtgcccggccccaggctttatttcaagaaagcattcttaagaagctatgaaatgcctctgaaaattccttgcaaccttggagtaacttgatccggagcctagacacttgattctagtccttgattttcttatcactttctgtaaacattgaataaactactgactctgcattgccttagcaaacagagtttgtgtacatactgcatcatggggagttaacaaaaccaactgaattcacagtggctgctatgatcaggacaactaacgtggttgaactagaatggatcttaggaagtcacttttcttttgccagtaacacatgcattcttgtgcatgaagcaatgtatggctgacagccatcaactgaattactcaacagctcctctttggtgcaatgcactgtgttggactctgataccctgaattcttgatcctcaaggcatcgccaggacattggactttaggtaagttaggagttcttcttggctgtgcttaggcatccaaggagcagtgtgtggagaagcaaaattcaaacaggtgttataacaaggaattcaattctgtacagcgtcagaatcaaagtgactcccacatcatgatccagtttgagcactgctccttgtgggctgtttggatacttccaggtgatactagaaccccctgtagattcattgaatggaaagagaaaggaatttagagatagccaaacctggctaaaaattttggctccaacaattaccaactatgtgagattttgagcaagttgcttaaactctttgagcattagtctcctcatctacaaattggaaattatgagttgttgttgttattagattaaatgggattatgccaaaaagcttttattataattcatgccatttagcaaacatcaaataaaagataacttttcctcttcttcctttccctctcccatcttctcctccttctccttgctcttctgctcttattcttattcttatccctattcttcttattctgtgtctatactgggaaaagtacaccagcatggaaggctacatccatcttgcatagaatcaggtgtgaggaagaccctagtcctcttcatggccttgtgtgcatgcacacacttatatgtaaaggcaggaaaagggtttgaggtagaaggggaagatggcacagattttttgaggcagggatactatctcacgcaacacaccacctgaatagccccctgcccaaccagttaacactccttgagcagggagctggtgatacgctgatttggtctaattgtcatctctcttcagtctcttcaattcctgtgccctaggaaggtatgtggaaagagagaggcagcactttactaatggatgattctgcattctcataaagaccattctcaagttcacaggcttcagaggggtgctgcctccaaccacgcctcacccaaccctggtccccttctgctcactccaggggccctaccagatgagctttctgagatccacatggtccaaggcctttctcttggctacttcatattctaaatgctggggcaaggaacacagtagaaattaaagatggggaacttggcagacaggaaaaacaattcctgtgtacgccaacaatttgtagct

SEQ ID NO: 45857 - DNA, 1326 bp, Homo sapiens
tactattaggccatcttaatttggatggctactattaaaaacattagaaaataagtgttggcgaggatgtagagaagatagaaccctcatgcactcttggtgggaatgtaaaatggtgcatgcagccagtgtggaaaatagcgtgtggttcctcaaaaaattaaacattgaattaccagatgctctagcaataccatttctggatatatatctaaaataatcaccacatacagtggctcatgcctataatctcagcattttgggatctgggagccctcccttggctaggggctattttctagggtgtgaaagaatgtgatacatgtgctctgtccacttccctgtcccgtggcacagggacaatcagaaagtcccctctgctgggagaaggtcacggtccaagatgacaggtaaacccaaggtcagaagcccagggctcttgaggatgccaactggctccaccgtatcgggtgatttctcacattcctggggccaagtctcctgttttgtaacagttcagtcaaggattttactggagtagacaagcatgaaatgaattttccagagacgtttccgaagtgggggaaagttcatggctccaaggcaccggtggataatgaaacaaaactgcgagcttctgtttttctttagaaagagggcttcccagtttttaaaatctggatttctaaaacttgagctgtattttcaactctcagctcagctttgccctctcaccctggtgttgcaagtggattctgcgctgcttctgaattacccaggtgggctgcccgggttctgcaaagcactgcaatatcgctcagagcaggtgctcttcagacctctggttgcgattactctcagcgcagggtcaccaccacccagagggacacacttggagcaaacttagtgaagggcgcttgccttaatcagctggtaatcgcccattatcagtctttattagactgttgtttattttaaggaactcgtctttgatttatgtaaaaccaaatacttagtttcaaaatgaaaactaaaaaaaacctggccatcctttttcacttttggcattacctaccccgcacttgtctttgatatacatatgtacagaaaccaattttgggctcccagacctaggagaaataaggaaaataaaaaacaaaaatcagttttataaaacatgctaataaaaatacttcgattcatactcatccaccactcactgaatctgccggttctgaacctcgcttccactgtttgaccttgagtaacttatttaataaatcagtgagactcagttacctctaaattggaataataatacctatt

SEQ ID NO: 45858 - DNA, 550 bp, Homo sapiens
atcttcaaatgttacagataacaccttgcacagaacattacagatagtagatgccaaataaatatagacgccaattaaattgaactgaacagcaggggtgaagttgttgggcagcaaataacattactgacttgagacttcattgctgtgtctttctcatttcctgacatgaacacttggattctgtaaaaaatatttattcagaacaagaacaatgctgacttttctatgaagatcattcagtgattcattcaacaaatatttgtggtgcaggtgccaggcactgtcccaggttctgaatattttcactgcgtgctactgtgttttaaataatagtgtgcaatcctaagaacgtaaactaactaaaggtttctgatatgagagtttaatgagcccctgctcagggagtttgctgtgaacccttcactgaatgtggtcacattccctaacatcactaattatgtaatgccaagtcccttaagaatatcattaggtaacctgcacttccccatcaagaatcttaaagtgagggagttaacagtgggttaag

SEQ ID NO: 45859 - DNA, 2032 bp, Homo sapiens
gaagacagacagcaaagcgtggggagagagatctagtttaagttcgagggaaaaaaataacagacgcaacttagataaaagaatactaccatcaaaaaaaggggggctagagccggcgatggccttgaggattaggacacctgccgagcctggagtaaacaggtaatgtcaggcaggtcctggaaccccgggaggcccaagttcttgctgcgggaagagggattagcagaatgataacgcaggtctgtttgtgttttaggggttttaacatgcattctgcaagtaagtgacctatccaggtcattcgattcaggctcagaaaaaaaaccccgcaaattaatatatctaaatgctgagatagtgacacctttttaaaaaagttatacataagcatctttatcaaaaagcattacattttaaggcaaaaatctgaactgtcacagtatccacctcaccgagttcagcagccccaccttgggtcagggctgcccctgcagcgcgggcccccgaaatgcccgcaccgcccacgccgcccgcaccgcgcgcacccagccgggccagggcgagggatccaggtctcccggtctctcagggcgcgcgcccggggtccgggggtggggggcgtggaggcggttcccttggagcgcccaatcagcagtaaggcccggcggtggcgccagtgacgtagaccgcgcttccctccgccccactgcgggccgtcgctcggcgccgtcagccacgcgcgctgcagcgcgaggggagagcgagaaggagggctttggggccgaccggctgttggagggcggcgggtcgcggggagcgggggagtgagcatgcgcagcggctccggggagcgcaggggaggaggggccggcgctgagaggcgcgcgcgtgcgcgtgcacgagtggcccgccggcggctgcgggtggagggggcggttcctcgagtgtcggcgacccgagggcgggcaggcgggcggcaggtgccgccgcagcctctggctggtcccgcgtctccgtcctccggcggcgatgagctgggccctgtcgggggctgcacctgccggctgcccatcagcaccggcctcctggcgtgacctcggcctcctcgcgtgtccagtccccgcggcgcggcgctgcccctgagagggagcggcggcggcctcctccgccccgagtcctcgctcgggggccgcgcgaggacggcgcccggccccctcccctccttcctccgtccgccgtcctcaatgtctccccggcggggagggggctgcctgggagacacgctgagcggcccccccacggaggccctccggctgcagcagcagcagcgcccggcccggcgtcccgcagcctccaccagcggcggcggcctggaggagccgcgcacccgccgccgccccccgagcctcgcagccgccgccgccgcccggcacccgaggagagggcggcgggcgcccctcggggaagatgaaggcggaggggggcgaccactccatgatcaacctgtcggtgcagcaggtcctgagcctctgggcccacgggacggtgctgaggaacctcacgggtaattgacgcgcctgggctggggacggggatgcggtccgcccctctcctgtcttctccttcctcgggaggggacacgctcctcgccgccccacccccgtgcgcgccccgctcggagctccaggtcccggcgaggaaggtgttaatcggagccactctgcgcgtgtcccgggggcgccggctcccgccacccccttccctgagtcgccaggggagcatcagcgacccccgctcctgccccgcacggggagagctcccggtggcggcccggcctctgtagtacgcgcggagtagctttagtgctgagacttgagcgcatttcgcttttattccattaccctcctcccctcccccttctacacacatcgcttcttgctatttacatctttttctgatttagttctttttctttctggcaaatctcaagccaaatgtagaacctaaaatcattgcccacaatggtcga

SEQ ID NO: 45860 - DNA, 1672 bp, Homo sapiens
ctcataaaatactacatcaagcttctgggtgcagaggggaaagtaaacaggatccatggcacccactctttgaggactaaaaattgggtttgcctctagcttccaaatggaaacttaggaatctatcctgtctgctcttaattttctatgattcattgtcactaggcattcttcttttggacaattttatgaatatttttcaggctcagaaagttctggggactgattggcaaaatgtaattgcatcaggtggttttcttgtaaagcaagagttccgtcactagatggtgcagtggttctattttatttttctccttgcttttgccttggacattacctatgaactgaaattaactgattgttacttttggattcatttccatatgatacatttaatgttttttttccaaaagaaatgcacaccagaaaattaaatatgagaaaaattaaggtttcttcatgtcatcactagccaatgtaactttccaaagaattattaagataggttgtttgcaaattagaaacaacctatcaggattgtttgcaaattagaaaatcactttagtttatgatttttgtaagtcattaatctagactttgatttatatatttttcttaaattccaactcaatgcataatggttttatctaatttatttattttacctagtgtattttatttattatttagagagagtcacactgtgtttggtgcccaggctggtctccgactcctagcctcaagcaatcctcctgcctcagcctctcaaatagctaggattacagatgcaagccttgatatcttagtatctaatttagtagtctacgctttcttagtgacatttagttatacagttggtcaacttggggttacgcacacatagtgcaatctgccttgtgtcatgagactcggttttaaattcctgctctaccacttagtaattgaacttgtccaagtcatttaacttctgcaacagtcagttctcacattagtaaaatggaatgacatctcatgttgcacgcagtgagtgcttagaaaataacctttgtcccattgccctctttcaatgtattgtctgcacatagagggatgatgtccttccagcctttgctagaagttttggtaataagttcaggcacttctgtttcaaagacagagccagattctgtcctgacagagaacagtgcatttttagggaggatttgttttagatttaaactgtcccgttgaaccccgcactgcttttgcaacaaagcctgctgagggaaattttagaaacatacctcagtgggaaagagcctagttagaaagcaggatgaataaacttgctcagctagcaaattcctcgcattctctaaaccaaatatgtacaagatgaggaagccaaggcggccagcataaatgaatcctgaaagatggccgggacttgcccatcagctgtgcacatagtcaccaaccactgcagatcctgttgctaatgagctgctctgctttgtttactatgctacagagacaaactatttagttcaaactcagagagggagggttggtcttttcagctccagagttctggttgtaaaagcgcgagttttgttttcccatagtgtggcctacagcagccatggggacacacgtgcccctgcactcagggtcttcaatcaggactgaactt

SEQ ID NO: 45861 - DNA, 1161 bp, Homo sapiens
cactacacctgagctaggttttgacatctaagtttttctatttttgttttgagcccaggctggagtgcagtggcacgatctcagcacactgcgacctctgcctcccaagttcaagcgattttcctgcctcagcctcccgagtagttgggactacaggtgcgcaccatcacacccagcaaatttttacatttttagtagagacaggcttttaccatgttgaccaggctggtctcgaactcctgacctcaggtgatccacccgccttggcttccccaagtgctgggattacaggcataaaccaccgcacccggctgacatctaagtttttatctaagtttgtaatcccactgctcagtgttgtttctctttagcctgccaatatttactgacctgatttctcatcctctgcctggcccctgggctccaaacccttcccggccctatgatgtcatgtttggcagatttctgtctggaatttcctaacttgggtgtccttctggggcttcccagacccaaaacccaaggctggcactcgctacccatggcccaggtagtctatgaatgtggtaccctcatataaaacccaagtttgcaactggcaaatgtcaaatgagaggtctgggccgaatgtcacagggttccacggaagggagcagctgcaggggtctgggaaggtcagggacagcttcacagatgacttggcaatgggacaggcttcaagctatgagtttctgaaggcagaagtggtggcttatcatgaagagggaacatccagatgtggacactcaggtgaaagagcaccagaaacccacacactgggggtcagagtatgtggagggagttatgaaaaagtgaggccacagtgggaagcagtgggaggcaggactgagaggtaagcaggtgccagcccagagccctgaactccaggagaaagggctggaattgtatcttacaggcagttgaaactttttgaaaaagaaaagtgtacctccatctgaaattagagggcaggcaaggaatggggtacagttgttggttctaacattgttttagtgtctgctttttagacccagtgggaaagaatgagggatttccagtcagaatcttctatcgaattccacctttgccacttaggagctgaatcatcttaggaacgacttc

SEQ ID NO: 45862 - DNA, 971 bp, Homo sapiens
ccttcaggaacccatggccccaggttccctgtccagagcacagcccccaggcccaccctcccagtcccctggcaatgcccagggatgcagcttgttctctagccagggttggtgacaaaacatgtccgagaaaaaattattcctgacacttgttaaagaatggtaaggcagactttattcagcaggactatcgaggtaggtatcaagactaccacaggggggttttgcagtgggcatgagagattgggctcagctcttagtacacaaggtcagcggacgaaaaattcctagagaaaacatcaaaggtaacaggagattctgctaaagtaacctagcaggattctgactgaagacagaccagtgtgatcacatatcacctaggagacggtggagacgaggaacctggtgagataccgaggatgggagattccggctaaacagatttagcaagattcttgctaaattgggcaatgcaaagactgacacggaagtccaaaggtcaaggcatagttgagaagagagttcagaggatcctcctacagtttggtcaaagaaagaatcttggtcacatggctagtaactgtttaccgagagaagaaggtgaatagggctaaatgacaagaatgagctacttcttagagatagatcctttcattttataaactctttggtactgacaaagagttgctccatgaccaaaatttagttaggctcctctaagccctctttttcattaggccttgaccgtggcccccccaatccttgttctgtccagacaaattttagcaaagaatcctgctatgtcggtttagccagaatctccctcctgctgaggtctcctcttagtaattcctagtcactttccccctcactctgttccttgctgtaaatccctgcatatccttgctgcatttggggttgaactaaatctctctctcctattgtaatagttttgaatatagtcttccttg

SEQ ID NO: 45863 - DNA, 1695 bp, Homo sapiens
tttctttggtagtaaaaactaccaaatgacctatgtcactctgggatctcatattcccaccaaaatatcaatgtggaatcctcaccgtcatttgaggcctacagatgacagccaccatatagctaacatgcaagaatgctgatgctctcttcaccagtgaatttctcaattgtgaaggaagcatctttgggccaccttgggatgtggagagtagaggcagggtgttcagggaacacattataaatgtgcttcaacattgttgtattcctaagactccagattccttcacattttgccaaggaagttcaggcatgtcaatctcattaaacataagccatggttgagtcaatctatcaaccaggcaaactgctagagccacatctagcttcacgagataaaatattaaatccggggtttctggtaagtgcactcacatcaataagttcaataaaatccagtccacttgttatatttcattctccttggtctaatacccttggaataaactcccacacatatttttttcaggattctaccactaaaattagcataatcttacaactgttttagcatgtaagttatttcctcctgggtcagactttgtacttgcccttagggaacatgctgagatcgggcccttattatgggtatagtgagaaaaggaatggtcagaatgggttgatgagaagacgtatttcatggcaaggcaactgccccattattaaagtttattcaagaagcagaaggctggtctctccaggtatgtgaggataggcatcttctgctggcaaaggaggtcagatgactcaggggttcagaattctgagcttgctatgaatccatcctgatgtcattctttcgagtctaagggtcattatcttttctagttgatacccaaccttcacttgagaaacttgagagtctataaattcaaattcaactttcaactctgaaatctgtgcaattaacttttgtgtcttattttcagcaaacaagagaaagaaatgatattctttcaggactggcctggaagcttcttaattatctatgactcaagctcagaacttaaagaagcaggcttttttttttctttctttcttttttccttatgcaagtgctttagggcattcagagggagccattccatactatcacccgtgtagtcatcgtagctgctgcagtagtcaaatgcagaggacatttggttcttccaaggctcttgctttagtaagcacttgaaaagcaaccacaggtaatagttttataaactgtgatgtcactgcatgccactggttactggaattccatttgccattagcaggaagttcagcactgcattcaagatgagggacccagccaaagcaaacccacaattccattgttgatgtttggtcctactgatttgggttctagacccccaaggaaaggatagccacctgctagtgtttctgagggggtatgaatattggaaaactacaactggaatcttctgctacttccctaaccatccctgccaaagtaaaggagtgaggctgggcgatgatgacagcaacggtacgcaaacaagaagagtgagtgccttcttcttctccagccatctggtcttcctccacccaccactattagaggaggcacacctggggccaggcacagtggctcatgcctgtaatcccagcactttgggaggctgaggtg

SEQ ID NO: 45864 - DNA, 742 bp, Homo sapiens
tttgaactcagcaatggaaatcatctggggaccttcttttcaagtgtatgttcagttatgtcaggtgttctaggtaagaggcccataaatggaatttggagggctcatgagcctcctaaaattgtacacaaaattttatgggtatttgtattttcctggaaaaacagtctatagatattttcaggttcacagaggagcctcttccctcaaggttgaaaaccactgagttgtaccaaggtatgtagactgtgggtgacctatgcccagggctggggctgaattgagggtgaggaatcaggaagggtgggaggagtttgcaatgcttgggatgaagagtggctgaccttactcacccccacttagcagcccaacaatttcacaccaagcttatgggtggcagagaaaaatctgtgattgggtcagaatgctaatgatatcatcttgcatgctatgactgagggagaaactagaagattttaagttttactccctgggcattttgacttcccagcacatccctgggagacggctcaaaggccatccaggccaactagccatgccttgctcatgagttacagtcaggccaggacaggtagggcacagaacccctcctgtccatgttcttccttcagcaataaccatgtccctccgcctaacaccagtatgccactgccttgtgtaagcattcactcactatttcaacttcgtgtgtgtacattagactcaaccagatttaagattg

SEQ ID NO: 45865 - DNA, 4998 bp, Homo sapiens
tcctagctgtgcctcctatgagttcagtggcctcaggcacatcacttatcctctctgagcttttattttatcttattttttcatttgtaaaaatcaggattatagtagttctctaaagaaggctgtgtgaattaaatgagcccatacctgaaaaacatgctttggacaatataaagtaccatttcttaaaaaaaaaaaaaaaaaaaaaaagcaggaatattcactacatcagtgtctcagattaacattcatgggaaactgggaaggtgaagagtttgacaagaaaaagttgagaggaggagggttcctgagaggtcagacttacgtaaggtagttctggtcctgaactccaaaagagttcagagctgtggtctattagtcagtcaatcatcaataactgactgagcacaaaatttaagctgaaattagtttttttctggagactggggcttgtggcaggggcagtgttagtggactgagttgcttttctgagttggtcatcttgtgagttttaagaccatggaaagatgggcaagagtgagggtggaagaaagtctgtgagtgaacttttgaggagtcttgacatgccacttccttgtgcctttcccctggtttgtttttttttttttttttttttgaggcagagtttcactcttgttgcccaggctgaagtgcaatggtgcgatcttggctcactgcaacctccgcctcccaggttcaagcgattctcctgcctcagcctcctgtgtagctgggattacaggagcgtgccaccacacccggctatcccctgggtatttaaatgtcattaccttcacagaatctgagacctttttataatctcctggttgatgtggagatacatttgtaagtattgagaagctgagttaggtatttgaacaattactttgttcacattgtgccgatgattcagttatcctcctccaaccgagacctggcaacctcatgccagccttgcttgtttgggtccctgttactgatattcaggttccagtgacctaaaaatctcagaacagcctctgtttactattcggcctctccaaaacacaagcctgaataaaaaaccaaatggaaatgtattcctagaaatatgtaaatgttaatcccatttgtgatgcagaatcgtgacaaagtgtgttacttaagtagctgctgctcagctatgagatattctttggatgttggggtgggctttttttttaaagcttacttcattccatccacacatcggaagtttatgacatatttgcagaagtcacttctctttcaggcctgtcctctcagaactgtgtgtcttttcaaagacttcctaagcaacatggcagactctcacctggacatctcctgtgttctcagtagactcactgtaattatagcactggcttgtgttcatttcataccttcaatatgccctttaaataaacagtgatgaggtagattggatgctgggaattgagacatttggaaacatagataaggcactgtggagttttcagtacagaggctattggtgttctgagttcactgaattttcccctcactcaccattgcatgattcagccacacggggatgacagtatctaggaccttggggtaaatgagatctcgattgtagagaaagaggatccagaatgccaaaaatacaaactggaaaataaaacacaaaaaatagcatcattaggcttgtttttaatcagagctttctaagataatcaaggaaacacagctaaataaaaacagacaaccattttaaagatatcttacatatacattataggaatgtagtacatatacattacagtaattctacaataagcattcttccctttatttcattgctatatctgctctttctggggattcctcaatgtgccagagagttagagatcaattatttgtcatcgtggcaggcagagaagatatgaataaacaggattcccagaccattagtcatttattttaaccaataacttctttttctaaactttcaccaggaatgctgagagtaggcacatggagtagcttgagtcatacacgttccttgtccaccctctaaataggcatggctaggggaagcaggaagcctgagaaccataagtgccaatctccctggaaaatgcacaagctagctgactgagggctggatctccctggtgctcagaactttgaattgatctcctcttgtactccttgcctctcttgtcaaagcatctatcctctatgctacgaagtcaacgcatagataaggaagttaaaaactattaaacttctgatcttcctatcttctgacatttcacacactccatttctaagcctcaaaaaataaacagacttcactgttgattttaaaaacttggctatagccagacttggtggctcatgcctgtaatcctagcactttgggaggccaaggcaggcagatcacttgagttcaggagttcgagatcagcctgggcgacatggcaaaaccatgtctctaccaaaaatacaaaaaagtagccaggtgagacaggaggatcacttgagcctgggaggttgaggctgcagtgaatcgagatcacaccactgcaccccagtctgggcaacagagtgagactttatctcaaacccctcccctaccccccaaaaccaaaaagcttggtcattagaagattttacgtgggcagaggtagaggtatcctgcaaagtaataggtatccttgctttgttatcagagaactcactagggcttggagagttgcattttgcatttaaattaagttctgtactataggaagcaggacaatgacaggtagaagaaggtagtcatttctaattataggccctgctgggcagccagcatgcctgatctctgtttatttccattctagctaacgaatggaaaacatgaacaatgtcatagaaatgtggatggcatcagcataccagcttactgtccctgccatatgtctcacttcttcctgacatccatccactcagcaacatgaatgaggcacccactgtgtaccccacaccaggctgtctttctctcctcggttgtcttttccatgtgccacctttgaaggtctcatatctcttttcaaaaaaaaaattatttgatggttttccacttgcagaagtaacatatacttatcgtagcaagtgaaacaagatgtataaaaggggaaaattcgtcatctccctccccagggctctccattcccatcaccctgatggaaccaaggttgtctcagttgtattttgattaagaaaggtctttcaaacttccccattagacggcaataaggaccttgtaccaagcctttgcagaggtacaaaagctagtgataaagctgatcactaatgtgccatatttcctaaagacactgggcaatgtggcgcagtcctcagacaggacattgttgtaaatgcagtgggtgtggtttccaattatgggctcccaaacagcttggctgcccaggagaagcgtctgtccatatgcacatttctgttagattatgtacacatctttgaaacttaccgtggatacaggaaaagccagagtggtgaaaagcaggtctctgaaggcagttaggaacttaatgtcttttccccctttggttcttttcagcacatcatccaggcaggtgaccccgtagaaaatggtctgcaagagctaaatccattacaacaaatgagggcattttcatttactttaattaataccttcttcactgatggaaaactccatccctctgagagtaatgtggctttgagagggagagggctgttgggttgttttggttgagagccaattcaagggctgggcttccagctcattgggtcctgaccctgctcgctaagactgattgagcaaatttgtttaggggacaataatgtgtacagtatttagtgtaatggacttgagctaacatggaaacaaaataaagagtcagcctaaaaggggaatgtaaggagatggataccttgacggcacagaggttggaagaaccaaataaacagctcaaaggcaaagaggcagatacagggtggacagagtcaggagtcttcctgggaaggaaaattaggaaaaatgcctagtgctgaaatctcactagagaaactggaatcaggtcaagaggaccaccacgaatctctgtgctctcccaagaaaggcacacaaaagggtgccttgctcagccgaagaagagccggtgcactttcttccttaaatagggcacctgcaggcctcaccgagacaatctggccgtggcagcaatttaaatccaaggggatagagcaagccatgagcgctggtgggttactaagtgctgtgtggcccccaaagccaggagaaagagaaggagggtatttttcaagaaagtaatacgatatggaaggcaagctttgtacattcttgttgctttgtacagttctgtggtttctcatttaagaactggtaggtcatgaagatatggagtttggggggtggggttaagttaggcttgcgacagaatccatccaaatccttgaaagccctggactggtacaagaggggtggtctggactctgcttttagggtataagtcaggaaggttctagagcctggggagctgggctggggattgatcaaggtggctgttggggaacaatctttgagctctggactctaggaaagacctagcaaagtcagccacatgctgctcctgggctgagggcgtaggcaggaaatgatacagaggtgggtcagaccagctacacccatcacccaggagcttgttagaaatgcaggacctccatcctatcccagactacggaatcaaaatctctggaaatggggtccaagagtttgttttttaagaagcttctccagagcttgttaaagattgtttatctgggtgggatgaggggagaaattgaaaaactacctattgggtactaagctgattacccgggtcacaaaataatctatacttatataacaaacctgcaaatgta

SEQ ID NO: 45866 - DNA, 596 bp, Homo sapiens
aaaatagtagcagttatgaaaatatttgctgaataaatgaatatgtggaataccaggtgtaccagtctaccgagccttaccctaaagccggctcattcattaaaaacctactgtgttcaacgtgttcagctgctgggttgtggggaggaggtggaatacagaaatgagtaagacagcctgagccccggaggaactcactgccaagtggcagagacaggtatgtaaacaaaaaattacagcatgatgtgataagtactataatagaggtatgcacaaagtactaatggagcctaaattatcctgcacattattctgtcattctaaatatatggaagattgagctaacgatgaatgcattgagtaagtcatgggaaactccagacaccacgtaggagaagataaggatgaaaggagtcccacagtaaagtagtcatggccaccggcacaaataacagtttttcctggtaaagatataacccatttcttggccagtcaccaagggataaggtacaaaacgcagggagtcagggcaaggggcttgagtccaagcctgtatatgcttcaggacctggagctgatcagccatcagcttctct

SEQ ID NO: 45867 - DNA, 1680 bp, Homo sapiens
cacagctcaaagattaatttagcccttcacggacaagtcgtctttattaaggcattcaatttcaaagtgaaatcctttcagaattacacatgaatgtgtacatacttacattctgctttaaaacatgctgtcaggccgggcacggtggctgacgcctgtaatcccagcactttgggaggctgaggcaggcggatcacaacgtcaggagttcgagaccaggctggccaacacggtgaaaccccgtctctactaaaaatagaaaaattagctgggcatggtggcaggtgcctgtagtcccagctactcaggaggctgaggcataagaatcgcttgaacttgggaagcagaggtggcagtgagccaagattgcaccactgcactccagcctgggcgacagagtgagactctgtctaaaaaacaacaaacaaacaaaaacacaaaacacgctgtcaaagatcattatcttttttggttgttagttgatttttttttttctacattgctgaaatgacatcacatgacctttcaaaagtttttgcttttctgcctggaagcacagggcagtgtttcataaaagcaagaaaaatgttgctgtgctttttaaaatctccttatcttgaaaaaaaaaaaaagctgccagattgctcagagttcctcacactcatttggttaaaaggagctattttggttaatcgtttactgccctgcggatagaaagccatcctcaaactgtgtgaaaataaaacgaaacttcatagaacacttgtttacaaaacggctgaagttgaaggtcacacccatcggcctccgtggtattttctccttgctaaacaagtctgcattattgcagattaataaatcatctgggatcgcttcacattatctagttggttgaggttcatggacactaagcattttccaccaatctcctctagaatgctcatggtgttttaggccactcagcatgagtccagtttgttttgtgggtgcccaaaataaatcacacaccagtgtaaaataaaattagcttctctctcttattttcaaagaaagatttctttgaaccctggcctgctgagtataataatgttttgtagacatgagctccgtggacagaagtacagctgattatcagctggttagagcaactgtctcctgaccctagactccagtacctgttcccttgtatactttggttgaacgatgtcgaaatttctttccaccatgttttgccctttctcttcctgtgtttaccttctaacattcagagggagtgatgtcaaaatgatttggaaaaggtctacgtaggtcatagatggagtgtagccatttatcttcaaggctatcctcaaaccatgaggctgctttctcaatgaacttgcttgaagtgctggggaggtagctttttttttttttctgttctggagagcaataattactgcactgcatccagtaacctcatttcagggattcattgcatgacaatacccttcccaccactttggtaacagaaaacagtttttatgtagtccttggcccttgaatagggcaaatgtgacaatccctgttttcatccatctggctgtaactttcaaaatgagcactggatcaggagcaaaaagagaacacagagtccagaagccatcaggctacgtggccaagtaggagagtctaacctgc

SEQ ID NO: 45868 - DNA, 789 bp, Homo sapiens
cttgaaactgcagtgagctgagataacaccacagcactccagcctgggtgaaagagcaagactctgtctcaacaataacaacaacaagaaaaaacacaaaatgagatttctgatccctccccaagagattctgatttaataggtctgcggaggggacaataatcaccatttgtaataagacccctcccccacagcaccacccacacaggccgtctggggtcaggctgtgcttataccccaggaaatattggaggcatgagaatggtggttgccaaagcaaccttggcattgggtgaaatagtccagactttattacatggtgaccatgctcaaaagcttgacctttgtcacagaattggtagggatagggcaatggaaggagggtgtgtgggtgcgggagtgggtgtgtgcaaacatgaggccgggtttctaccaaaggtgctaaacagaattggttttccttttgtctctctcaaagtggaagtttgttttgaatgcacatattttaataaattaaatgacactttataaattacaccttttcaatcttacacctccaaagaattatttctaaattcgtgtcttgttaacaaatgtgccatttgtgccccctcaaaaaagaatgttttaaaatggacatcttggttcctggttcacaatgagatttaggtcaagtgtgaattatgatcacaaggtaaacatattactgtggcaccgaaagaatgtagggatcacaagacagacttccaggtgtacattttgctacttgctacagatgagttacttaat

SEQ ID NO: 45869 - DNA, 820 bp, Homo sapiens
tcctaaaatgactaaaatatgttttatgttgtgtgtattttattgcaacaaataaaaagcaggacaagtatccatctagccaaaatatagcctgtgcatttttaaagcaattttaaaggtttctttttcctctttgaccatcttgcatggatgcaataaaacacagttctgaaatgctaggacgtctgtctgcactaaagaagtctcattccaatttcaagggctcacttgcctctggaactggccttgagaatgggagtgcctactcctccctcaacagctgacgtaaaagggagaacttcctggaggccagccaagagcctactggggcataatcaggctgcccagcttgttggcttggacatggctcctctccacttaggaggctctgcccactcacattccaggcctcagcttgccatgttttcctgttaagcccagaacccttcccctgggtcccttcctcagaggggacatgttgggagccacagtctcagagatacttgggattttaaacatgatgcaactctagggctgactttggaattctgtgggctgtgcttggcccagatcccacctttgggccacttttgctgctgctattatttttagttggtggggcaatcattgtgtgcctttgtacagttttcatttgggaagccttagagctctttaactccactccattctatcacatccttgtttagcaatgatcatccttttgcattacaaactagaaaagcaactccgtaagactaacaaactctcttcaaccaagtaaaggagactccttgtggaggggagcccctgcccgctcacc

SEQ ID NO: 45870 - DNA, 2744 bp, Homo sapiens
aaaaacagaacgattttatttacaacctcatcatcccacaagtcaaacaggattcatcttccgtagggctctgtgatggttgtttctcaggactagatattgttagagatcaaatatagttatatatatttctgtgtctatatatatatatatatatatatggatgtatatataggtgtgtgtttatatagatatatatatatagacatttatgtatatatgtctacggatctaacactccaaaaatcttagcatggaaaacactttgaacttataaataagccattttcacttaaagattccccttctttcactagaaaccttttacactttgtttcccctccccacctcaacaccctgctagcttccctcccaccccccaccctggaacaacagattgggttagtgctagaaaatgtcttttatgggcaacttaggcaacattccgttgtcaatacaatcaacagaagtcagaaatgtcaatattaggcaacagtcaaaaaattcaaatgagtttctggaagttgttccatttcagccccctagtaatttctgagtaattccttcatttgccttccaaacacttggcacaatattatcttcagggcacaagctatgcccattaagcaaatttatccaagcaaaactgtgcagcaaaaagtggtttaacatattccaaggttcaatgtctcttttttaaggcagctgctcctctcagcaaaaatagaatttagggaagtgccaaccacagcatcctggggactgaaacatctttacacatagttgttctattttcaaataagaatatatatatagatatagatgatgtttaaacattgcaaagcttaaaggcattcacagagagattaattgttgtgtgtgactataagtaacacaaggctgagattaataatctgctcagagaactatttttcatgcgacacacagaatcttattgtgtgtatttcattattgctatctgatggtcccaagggttcactgtgtttatataaagattccttgcctctttccagagcctggaatgtttatattttagcacataatcttcagagactctgatgtgaaaagtagaatgtgtttttaaaaactcgttgtgtattttccagagttatttacaaaaaaaaaatttttattgaatttgcattgatcagtagttcccaaccagaggtgactttgcttcccaggggacattgggcaatgactggagatatttgtggttgtcacaactagcatcgagtggacagaagccaggagtgctcaaaacctaccatgcacaggacaggccccacagcaaagaattatccagccccaaatctcaataatgccaaggctgaaagacactggtatagagcgtctatcttggttatacatgacaacactacagtttgttccatccaatagagaatgtcgcccataatatacccagagcaaccaccagtggcctttgcaattataaccctgttggcctgagaatacacatcccccgtttctgtgcatgtctagtcagggaactgaccaccaagttggaagtgagagattctaggtcattttacttatggcttaaatagctcaatatgttaaagagaatttggtgctatccttgttagtcatggcaaatttcctggctgcctatagagaaaagaggcaaagaaatctattctcagctgatatgatgggaaaagaatttgatatcttaaaaagaaatactcagtatttaccactgatttgcagcatgacctcggggaactccctggcttaaaagcacaatgactcatgagttctccgtgatctgtgacatattgagagcacatagtgttgcctctctctgtttattcttctaattcgttaaaagaatcaactatgatttattgaaaacaatatatatatatatatagtgtgtgtgtgtgtgtgtgtgtgtgtgtgtgtgtgtgtgtggtgtcagcctacctttttcctccatcaacagggagggtttgattaggggatgaaccccaaatgctactactgccctactccaacagatcctattttcactgtttctacatccatctcacctttgggaaccataaaataagtgttttgcttgaagtgtagtcagggagagtcctcatatggatgtaactattcaagtgtttcttcaggtttttacaataggtagaacttgcagatatacatttatcaatttattattaatcattagtgttatgaacatcaaaatttcaaggtagcaactatccagctttctaaagtaaaatcaaagtgcttttattttgcaccaagtatagtcttaatcatggccttcaggtatatttccttactccaaacataattcagtggaaagaccaggcagtgacctggggcacttgtttttatctctctgaaacttatttgtaaattggagataataatcatattttatagagttcttgtgagttgaaaatgttagaagtcttaatactgaaaatatctactaaggattaagcaggtggatgaaaaactcacccctggattcaagttaatgaaatcttggaattccgcagaataaacagaaaagcctaaaaacttgctaagagagggaagaatattggccacatgccaagggatgcaaatcaaactggtgtcagacattctgttagcaacagaagacactagtagatagggtggcaaagcttcaaagttttgaagaaaaacgaatttggtccttgcattctatacccagccaa

SEQ ID NO: 45871 - DNA, 1506 bp, Homo sapiens
ctactgaaaagaccttgttaattcccaagtacctgcagaaccacaaacaggaggagaagcaggaaatgaatgctgggcaacactgagaaacagtattttgttgtacaagaatagaaggattgggccgggtgccgtggctcatgcctgtaatcccagcactttgggaggccaaggtgggtggatcatttgaggtcaggagttcaagaccagcctggccaacatagtgaaaccctgtctctactaaaaataaaaaaattagctgggcgtgttggtgggcgcctgtaatcccagccacttgggaggctgaggcaggagaactgcttgagcctgggaggtggaggttacactgagccaagatcaggccactgcactccagtctaggcgacagagtgagaccctgtatcaaaaaaaatcaatcaattaatggaaaataatagaaggatttggcaaattaattaacttaccttttctgtctcccaaaagatctcaccacttaaattttccctatactctggagtagtgcttttgtctgtgctgacaacagggatgcaaccccagaatttccatagcattcagatgcagtcatttactgtttcaaggacattagacaaagatgttgagaagcatatccctgggccatgaacaatgtcagtcatcaaaagggatatctgaggtcgagctgtggcagatctgggccctgaatctgagccgtgtctaagaaggtgctgagtactcctaataaaggtaaaaggggctgcattgagaaggaaagtcgctgcaagcattcctgatctcactggatcatggtgcacattaggccattggctggacacagccacatggacgtctggtgaccgtggcacggtgcgctgcatctgaagtacccgcctgggttggctacagctctgaaatgaattaaaccctttctcctggttgaagctgagtttcctgctatcagcatagcagaagacacttgcagccttaagtacaaaatgaggtaatattgtgaaatgtttattgttgtccatgtgattcttggagggcatctaactatggattcctgttccattgactggccaaagtctattccctcttccaaccttttgaattaattaaagaaacacttttatttttttttggtaactgacttacttcttccaccttagacaaccaatttctctttgttttctaaatgtagcaacatacactctttcctagggctcatcacgttaatggcagcaagaacaacaataaaggcaagcgtttctggaatgcttactagctgccaggcactgttcgaagcactttaaatgtgtgcacgaatttgtcctcatagcaagcccaagagatgagcacatttttaccagagaggaaactgaggcacagaggagttgaagggacctgtcagagtaaggttacacagggagtctaactccagtccgtgttcttatgcaatttgctatatgatattatgggaaacgaagaaatggtactttttatgtgcca

SEQ ID NO: 45872 - DNA, 703 bp, Homo sapiens
ttacgggcgtgagccactatgcccagctggcatttttttgataaagggcctcaggtgttcatgtagaaaagtgaacagaagaaagaactccatgcaacccatcactgctcaaaaatctgcaaagaacctacaaacctcaggaatgtgtttgcaatgccctgaagtgtcacatttcactgggcaggaaacagttaaataatttcccccaaggtcacccctaatgtcagtagaagagctgggcatggagcccgggtctctggctcccctccctgaatttcaggaagcaaactacactctgacatttaatcagtgagacattctgtttgtgtttaagcattccctcgcaatatttgcaacccaaaccttgtagcatggagtcagcgcctgagaaactgggaaggacatctgacccaaagccaaaccgccagtactagatgtagaaagaataagttaaatctagccatgttcaataaatgatgccattaaaaaatcgtctctgaagactttctcctaatccccaatgtgaacacaggtcaaattacattatggtagatgtggtcattataagattcctgatcctcagccaatggccctctcccttatttccagcatattccttgcaaccaaattctaggacattctctgagaatttgctacagagggatttgatctgtaccctaaaagggtaccatcacacatctaa

SEQ ID NO: 45873 - DNA, 1859 bp, Homo sapiens
ctggtcaatattgcatgatgacttctcaaaattaccattgatttaggtttccaggaaaaatcaagcatgcttcaaggagattttagtagcaagaaatccgtattatttgacacctgctattatttcctcagcatcccagaatttctcatttaagtactgcccaatattattctggctttctttgcatttgtgaatacagaaacaaaatgttttgttgtaatttattgcagaatggcagtttggcctttggggaatatgaatcatgggtcactgtcataaaacaacttatgtttggaaacttttttgaataatagttggtttgggacaagtctttttttcccccttactaagaaattaggagctttcttaataagaaataacattagagttttcaattttaaattgtgtgaatttgttttaattgtatgaaaatggatacaagataatcagttgctcagactagataccaaaaggaatggttattaagacagtagaaaaatatttttgaagaacattcataggatagccatcctgctcccccaaatcaaacctgaggcaatagaaaactatgcttttagaataataaaaatagcagaaaactcctgtgagagaatgtctgatttacctttctggaaatcactattttgttccagatgggtggactatggaactttctgagagaacatggttacaaaactgttgtgtgatcaaagctctggagggagggactgttttgactctcttgttactatgtgagggatggaattttgcaaccagaaggttccacaacagttggaaacgacagttgtgtgagtagcaagccgaagacaaatgtgtgtgtcctgttactcctgctctgagaactacacactgccgccgtgccaagatttcctgcttgcatcaatattttttataattaccaaacctcatgtgcataacccattagtagcaaaaaaaaatcttacaagtaacatctacactgtctttaggttagacagccatctggctagctgatatgcactacacacacacacacacacacacatatgcacacacacagatacccttatttagatgccttattataatgctagttccattttcaatcatctaccataaatcaagctctacctccttttgcagaaattaaaacagctgaaatttaaaaagcgcttagaacatgttaaagctcaccataggctattgtcatcctgttattagcggcttactcttatcttccgttctctggctcatctctctcacttgtgaaatcatgtccctttcattttccttagcttccagaaagtccattttatcaattgccctttctccaacttttcccaagttggactttgactctagactcgtgggttcctttgtattgatgtccacagacattttggtacaataggaactgccatgaaaaggagatgccaatacattcaaaactgtaaatttaatcgtgtgctttcaaaaacaaaatagtacggaatggtatagcagaaagtttagggaagggaaaaatgagtggtttaagtgttgtttaccagaaacaattcatctgcaaaatttgatcccatgaacaggcatctggagaaagcttcttatgttggcaacatacttacagagtcagaagctggtgagtttgagatctggtaaggtttggggaaacagatgttaatgtaggaggtagatattgggaattgagatgtgtttgcaaaaaaagaggtacttgtaaagctagtggtggtgaagttgtggtgttggcagtttattaacaagaaggaaaggttacttgtaatcaatgatttagatgggaaatttgaaatgctttaggattgtgtggaatactgtcctgt

SEQ ID NO: 45874 - DNA, 6235 bp, Homo sapiens
tgagccactgcgcccggccctgagtataattattaataccttccctttcactctcaagtgtcctggcatgggtgttacttgtttcccatttgcttagactttctgctctcggtggaaaaaccatcacacacagttcacttgctctcaccttcaagttatttccctcctctagaatgctgtacttccaccactgccaaatcgtgaactttctctccttcaatatcccactgagaactcacccccaggatgggactctgctcaccccgtcctctactcaagcagaagcctctcagcgatcatgtaaataactgtataactttaattggctctgtttataagcctcttatatctttttttccctctaggtatttttccatgtgtttatcctgtctccattaatttgtaatcttccagagggcaaggcctgaacacaagcttctgttggtgtaaagtggaggcacaggtaaggctgattgctagacactgccgtccttctttattagtaatctgttaaaaaaaaaaaaattctttgttgtagtgttttgttagtgatggtcccgagactgctaacctaatgaaaaactatatccagtgtctgctagtgtccagacaaaagaaaatcaacagttacaagcttttcataacgtgaggggaaagtgtgcggatattttgacccataagggaatttatggtgtatggaaagcatgttatagaatttgttgcctttagatttttattcttgtcttttcaaggctgcaggactgtctcagaagggaaataatatttaccttccaaactgagatctaaaacccgaacaaagcctcaggaaacatactccaccaccatcttacaagtttgtgctacgggtggagggaaaatgaatctaatgtaggaggcctcccgctgtgcgtctagcaggaaagaccatacggtgcaagtctccaggatcactagaggggtggattgttcatttcagtccaggtagcaacaggaagcccgtgcaaatgttcctctctcactgcggggctaaggagtgtgggtcctttcccgcgactacctgcttgcctctctcagaacctgcaagtgaagtgcggaagatctgtctatcttctcggcggcgcagagcccaaggtagaaaccgatggaggcggtgcactagataacatcaaagccccgggcaggggccagaaaggggggcacaggcagcccggggaatgaagcgcctccctctagcatttcctctcacgcccacttccaacctaggaggcttttggtttctgcttttttgtttttaaaattaaaagttaaacccaggaagctttggatcagacttttgtgttgcagttcgggtaagtttttctctcggttcttttgtctggcgcctggcttgggaagagcctgggcgtggggcagagttggcagggcgtgcggggaaggttttgtcgccgggttgcccagaggaggaggggattcggccggtggatgggaaagcccagcgcgcgcggagggcggagggcggagggccgaggggagggacgagcggcgtgacccggcggccggcggggaggaacctccgggatctccgcgtggcggtggcggcggcggcggcggcggcggcgctgccgggccgcgcgctgggcggagggccggggccgcggggccgcgccaggggggtgcctgagccgggcccggccgggcggccgcgtgggaacccgagccgtggacgcagcggcgggggcgggcagggtggcgcggggcccagtggacgcggctccggggtggactttgtgccctctccaaactgttcgccaagaaaaacgtgtgttgagcttttcagtgacactatcctccctcgaaccccactttccccaaggggggctccagaagcgttcacgcggacggtggggatggaaccatagagaaatggacctccaggagccccctcttttttgggggcagagaatggtcacttgctcctgcattgtcccaggatttttgacagttgaaactgcagtttaccattcacattcatcctccacattcaccctctgcttcatttttttcccacgctgtgtttatttgatacattttgagaaaatatattggatttgccacaaaacaagcctaaagaagctactttatagtatagccaggtttccctgcatcctgatatctgggaagaattgtaggcagaattaggaaaagaaactgcatttagaaaattcaaaaacttactaggaaactattctgtattgtatatatttcaaataaaagtttaatatcggtttgctgctcaaggaaatagttgaaatgtcaaaatttacctatcgtaattcgaaattgcatgtatgttttgttagaaagttcgtagtaatgctgaatcctacataaacattgtgttgacagtatgttgtgctcaacaattattgggttaaacgttattcattcagttagcatttttcacttccaaagtgatacaaacttcactcattatcacattacctttctcctgacagattaatagctatacgttcacagttaaatgcatgtttacttttggattcaaataacccagttgggaagttacattatatacttttttggtgattgcaacctattggatatcatttcatttcacaaatgagagatggttatagcacaatgaaaataaaaattgcattatttcatcgtagggttagcattagtatgctagacataattgtacatgtacacagttggatgatctttgcttttataaccaaatttactttgtagtaggcatatttctccctttacatgatattatttttggctacacactcgccattactgagtattccatttttaatcattcccattctggtggtttgagcttttcttagctcaaatgagccagaggtacgatttcctcaggggaattttaggggtcaactccagcaggaaaaacctagacgtcgttatggaagcccaagggaacaaaacaattcaagtttgcacagatggccagctgtcttagtggttgtatggtcgtttagcatttttattccttaaaaggggaaaccagtttagtttcatcagggatttttttttttttgcatcaattttgtttcaccttattcctctcaagtttgaggtggcccgttaaaccagccacttttgcttcttgaggtggacctgtggaatttctgtgccccaaactgcgaacgttctttaggtctaaccctgaaaaccttcgttaccctggtccagcccctcttcactgctttgccatggatttccactccttgctttctctactgctttctagcagccggggtcacaccttggttcatgctaattactccctcttcccctttcacgctctcccctcttccctggagcccggtccgacgaccagccccgcaccccccttttctgtccccgaagtcccctcccgggttggccctataagctgtcaggctggcaggcaggggttaattgcgctcgcagcttcggcactgggaagcaccagcggggctttggagcggcctctggaataaccttggctttcctcgctcttttaatagaacatccgccaccaaaaagtggtttcagttcagggttaacatgtccccttccactctccaaaccaacaccctgccccctccgtttttttaaaagttgtttttcaaagttaatgagttttaagtttcacaatgactttccccttccttctacgcgttgctgaggaaacccccttggggtccccccccccccccgcctccccctcccccattctgcccgggcgaggggcggggccgggagaccccatgacgtcagcggccggcccacatcctgctgtagaaagtaaagagacggtaaagagaaactacggccccgcccgtcccgtccctcttcccggaccaaccgcccccaactgagcgaccccgccaggccttcccggggccgcgtgactggccgggcccgcccctccgcccccgccgtgtgctggttccccaggcgtcgcgacccagggctcccgccccccgcgtccctaaccccgcccctcccccccgggctgcgctgccacctcctcccgcgtccccctcccgtccctgcggcggctcggccgggcggggcggggaggggcgaagcggcgggtaggtggcggggccggcgcggtctggggcccgccccgccggggagacccggggcactggctccgggttcgtgccgggccgggcgcccatccagtccctacacccggtcagagctggcggccgcgccggcccagctgggccccggcgcctgggcgtcccgcgcccctcgccccggcctcaaccccagcccccgcggggacgccccctcccccgcccacgcgtcgccgcccgcggcctcccctcctcccgcccccggggatcccctgccgccccgcccacccgcgggaaagcctccgaccttcgccctgcctcccccgcgccgcccggcccgcgttcctcccgccggccccaaagacgctaaacgtgccctactctgccccgggggagaggtaaagcccgcgcccgtccttcccgccccgggccccgcggccccagggtctgtccgcccgccccgccgcggcgcgcgccccccagcccggctgcccggctccctggcggccgcgatcatgccgtggctccgggcgccggcgagcttcgccgcctcctccgcccggcggctgcggcccccgcccgcgcgccccgcgctcccccccccgccccccggcccgctcccctgtttaatatttcagtgctgggtggtgtgagcgccagtcgccggccttcagcgtggcggctgctgggcggcggcagggtggcggacggagcgggggaccggggagcggcggccgccggaggaggttatgtttgtgtttggggttgtcaagtgaaggagggatcccaggcgccgccgccgccgccgcgcgggggtcgcggagatcccgagccgcggccgccgccatcagcagcgcagctccagggccggctgcagcggcagcggctccgccgggcgtcctggcagcaggttcggcgcgggctccgcggcgggggcgctgcagctggggagggcggcggggcggaggggggggggggcaggagcacatcccttcggcgggcggggggcgtgcgggcgcgcgtgtgtgtgtgtgtgtgcgtgtgtgtgcaaccgccgaccttgcagaggggatggctgcgtgcgggagacccttggcacttctgggcgccctcgccgcgcgcgagccgagcaggtacagagggacccagcctccccagccgccttccagccgcagacgcattttgcaagagggtggggggtgaaagagaccaggcctcggcatcccaacctcccggctttgtgggtttctttccctttcgttctttgctctaagtgcctgtttactcccggccacctgggtagtttctttccgggttgggagtgcgcgccagctgcagttgggaagggggcggtgggttggggtgcgggtcggctcgggctcgccttggggtcgggctcgggaaggagttgctggctggagaggggagggggcggcggcggagcaggcggcgaggaggagtctcagggctgccgcgctcgcctcatctcgtcctcctcctcctcagctctctgcatccactccaggctccttcctgagctggcacttccattccccccctcctcctggcatgcgaagcgctttgttcagtgcagcgttgcagaggggttttcccaggctccgccctccacattcattcatgttttttctccttgcaactgtctttacgctttttgatcgtgtcatgtttttgctccatgtagtatttatttctttcccgtaaaggaacggtttatcactcgtcctagtcgctacaatgctgctgtctttggaaatacccacttccccccacaaggatttaaatatgggatggacagctagggacagtgggtaggcaatgaacggggtagcagaaagcctttacggacagggaatgtgcatattttacatttatgctccggatcccatgggatcacatgattggattacagtcagagttcacgctttaaaaacttccaaatatcgttaccatttaaaagctttaagtttaacaacgaacgtagttaagcattcatgcaatttatttggttcagctgtgtctcaattctttattgaatcagaaccttcctgaattagatagtggatgtttctttagagcaaggagct

SEQ ID NO: 45875 - DNA, 642 bp, Homo sapiens
ctgtgcccccctcaaagccagcgcacctgtgtacagctgagggcttgctgtgcatgtgtgtttgcagtgaagtgcctcagccagttcctccttccttctccaagctgactggacccacatccctcctgtgtagacattttggagcctccgctgtgatgcttgcctgtaacccatcaatagagctaagtcaaatttgctttttaagaaggttcatgtttattttctggttctagggcttctgtggctatttagatgagttgtttagaacactagactaatgagatcaccagggtgatgaaacattgtgtggatcttggctttcttctagcacagtcagctctgttcctaaccctcgccatctactgggcatttttattcatatgcttgatcagaagttggcttgggtgaatgtgtgtgtggatccaaatacatccaccgttcatctcagagaagcagctcatcacctgggtcctgggagggtgccctgtattgctcactggatggagaggcagggcagctttatttcacaccagctattggcttctgatacgttagattcacctgaaaggagggtggagcatggtggggtttatgttaacatgccagggcagatgtatttgtttgtatatttcctttaacatc

SEQ ID NO: 45876 - DNA, 652 bp, Homo sapiens
ttaaagggttgaattttcttctttttggccagccttctcagactgttgtgtagacagagtcctcaggtattgctaccaagccaatctaggtccatttgtctgcacacaatgaaaagccaaacactgaatcactggatttttatagagagaaagattaatggcaaggcagccatgcaggagatgggctcaattctgtcttcccttaccagcttaaagcagtatataaaaggaggagatgctggaggaggagttttggggttggttaatgattgttggaaagggaggggaggtttggaaagtcccttgagcaggcacagttgtctcttcgtgcttcctcatgggttgcctttgcaaattcggagggagttggtgtgaaacctgtggtgaaaatactggctttgatatcagaaagtccctcatctggcaagaagtctattctgtgcagatcccaatcagccataccagttccaaccagcttcaaccagtcaaccagttttgttacaagcagagggagttctaacaagctgtttctttatctgcagtgctgtaagacaagctcaaaacttcttgttagttaccagtttctttaaccccatggagcactgtttaagtatgatagtgaaaaggggaaagataattcagttttgaaaga

SEQ ID NO: 45877 - DNA, 3623 bp, Homo sapiens
atttccttctcagcaccaccttccttgcatattcacttaaccttgtacaagaacacctttttgccctaaatgaagacacccccccaaaaaaaagagtcccagaaaatatgtccctgcttgtgcggggaataaatagaatattctgaggtgcattcctccttcctatgttaggcaacattccttgaccctcctcggcccccaagccaggttgcgtttttttctgccatttagaagggttttcctttttgtcctagtaaaacatcagcccctgtagctcttcatctccccctggtgttcttctcccgccatgtcttaagattggtggcaccgaccaatcttaagatttaagttctgtgtgaaaaacacctttgcttttcaatcagtttatcagcctcctccgcaggggaagtgtggacacacaaaagaacttatcggggcttctcatcagtgatagggaaaagactgggcatgtgcctaaacgagctctgatgttatttttaagctccctttcttgccaatccctcacggatctttctccgatagatgcaaagaacttcagcaaaaaagacccgcaggaaggggcttgaagagaaaagtacgttgatctgccaaaatagtctgacccccagtagtggggcagtgacgagggagagcattcccttgtttgactgagactagaatcggagagacataaaaggaaaatgaagcgagcaacaattaaaaaaaattccccgcacacaacaatacaatctatttaaactgtggctcatacttttcataccaatggtatgactttttttctggagtcccctcttctgattcttgaactccggggctggcagcttgcaaaggggaagcggactccagcactgcacgggcaggtttagcaaaggtctctaatgggtattttctttttcttagccctgcccccgaattgtcagacggcgggcgtctgcctctgaagttagcagtgatttcctttcgggcctggccttatctccggctgcacgttgcctgttggtgactaataacacaataacattgtctggggctggaataaagtcggagctgtttacccccactctaataggggttcaatataaaaagccggcagagagctgtccaagtcagacgcgcctctgcatctgcgccaggcgaacgggtcctgcgcctcctgcagtcccagctctccaccgccgcgtgcgcctgcagacgctccgctcgctgccttctctcctggcaggcgctgccttttctccccgttaaaagggcacttgggctgaaggatcgctttgagatctgaggaacccgcagcgctttgagggacctgaagctgtttttcttcgttttcctttgggttcagtttgaacgggaggtttttgatccctttttttcagaatggattatttgctcatgattttctctctgctgtttgtggcttgccaaggagctccagaaacaggtaggcacgctcgttgacttgtaagtctcggaattacaagttagtgtgttcttatccaccttcatgcttttcttgcttctatttttccccgttctttttatgactgcagcttagagagcaagtgtctgagaattattgctgaaagctactttaagtcttctagtgtaaaatgtaaaattcctctattgaatacaattaggtgcaattgactataacatgacattaaaataacttatcgttttattattattattccattatgtgtttccttggcttttaaaaaatgagaagagtatggacatatacaatttagtcaaatgtatgtttgtaatatatgtgtttatacaggtacacaggccatataggaacttaaatcttatttaaacactattttaatagtgtgttaacgtgtaaaatatttaagcattccagcttgaagccaaggaattgtatccagtcgttcaagcaatgtatgttcagtaaaatcacctgcagagcaaaagtctgttgactaactaccgcctccccccccccccgccaccaccccccgcaggcggtttctgggtgaagcagatgttttctttaaaatttgtcatcattgactttaggtttcttttggcaggtttttggcacccaaaacagtgtgagctctcttttcagctttattcacctgtgctgggaggggagctaggataattcttggctgccgaaggatttaggcagtgcgtgtgcatctgcccgggtcccccccgtttttagggtcagtgcactttttttgtcttttcgtgaccctgactaaagagaaaggatgtcaagggaatgaaaatcctggaatgtgtctgatcatttgaaatgtacaaaattgggcagataagctgcatggctaaattgttaggaggaagaggcaaggcagtagtggagaagggggaggcagtggatcccacacaagcctgatgcccagggattcggaattcaaaatccccccagcctaccttcagtcccctgacctgcttctcagccccaccttaggtcactggtttctatggagttaccctcctgaattgaatattgaatagttaatttctctctccaatcattttccccacctaattttgaaagatatacatcatctggggtaccctgtgccctacacagcatgtgaagtggatgggtaccccctaaagagagggtcatcctgaatggggaagtggccccaaagctaggaataactgtgatttcttgtctttagtcatgtgccaatgttaagtaagcttcagtggatagtgctgtcctaccaagttccttgtagaagccagccggattttcaacaggcagcattccacagcatttccctgagcctgcttcaagaggggtgggggaagtcccttttcaggtgtttatctcctctgcatttgtgtaatctccctgaaggtggataagccaagggcatgagggggaggcaaaaggtgaactcatgttaaggagggaaaaaaataaagagcccttttttctgtgtttcttgctgatggcaggctgtgtgcttcatctgcttttatctgctctgctagctctgactctactgtgatccagcatgtctctcggcgtttgaggagacatcccccactgacctgctctttctctccccagcagtcttaggcgctgagctcagcgcggtgggtgagaacggcggggagaaacccactcccagtccaccctggcggctccgccggtccaagcgctgctcctgctcgtccctgatggataaagagtgtgtctacttctgccacctggacatcatttgggtcaacactcccgagtaagtctctagagggcattgtaaccctagtcattcattagcgctggctccactggagcccagttttagagtttcttttctagggactctgaaggtagtccttctaacaccatccaagtgcctcagtggggacagtttccctctattcctgaaaataacgacagcttcgttcttagcaaccaaggggagggtcttctgaggccccgtagctcaggctactcatgatgggacaagcaggaggccactgcacgtttcaaatgaggaactttcagtgagagggcctcagggggacactctcacagtggcatctgatggggtttcgggaataattgccgaggtcagatg

SEQ ID NO: 45878 - DNA, 1551 bp, Homo sapiens
ttctaagcataggggcaggctttatttttacaatggtaatagatatcacttgaggttttatcaaagagttgcggcgggtggtgaaagttcacaaccagattcaggttttgtttgtgccagattctaattttacatgtttcttttgccaaagggtgatttttttaaaataacatttgttttctcttatcttgctttattaggtcggagaccatgagaaacagcgtcaaatcatcttttcatgatcccaagctgaaaggcaagccctccagagagcgttatgtgacccacaaccgagcacattggtgacagaccttcggggcctgtctgaagccatagcctccacggagagccctgtggccgactctgcactctccaccctggctgggatcagagcaggagcatcctctgctggttcctgactggcaaaggaccagcgtcctcgttcaaaacattccaagaaaggttaaggagttcccccaaccatcttcactggcttccatcagtggtaactgctttggtctcttctttcatctggggatgacaatggacctctcagcagaaacacacagtcacattcgaattcgggtggcatcctccggagagagagagaggaaggagattccacacaggggtggagtttctgacgaaggtcctaagggagtgtttgtgtctgactcaggcgcctggcacatttcagggagaaactccaaagtccacacaaagattttctaaggaatgcacaaattgaaaacacactcaaaagacaaacatgcaagtaaagaaaaaaaaaagaaagacttttgtttaaatttgtaaaatgcaaaactgaatgaaactgttactaccataaatcaggatatgtttcatgaatatgagtctacctcacctatattgcactctggcagaagtatttcccacatttaattattgcctccccaaactcttcccacccctgctgccccttcctccatcccccatactaaatcctagcctcgtagaagtctggtctaatgtgtcagcagtagatataatattttcatggtaatctactagctctgatccataagaaaaaaaagatcattaaatcaggagattccctgtccttgatttttggagacacaatggtatagggttgtttatgaaatatattgaaaagtaagtgtttgttacgctttaaagcagtaaaattattttcctttatataaccggctaatgaaagaggttggattgaattttgatgtacttatttttttatagatatttatattcaaacaatttattccttatatttaccatgttaaatatctgtttgggcaggccatattggtctatgtatttttaaaatatgtatttctaaatgaaattgagaacatgctttgttttgcctgtcaaggtaatgactttagaaaataaatatttttttccttactgtactgatttggaatcattactgaaatttgtaaggagtgggccaacgtgattaagtaccataaaggcaaataaatggttaaagacggtttcatagaaaagtgacaattagaaggatattac

SEQ ID NO: 45879 - DNA, 2909 bp, Homo sapiens
gaatcagttgaagatgccacctgctctctggcaggcctcatctatgaagccttttcctgagcactccactacttgtcaaaaaactagagcatttgaaatatgtgccacatggtcccatgagttaatatactcatattttgctctttgaaattaactagttgaagtatctcctcacttagtttgggtgtgctttcaaaactatccatttgtttctacatttgttactggccagctaccatgaggcatattgttgagccctgagataatatattgactacagcatggactttgcctttgaaaaacttctttcctggggcatgcttaaaaaaatgtgtataccttgaattattaaatacggatcaatgtttgtgattatggttattctgaaagcatagccttaaacactgtttgaaatttggaaaaggaaaaagatagacaagcaagtctgctataatcttgattaataaatttcgatcatgtactgaaactcagtatttttaattttaccaattatcaacagaaatgtatagtttccagaatcattttggggacaagatgcaaatcttaacaaacaatttactccgaaagaaatggactatgagttaggctgatgtgagttgttggcttttatttctgccctagttatctgatgcagatatcctagtggatgatttattatgatgcttgagtcctgaggctcttacactaagggttgaataattagtgaggaaatgtttttcaaatatattctgattcagacaatttaactatgtgtgtctttgtgggcatatatatttgtgctctgagttgtatgagaaagttccagcacttttcccttttctctaaaaagctttttagacaaattaatattgaaaaccacaaaaatggatgaaatgtattttcttcatcttttcactaatctttctaacataggattatgttagaataatcaccccccttttttctccatcaggtttttcccctggcttcatgagatttagaactctttcttaagattactatagtgttaagagttctggttgagctgggcgcggtggctcacgcctgtaatcccagcactttgggaggccgaggcgggcggatcacgaggtcaggagatagagaccatcctggctaacacggtgaaaccccgtctctactaataatacaacaaaattagcggggcgtggtggcgggcacctgcagtcccagctactcgggaggctgaggcaggagaatggcgtgaacgcaggaggcggagcttgcagtgagccgagatagcgccactgcactccagcctgggtgacagagcgagactctgcctcaaaaaaaaaaaaaaaaaaaaaaaagaaagagttctggttgaggggaaaggtgaatattcagagcacaggcctgttcccatcaagcacatcctgcagtaatagcccagctagcttcatctgctacagtgatgctcctcctatttgcctctgatttaggtttctgtgagtgaggtcctcttagtgaccatataagtcaaagaggaaaaactcgatatccggtgaagtcagtttgtgcaagtacaacaaagtgaagacacacagtgcctagtgtctggtttctctggagctcaggaactaggtgtgtcccagctgtgactcatgaacatggcatttgttacgttaacctaaggagactacagactttatttgctgtccttgtagcaccttttgtcagcagaaaacccagactggcaaacagaactgtatgattctgagtttgaaggaggcaatctctaaatcaaaaggccagaacctatgttcatcgtggtgtacctgctctgttgtaaaacaaggaggaataattttctgtttattactcataagacctggacttagggatgctgagctcatcaatagagaatgaagcccaaatcaataattatcttctattgcaaagtattatttcctccatactggtctttctctggtgaaggattcagtgagtatttgcgctttgagctgttactatataattatcacacagataaggtcagtaggtaaaagctgagcacttcaaataactaactgaggcttcatctctctcctttgtgcctccaacaaaggatgtggttaggaaatacagggaaggaacccctccccacaggctggtaggttatctcattgctttgagggggccctgccttctgctgccttcttagtttgtattacccctaggggcaaggcctctaaagtgagtaggtctatcactttctgggtggtaggagtcctgccagctcatggtgggagactcacagatgaggagggaccttgtcaacaccctgggggtggaacaagacctcactcattaagcctttgtttcagaagctaagcatctaattaggatttttctggtggaattacaagcatttcttttttaagtggtttaagacaaaggactgggaatggggtaacaatatgacaatttttaaacatatagtagctgctgagactcagaagagaggaatagactcccagcaggaagaattactaagccctggatgttaagactaaagaaaattgtgagattttattccctggctgtcttaaaaaatatgatgcgtcattatttctctgccatttgcaaaataaagccagcctgaaggaaacgcacaagggatggtttcttcattcactcagaagacacctgccgtgagacaggcagtgtgcaagattggtctggggaatgcaaagataaattggatccagcccttacccctcacatggcttctattctacctaccagggaatccagtgaccatttattgaggttccttggtattatttaaaaaaatacgtggtaatatcaacaaacccgaatttaatgcttggcattatatatgtcaagatgaagctagacacaagaga

SEQ ID NO: 45880 - DNA, 1798 bp, Homo sapiens
gttagagctacaaaggaggccatgcagccagcattgaagtcagttgatgggaaaaaaggggttgaagaaaatatctcaaaaaaaggggttggcgagaagcaaagatctgttctaaaaccaactcttcattactcatcatgctgtggcccagaacaaaaaaaggcaggggccataaaattgcaaaagaaatcttaaaatctcattttaattttgaatttcctccagaaaatgtgcttggaaggttgctaaaaagcagctacatccataacttctattttaccctcctgtatttttcctttcccttccttaaaataaaaatggacaatccttaacacagcattttttttcccatcaactgactagagggatctgaggttattccaagctttatctgtagaataatcaaggattggttgcagtttggggtgagggggacagcctactctccagtgttttgtgcatggctgaaggcggtctgctaatatgtgagcacataaggagcttgctaatttgtccattaaaagatttgtcaaccaaacagcctaccacacaagaactgccctaggcttcagagccaagaagtcaaaacaaacatcagtggggcccatggatttgggtcactgagataaaagggaaaaaatttattttggtgcctggcttgtgttatcccatcccaggctgtggctgttggctttgactgctaggaaaccaagcagccagtcacagttcctgggtaagtggacccaattatttactcgtcccttacttcttttaaatctctgaaccattcattcatttgccccagctgatttcctctgtacctctaaaagttgggtctgaagggagtttagagtgacgctgaagaatctcaggtgcactagattaccactgactttgctattactttgaatgtaaaagaaatgctgttgttaatgcagctgataagcccctggcaggctggactgaataacccagaaactcctaacatctaaggtctaacactttcacctacttgggcttttatctcactgtcaccgcctatttatcctccattcagcaacaagctccttgagacctggtattccagcacccagcacagttcttggcaaacagtaggagctcaacaaatatttagtgagtaaatggaatgagattgtgcagattcccatgatgtcacctcatgaggttgctcaagtaggcagatcctctgaagcattctagaagggcgaatgagaaccttggggcagggactctatctcattcatccctgtatcctggagcacaccgtttgcttaagaatgaatgaagccctgtcattgctcaagggatgggagtgggtgggtgatatgttttgggatagtcccaccccatcctcagtttgcaaggtcctcaggagatcctgcatcggaatgtgtcagagaggtccagctgttgctaaaaacctccagagggatccaaatggggggcactttccacagaccacgttctcgtttctaaactgctggcaacacaagcagacttgaggaggtagccagtggggcaaaagtcctaggctctgttagccaactgggggacagaaataacaggaacaggaggaatggctttaacaatcatactttattatgattgcaggaaaaccacccaggaaacacaggcccgactgttcataactcaaaaacaggaaatggacaaaacttacgataaggggaaggataaatgattagcttaaagggaaaaataggcccaaggctcataaatgtgccgtgagtttaccttatgtaagacctttttttttttt

SEQ ID NO: 45881 - DNA, 1123 bp, Homo sapiens
cccttgttctcttcattagaccctcttatctcatgagagtagaaatttgacaagccacagggagtgatagtgggtttttatcagaccttcaaggctctttaaaacactgtagttaacattgagaaagcaaatcttctggacttccagggtttccctttggtagacctgcctcttaagggttattcattctgacacctgttggtggggacacatctcaaaggctggctgagcacacaaaggaagaggtttgagctggtaccagtctcatccaaggtcacctgcactgggaagggggtgcagacctgtcctattctgcaattaactcagggcttttgttttcttttcaacggcccagatttttcaactgagccattttcagagcagcaaagatgggaaggccaattcttcctgtctttgctgctctgaaaagttccttatttgtaggtttctttttttgtttgcttgtttgagatggaataaagaaaggcctcagttcagacttaccacccagtgggccaaaagaagtaaagtgacccctttccttgcagagccctccagggcagagcctggctgagggctgacttcatctcacatacctactgacaaacaaataaacaaaggaggagttttaaactagtagccataacaaaagtgcaaacagagaattagctggaagccaagaaatcgctggaagctgcttctgctgtcacgcaacactgctggccttaaacctagaagactccagaaacagtccttgaagccacagcaggcaactaaatcccacccactcagcaccaggccagaaagatgaccctcaatacagtggggaagaagtgagggtttacctccacaccttcatcccacgccacttacctaagtagtgttttggtgtcagttgccaactgataagggctttcccttatttcattccgcagggaaaattggtcttttaacaggtgaaatagggaactcctccagtactaatttactgttgaatgtttatttcctcttgtgtagttctattttatatattttctcctctcaattgatgaattacgtaagcaagcactgatgaggcccttttcattccagacactcaaatgacaactctggctacccatgc

SEQ ID NO: 45882 - DNA, 1487 bp, Homo sapiens
gctcttggggcagcagaatcccaacagaatcaagagaggggccccagtgctcttgagacttcatctgcctcctctcccacgggctcctcaggcattactggggcaaatctggggaccctgcatggaagcccatctcgctaattcatattgggagtggcagacattgtcaggggctgtgagagcagccaggtagaggctagaggctgatggccccctgccgtggtaaatgcctatgattcaagtcatagccctcacctggggcagagggcaggtcctcttgcctgctccgaagtcttgtcttcccttggattctgacgctggtgtccctctaagctggccagtgggctctggtcatccagtgctatcttttgtggaggggacagggacagagtgctaaaaagactccatgcttttctgaacactactgactttccgcctcactctgcagcctcctcaatgggagcctcacacactggctggacactgacactcgggaagatcaaaggttcatcaggacaccagttcattctgattatttctcaactgtttgggtttgtctgggtggggaaagaaaggacagttctgcttgaggtgccaccaaaacactgcctgagtggcagtggagccggggaggctgggcggctggatgtggtcccaccgggaccgttcgccagtggtgtcgctctgatgcctgatttatttgtgtatttggcagatgggaaggaggagttccactgggtgataaattgcctgcactgacctatccctgtcagtggtaagcctgcctgccacccacccccacacaccgcaccaaagcagttcagtctcttagagtacattgtcaagaggagaagagttgggatgggggcagattataatgtcaccagtgaatcctcagggctgtgggtctgtggagctgaatgctggagggcataaacagtgctttcctttcttgctttccatcagacgcagagtcccttccctatgtggcctccagaactgttgagcaggacggggtgagggaggcagtagaggcctgggtctggccctgggttctggtcacctctacgaacaactcaggggcaaatagttttctgggccattgtggatgactgtgatcccagcctttcctattgccctcccagaaatgcaagccacaacatgaattccctgcgtggccttgaacaagccactatacttctctggcactctgtttccccatcgatcaatgattatctctgtccagtcataacagaccattttggtctccacaccaacagcgtcgttggtgtcacctcctgcccctactccacgttggaattcctggggacttttattgaaaatatgtattcctggatgccatgccaagaaattctgacttaatggtgctgcggtgggctcacttatccgaatttctaacagcaccccagatgacattttaatgcatttaatgcatttcttttctctaaatccatgtcaagttaaaa

SEQ ID NO: 45883 - DNA, 1844 bp, Homo sapiens
caaccctttacttgaaggctgagtaaaacttatgtgaaacataatttgaacaagcctgatattttccattttccgctcattcaggaggattagaagtgacagttgaaagtgagggaaagacccactcccagtgagcaggccggcgaattcagaaggcacagcacctgcagccgctgaggacagagacaaaggtctcagtacctccctttgaccctggggacatttctccccagtagaccaaaagttttcattgttccaatgaaataaccatttcaatagtcatcatgtaaaggctacacatatttggttctctgtttagttaataagggaggaacttgtgcaatactgctcagaaaaacaaataataaaatgattacaatgaaaacatgttcgtgcattgtggggtacatggcagttgtctggaaatgttattttcaatgaacaaaacatatttgtttgtaaatgacactatatgaggtgatgtagccaaaatggtctttccagctagctacttaggataaccaaaggcaattctaaacctttccatttctgcaatatcaacttccctccatggataacaaagtgtttagagacggctcctttttaaaccttttggacactaagggtgagtgacactcagtgaggttgggacttacaggtctctcccgagacctgaaagaagacatccatttcttccctgcccttcgggactgcattaggaatgaatcagttagctgtccagtaacgattcttaaatcaaggtatatatattcttaaatcaagggtatatgacgaatgaatcctgtatgcattagcaaacagggaagtgagacagccagctatttctcatgggaattcctgtgcagattgttgcaatgagtcccgttgtgtaaaaaatatatggttagtcacagttcttgctggtgtgcaaatttgtagggctaacacatttccaggggcagagagcaagactgcaggaatgtctgtgatatgaatgcaacgctcctggcatgcacaacctcagcagtctgcaaattgaggtggatgctttactttgccctatttgccattcacctgctttgctaacctcccagccagctggcatttccacagcctccctgttgtcaactggaactggggatgtgtttggcttataaccgattgtaactaattattaactctgcagggtagattatggttttatgttaatagcattgcaggaggctttgagataccgcagcttgataggaccttctgaggctgttctgtaggctcccaggaatgcaagacctgcacagtggccccagactggtactgacgcgatttcctgaggaggaaagacctttgcaatggagggcagggagggcaccctgccctcagtctggctcctgatctaacaccaggaacctcaagtagccaaaatcctttaggagacaaggttcaggtttcacacaggctgtcctgtttagagcaaataaacagcccattcgtgtatattttggaccaggtctctggactgcccgggggcaccttgccacctgttgtgcaacctgcttgttgtggagaattagggaagaacaattctagaaaggggtcccaagtcagttagctgagacggggtattgagagtccttttgggatgcacttcacatggattctgggaggtaggcaggaggttggggatagaaggtagggagagatgtggacaagaggacctaaagtaagacagctgcctgctgtttgcccttgagcagcgaatattccagcagaggggacagtacccaggcccatggcacctctctagaggtctaagggacatgcttcatccttaactgttgccatca

SEQ ID NO: 45884 - DNA, 1238 bp, Homo sapiens
tccatgggatcaagtgatcctcctgccttagcctcctgagtagttcggactacagacatgagacaccaagctcagctaatttttttttttttttttttttggtagagatgaggtctcactatgttgcccaggctggtctagaactcccgggctctggcaatcagcctgccccagctccccaacaagctggggatgagatgggcatgagccaccacacccagccctgcttgtttttgcctctagtgctctctctctgcctggaatgcaattccccagctcccctgccacctcaggctgagttgggtacccccacctgtgtggtctccttgggcatccccccctcatagcctgttatcatgctgcactctaattgttggtttacatgtccctcccacacttgattcagagtcttttcatctttataccctcaaagcatatcagagtgccttgctcataccagaggcataataaatatttgttaaatgagtcaacgaaagactatgtggctgtggacgaggctggctttgagtgtaggctgggatgggggagttggaacagtagtgtctgtagcagtaagaggcggaattagaactcacgaacatctagacatataatgaggtcaggagctactctgcattctgcatgggtctttgcatatctctgaattacttataatacactaccgggcccttctgatgaagtgtaagctagaaaattcctccccaccttaactttatgggcaagcattgaaacctgcccagtgttattctcactgaaaggctcatacagcagtgactgtaaagtgggtttggtcacttatttttacttttatgagtgttttattttcagttgtaatagtaatcttagtaagcttttacttagtgtacactaagatcccaacaaacaatagatttgcccttagcctacgtccactccccaacctctgtttgctgagggattctcagccttaagaaaggatgcactcctacacagtctacctaccctctaataaatgccaagacaatgcaagggaagtaaaaaataccaaagtgagaaaatactgctattgtagcttgaagcttagagggtacattcctccctaccttaacttaaatactctttccacagaagcaagaaacaaagacagatccctgaaaaccaagagtaatagagaaagtgtttacatgaatggacacaggggcatgttttgttctttctcagcgatcctttgttgttgc

SEQ ID NO: 45885 - DNA, 3432 bp, Homo sapiens
ttaagagttcgagaccaacctgaccaacatggtgaaaccctgttgctactaaaaatacaaaattagcggggcgtggtggcacatgcctgtaatcccagctactctggaggctgaggcaggagaattgcttgaacccaggaggtagaggttgcagtgaatggagatcacaccattgcactccagcctgggcaacaagagtgaaactccatctcaaaaaaaaaaaaaaaaaaaaaaaaataggaaagaaacatagctcctgttataataggacctttaaatatagaagttcccctttctttcctttctgtgacctgagatgtcatggaaagtccttcattagctcaccccatatatttatttttggacttcctcattgaacaaaatgatgacactgctatttttataatcactactgccgcaaaaaacaggaactttttcttgtcccccaaaaccacagattttccagagcctcactggtcaagctgggctcttgcttctcagtcccactttcttcttatctcaggggttctgtttttaatttgacatttcagtttctgtgcataaccatggtagaaggatttccagattcttggtaatcattaaccaactcaagacaggcatagccctgccctgcctccccctcagctgaggccttgctggagaatgtctgggaagggcattcacagagcacggagacgtccaaagccgcatggagggtgcctggtgaaaggccaagtgggggccgagtgtggccatgccatgggacaaggttgaagagagcctaatggcatctgaggaaaaagaactctaaggaagctattcttggggaaacggaacattcacccccaaatctggccaagcactgtgcagtagacttcttaggctccttctcagccttatcgttgactcgatatttactttaccctcccttccccctgtgcagggagaaggccgagacgtttatgcctatagagcgggccataaaatcttgactcttagataatatcattttatcattctttgtagtaggaaaacaataaatattttaaaatatgtttgtctgtgttttcagacttagtggccaacctgtgtgtgtgtgtgtgtgtgtgtgtgtctgtgtgtgtgtgtgtgtgagagagagacagagagagagagaaagagagagagagaaagagagaaagagagagagagtctgctaggcctgccataacaaaataccagactgggtgtcctatataacagaaatttatcttatagttctggaggctggaagttcaagatcaaggtgttggcaggtttggtttttcctggggcctctctccttggcttgtagatgccgtcttctcctgtgtcctcacagggtcttccctctgtgtgtgtctgtgtcttacatctcttgttcttataaggagatcaattgttgtggatttggacccacacatatggcctcattttaccttaattacctctttacagattctttctccaaatacagtcacattctgaggtactgagcattagaacttcaatatatgaattttagagggacacagtttagcccacaacagtgtgtgtgtgtgtgtgtgtgtatgtaacagtgtatatacacacacatatacatacacgtaacatatatacagacatatatagtcacacacatatgcagacacacacacactgttatgtgtgtgtatatatacagttatatacagtatgtaaaaacccatactatatataaaatatatattatgtagatttttatgtatacttcttattacacacacatccacacaattctgagatactgtccaattgtgcttgaaacttcctcctgtctgccttgggtagctttccccataaagtagacctcacatttctctgctcttccggacacttgttgtctgcattagttaatctttgcaaatttctctgcagggcaggctcccttaaccttctaacctcaccatgactgttaagtaggaacggaatggaggcactctgctccggggaaacttcaccagtggagcctgtaggtggaatctcaaagcaaaaatgccttctgggtgggggctggaaggggtgagcggcctccttgcttttgtttctctggaattcctttagcagcaagcaggaaaagtgcccgcagcaggggactctcacagggtagacttctgtttaggctgaggaagcagggatccagccaaagaccaggaaaacaccatgcttctgggttaaagataaaccaagaaggtattttaaaagcgagctgctggtccagtgggaacaatagataagttaaaggcctggggatgaagccaatttcatctctgactactgttgttagaaaactataaatgacataaaaattggcaacagtggtccacttgaaaagtttttccagacaatcttaacttttcctttggtttatggtcaaaatggacagagacagcttatctttcccaacagtccacacttcactcatttgaggtgacttctctacttgtcatttacaaattggtcaacgtgtgtgtgtgtgtgtgtgtgtgtgtgtgtgtgtgtgttttgagacacagtctcattctgtcacccaggctagagtgcagtggcatgatcttgactcactgcaacctctgtctcccaggcttgagagatccttctgcctcagcctcctgagtagctgggaccacagccacgcggctccacaccctactaatttttgtatttttgataaagacagggtttcaccatgttgcccaggctggtctcaaactcctgagctcaagtgatccacccaccttggcctccccaagtgctgggattacaggcatgagccaccgcaccatcctatttttttaaccagatgtgggtactaatttgtctgagttcttgctactcagggtagcaaggatgggcctctagcagaagcactgtctgggagtttgtggcaaatgcagaatctcaggtcccacccagacctaatctgcattttaccaagatccccagttgacccttatttttattaaacattgagaatcagtggtataaggccctaataccccaatagcaactcttctgaaaaggggagaccacctccaaaagtgcaatactcttactatatgggattgttttcatatagtacccgatgttgagtacatgataagcaaataaatgcgttttgatcactgataggtctgctttcttcctgctttttagtctgcacatttgtggttttcgtatttatctaattacattatttttatgctgtgctatcatgggtcactaacttgagtttctgtgcttcagttttgtcttctgtaaagtggaatttaaaataatatgtgcctcataatattcttctaagctgcgaatgtgttaatacctgcgaagcgcttggtgtcctgcctggcatatcacaagagctcaataaatgtt

SEQ ID NO: 45886 - DNA, 817 bp, Homo sapiens
atgttgtgaagttggggaataagggaaagagaggagccaaagatgattctaaggtctttggcccaagccactgcaaaaattgagttgttgtttagtgggattggggaaaagagcaagtttgagaggaaaattgagcatctggatttggacacagtaagttcaatttgttcagttgacatccaagtggagatgtcaagtaaggaggaggatgtacaggttaaagttcagaggagatggttagagccatgaaattgtatgagatcacctagcgggtgagggtaggcagagagagaagagctttgggctatttccaaatggaaagttagagctgatgaagaggaagcagcaaaagagattgggaagttctccagaagctaggagaagacctaagagtccaataaaccaaatagtgttttgatgcttttgctagtttacacaagacaaaaattgagaattgatcattagatttaataatgaagaattctctcgtaaccttgatacacatagttaacatggagtggtggggacaaaaaccagattagatttgggtcaaaaaggaataaggaagaaaagtagagataaggagaataaacaaatcttttgcaagtcctttgaaaagttttgctctaaagagaagcagagaaattaggtggtcacggagagagatggagagggcaaaggaggattaaaaagatggggggccttataatgtgttgacatatttatgagaattctctaacagggaagagagacaatgaggcaggagagagggctcactcctcaagatgataggagggggtgggatctaacgcctaag

SEQ ID NO: 45887 - DNA, 3153 bp, Homo sapiens
gaataagctgtttccttgatattcagttattcagttcacattgaattttgacattcttattttcaaagacatttatatatgagaaagtgatatatttatgcattcttcagcccatgtaattcttcaattttgcttaggcacatttagccaagccatcttcatgacccttaaaacatggtaactttatttagtgcctacacttcagagtgggcagctttcaactagaaagttgttcattctgctgagtcagcagtgtgctgaaaagccagaaagggttaatgcagctatttctggggttcatagtatctcctccatgccaggatattgcttattttattattaaaaataaaaatcttttgtttttcccacaaggttgaggaagcccttaaagatcgatctgtgtcatcccaatttcccttcttgccccttcctccagtgtcaatttacattattactcaacttgcatgactatttcttacctggtatagcagtatttggaagaggccttaaaagctgagggccctggcaaggaggaaatgagtgagccttattctcctaaacatcttttgcaacctcctgtggtgagtgcaggggttgctctgcgcttctcagttcttgggccactcttgggcaatgggaagctgactgtgcccatggtcactaatggtccttgacacggtgtttgtgttgaactctccaatgtatgcacgcgttgttggctgttattacttgcgacgcacaggtgcaggaaatacccagggggcttccccacagatctgtgctatgcacatcgtccattcgatgacaccctgtactctttcacaccccgccccccctcaagtcttccctgataatgccagggcagggacattctgttctgagctcattagtcaagaatgtcaccagactgtcctgaagagggttttctctggtgtgagctctccgtcgttgggaaagaaaatctgaaaatcatgctgtctttccatgagtccaactcagggttgcattccctcacctgtgtccagccaccagagagatccccttccaactacagggaattcacaaaaatgcccaaattagtggctccctgacagacagaagagtttaattggttcctggaatagtgatctttgaattcatttctccgaatggttcatgattttgtttcatttttctgggaaacgcagcccttctagtgcactcatttggaggagagtaacattcgtgcctgcctgcagcctgtttgcaggaatctctgggaaagctatagggtcaagcatttgattcacaaatatttatcaagcgtctaccctttgcgctgttcttcagataagtgattctcaaattttgctgcattttagaatcccttgggagcttaacaaaaatcctgatgtccaagttacagtccataccaagtaagcctctggggatgggacccaggcatctggattttttgaagctctctgggtgatttcaatgtatacccacacttggaacctatgctttttgacagtgctcctcaactttaatatgaacacaagttacctggggatcttgttaaaatggaaattttgattcatttggtctggggtggggcctgggattcagcatttctctaaagttcccagggaatcctgatgctgctgctctacagaccacattttgagtaacaagcaataaagttcctttattcccagatgtgtccaactttcccggctcagagcctccacacatgctattcttctttccctggaactacctccctgaaactcccagccaagatgcctctccatcctttggtcctccagttttacctcgccacccaatataatctccaccttctttctctaattctgtatcactgtgtgcttacttgctagaattatcacatctcataattatttattcattttcttgtttccttgttttctcaatgatctctcccactagtgcaagtgccaagaagccaggagccatgtctattttcttctctacaagttctactcagtacctaattcagtgactaatacagagcaggaatttgacagatgcctgttgaatgaatgacaataggggattttggacagttggattaatttttccatttaaggtaagacaagtaaggtaagacaagtaatcacctggagagcttcaaaaaatcctgatgcctgtgtcccatacccagaggcttattcggtatggactgtgacttggtaataaaaataataaaagtaacagaagagagaatctttgagcatgtcttacctggccattttcctgacatgaatgttgacagaagtatggtatagctcagtaagctcagacccttttctaaaaacagagcttcaagaagaacactagtaaaatctactgtattgcctagggaaggtgccctgttcttacgaaaggatgaatcatcagtttcccagtgttatcttttcaggtcattgcagctcactaaaatagcacccaaggtaaataatcaacagagaagtaccataaatgtctcagcaattgagttaaccttggagctgcttctctactaacctgataccatatctgaggccttagctcccaagggcaggatcttatcctttgccaaatctggacttagatgtcaagcacaccaagaatcttgtttaacacttcattttaaatttaactggtgaaaatacacatacacaaaaagtcatattgattttccatggtcggtgcagaggtcagatgtgatagtctaaggctttgtgcattactggcaagggaccacgatgaagccaactgaagtaatctagtgggattaagagaagagatacaacctttgtcaagtctcacaaaagcccagaatgggagacaaggtgctattcatgtgtgccttaattttgagaaaacgaaggcacagaaggacagacccattgcctaaagtcacccagtgagttcaggttgggaagctgggaagaagaatagcaccagagcatctctgtccccatcagaggcttcaagtcactcagccatacagttttcctcttcctaaattcagcaagcaatttatgtattatattgtttttaatttttctaaatggggtgtgatagaataacaggtctgtttcaagcatatacatcctgaagataatgaatgtttgcgtttgccttgtg

SEQ ID NO: 45888 - DNA, 656 bp, Homo sapiens
tttaaaggagctatttggatcatttacaagctgccacaacgtggtgtctgcataggacatgaagaattaagtgttgaaacgtccaagccttcctctctctctgagggggtcttcatgagtgtttttactccctcccgtgagaagacacaaagaggtctatgtgtaaagcataaccagccttccacacatctggactgcttccacaatctgtttgcacaggcagctggaggagatccgatgtaccttggctctacattcccccaacatggcacgtcgcagggacttccccaggagaagtgctgagctacccatgcctgtggctgcagcttccatccattcagctgatagagatttgtacaggactgaggcatccttctcctcaggctgctcaccaggctgtgaactgggcaggtggcagctgggtcaccctgggagttagggctcagtggctctccacccagcctccagtttcctttctgtctccagtttctgtgtccaaatttggcagctgaaatgcaagtctgaattatgtcatcttcctggtcatcagtgtcaccgtcctgtctgacagttcccttgcgggctccttttaccggtttattcagatcagagtcatttctcaggttgagctaaaataagcagcccaattaggaaat

SEQ ID NO: 45889 - DNA, 3044 bp, Homo sapiens
ttcgtgacattctctacatgactactgggaaagttagatttgctcttagttttctttttacacagtcacctgggggctcaagagatgtcttcatgctttattctaatgttctctttattttactgtgtttacttaacaaaattgaaatgctctcctgcacgaactatactaccaaaaacctttcaaaggaattcttatcactcccatgaactcacggacatgggttcccaaagactcagagctaggggagttttcctctgcgtctttgtcctatctctttccaaacctacgtaaccttgtttagtatgccttgttttcacttctcccatttccagacgattcagagcagaactccaaaacattttcctcagatttctatgttcttggatgactaaagaagttttaacagtgaaaaaataaaaataaaaaaaaagagggagggaggggtatgacttcactctctaagctgcaagtcttttataacccctcttggacttgaggcagagcagactggccaaagagagcattggctgttgccttagcaacttcctgactcactggctacttgccctgcgcagaagccctgaaggagctgaaaccatgtaacctccattagaaggccctctttggcccatgtttactgttgaacacccagtgaagatgtggttttgaggaatgagagacaaccagtgattgcctgcccatacatgaagaggcaggtatttcaaaaccaggatgccttgcctgatataagcacagatgagtcacatgagttggccttggggacaaaaacttgttgagatcatacgagccagttggcagcacagtccctgtgtcactgactaaggggttctctgtgtcatactgattaacgaagtttcgtcgtgttccctagaaatggtaaaacaatccacagaagttctcgtttgctcagtggatgggcacataagtttgttgttgttgttgttgtttttgagatggagtctcactctgtcacccaggctggagtgcagtggtgcgatcttggctcactgcaacttccacctcccgggttcaagtgattctcctgcctcagcttcccgattaaatgggactacaggcatgcgccaccatgcctggctaatttttgtatttttagtaaagactgggtttcaccatgttggccaggctggtctcgaactcctgacctcaggtgatccacccgccccagcctcccaaagtgctgggattactggcgtgagacaccgcgcccggccattagtttttataagttaagtcttgccttgatgttcagttcctgattgttcaagcacgagaggcattgattagtatagataaccagacaacaggcatttatttactaggtctcatgttgtttgacttctagtctcagttctgtgattattgtgaaaaatacaaaagaattataaaacacagtctcaggttttagggagactgaactcaaattaacatcagaatgatgaacaggtggtggagaaacagccccaaggcttatttgcatgtcaatctccatggcagagaagggcctttgaggaagaggtttgcacaaaaaggcttaagttagaagtggggaaaagctagacttggagaagccatgcttgtcccccagcctggcccatggactaggtgagaggattctcgaaagagaacctgaacaaaaataggaagaggagactttaagatatacaaaggctggtgcagagctgctttgaggcctcagtgacaaagaacaggacacagtagggacagggagggaatggggaaagggacattcccctcatgtacacttggggtacaaatagcacagcttgggtgccccacaggtctgcagctggggaagcacataagatcaaaactctggcagtggatccaggtactgacaggcacaagcaggcaatagtgggcatcacatgtaccagtgtggaagagcagggagggctgctgctgagcacatgggaggaccaccaagggaaccctacaaataactgggagagatctggggtggtgagcgaggtcctcgttgtccaagtaggtgcagtgagccagtaaatttcaccttattactcagtgttaccttatttgcccccacatgttggagctgatttgtctgacctgatttttggagtttctccaacatgtatgaagaaaacagtggtgaggcagttctttccaggacacagcttgtcagagaaggggcatgctgggtggagagagaggagaggctcagagtctgtgtcagtcctgaacaagtgaagtgaataatgtgaacgtcatttttcatttctatgacatttgccctcctcagaagattttggttactgaaatgacttaagatggttataaattcccagactgaaagagaataggaacagaaggaaacattctgatagaggttaggtaacattggtaaagtggactattgctctcacgtgaagtactgtatttacttaaaggggaacttggctaggtatggtggctcactgtcatcccagtgctttgggagaccaaggcgggtgatcacttgagtccaggagttcaagaccaacctgggcaacatagcaagaccccatctctacaaaagaattttaaaaattcaccagacatgatgacatatgcctgtagtcccagctgcttgagaagctgaggcaggaggctgacttgaactcagaagttcaaggttgcagtgagctatgatcgcaccattgcataccagcctgggtgagacctatgtctaaaaaaataaaaaataaagtggaactttccaagtgacctcagacactgtgctgattatggccaccctctcttgctggccaagtaagacaaaggttaacaggttgattgcagtgtgagcaaggcaggttataaaggggagattcagttaatacatgccactctcaatcattaacagctgcacataaaagtatgcatcttctaatcaagagatcagatggctcacgcctgtaatcctaacactttgggaggccgaggccagcctgagatcaggagttcgagaccagcctggc

SEQ ID NO: 45890 - DNA, 1769 bp, Homo sapiens
atatgtgaacaacactttccacctctgcaaaatgggattttgcttgtaaggtttgtaggaaatttctttctctggtctaagtaccaagtggcagctattattactgttacagtttttgttgttcttcttatcgtgccattgggctatatgacattttttggaaagggccaaactctcaggtcttagatctaggcctattccctaactctaacttcaggtcacttgatttttaaggaaggttgagaaaggaacagatttattttggtgaaagtgcttcataaattataaaatgcttcgaatgacagcagtcttttaatggaaaaaatttgttagatgtgcagaacttcagatataaaagcaatagatggtattgtacagcagttaggactacagttgatgatcaataatgaccgatttggataagaacatattcaagattctcatgtgttttatggatttggactgaaatcaagaagcttcttcctctgaggagagcatctcgtgggttcttgggctctttttcttaaagcagtggtttcactttccagtttggtcctcaagccatatgtcacctatgggcagcagctctcctttcagataagcagtctacaagctgatatttttggcagaaaaccaccttctgggtaataggtctggtatctggaggattcctgtttctgctgtcgttcgctgacctcacctctcttctgtgactaagtctgtattcaccgctgaagtgcatgcttcttggggagaaattgtgggtacttccggttccccctgtgactttgtgacttaagcagcagaagcatttcataccatgggtacatgctccttcccattacctccctactgacaggtgctgtcagagttagaaagttctggaagctcctcaaaacatagacttaaaataataattataattaataatagcaattaacttccatcacaggttgagtcacctataagagattgcatggttaagtttcttttaaagtcacctcttaacatttccttacttactcagcctcactcatcttaaaaggtaagtcgcatttaaaagaaaatattcttaacttgcgataagagcagagagaagttttcctgtcttatatttaatgcatgtagatgactggtattcacgaagttaattttttctttaagccacaaagaaaaaaagtggtgcatgttttctaaagaagaccggtatctgtaattgtgtcaatactgatatttttgcttttaaattccttcaatattcaaaacggtagcttatctctatgaaatgtttcctttttccctgtccaataacacatgggtgggaagttcaaacctttgtactttttctttgaagcaattgccctaagccgggaaaagctctttcatcagcaagaattttgagtattttctctttcctcctgatcaagtttaaggtgtgtgctcataaacaagatacgcaactgtcaataatcatcttttcagcaaatagagccaaagttaatttattaaacccggcaagctgctctcctagttttcttccccctgtgacatactgtccaattatttcacattcttgtagtgtaaaataaacacattgagtctgttgagatactgctgtggttatttatttttcaaaatttaataaggaggaggatgacctttcctctttggacaggaaacaaaatcagacctaacagtgatacattatcaattttcacaaccatgaaaatattccagaaaacaagcagttttctgtgcactcaggtgac

SEQ ID NO: 45891 - DNA, 1894 bp, Homo sapiens
aaaaaatgacaaattggcagagaagaagttgttgctaacaatgtggccatttcagccttggtcattcaatgggaccactctgccccaagaacattctaggctgactgtgaagcacagcaaagcctaactagttactatgcagttgaagccaatttctagtggcctcctaagactcctacagttcagatgctctccaagagtagacaaaacaatggaaagacatgccagagtgtgcaaagaatgaggaaacattttcatgtttccatgtgcattttcttgttcatgctttctgttcactggaaacacaagatgtaagcagagatattggcaaagaatgatggggcattccaatattgagacaatggtatgaatgaatattcataataaaggtcagatgcttggaggttgaagcaaaatcaggtgaagagttgccagtgactgtttacagtcttgagatcttcatgcctccagcatgagacctcatgagagatcctgagacctccaggctcccctcaatgagatcttccatggaaactagcactcagtcgccttaaaagggatctttctttgaatatgcaaagaagtggtttactcagttagttcagaacatatttgctaattacaaattatatacttcaagtacaatagctagctggtctattacaatatacttccccaaagttttcacaagtcacgttgtaatagcaaacataattagggaggtatgtgtgtttcattttaaagtttatcctcttcagcagctccgaaaaggacaggaaagttaggtcagaaatccaggaggccatttaagacacaaatctctcaaaacacaccgtctgagcacatgctgatatggaaatatgtacattgagagattctttaagttataatgcaaaggttctttttttattttattttattttatttatttatttttttgagatggagtctcactctgtcgcccagtctggagtgcagtggcacgatctcagctcactgcaacttccgcctcctgggttcaagtgattctcctgcctcagcctcccgagtagctgtgaccacaggcgcatgccaccacatcccactaattttttgtatttttagtagagatggggtttcactgtgttagccagcatggtctcgatctcctgaccttgtgattcgccctcctcggactcccaaagtgctgggattacaggcatgagccaccgcactcggccaatgcaaaggttcttttatggtcaaggttttcagctttttaatcatgacactggattattggcttccttgtttgctaagacattattgatgtcattccttgttgacatgactcagagaaaagaatttttaatatttgattatgtcaacaattgtgaaacattactgagagcatcaaagtagaagagggtgagatgagtacctttgttgaatgtcttattgctacaatcagtaaataactgtaaagatgcaagaataacatatctccacacccagattcagtcactgctaatattttgctatattttgttatgtattttatttttgcctgttctagaccacatttatccacaattttgcatcctgcttttattacacttaactttaataccataagcaggttactaggttattaaaactctatgtaaagatcacttttataaagagtgatctttattaaattgacacataaaggttgtttgcagtgggtttttttctttctttctttctttctttcttttttttttttctttttttttgagacagagttttgctcttgttgcctaggctggagtgtaatggtgcgacttcagctcactgtaacctccgcctcctgggttcaagtgattctcctgcctcagcctcccaagtagctgagattgcaggtgcctgccac

SEQ ID NO: 45892 - DNA, 1072 bp, Homo sapiens
gagccactgcccccaattcccagtcttcttttaagggtatggagggcaaagggttgaggacgagagtcttggcatggcatgaaagaaaggcaagccaggttccactgttcgcttctgattatccctcaaatgcctaaatcactgctatggagagtttggtctccccaaacccagagtctcaatcacatagactgctcccgtttggtgtgggacaaaccttctgagaacagaagccactgtgctacaatttggaagaggagagcatttagttagaaaatggaagcaccaaaaacagaggtttgatgtataaacatatttgcccaaatcaacataccacacagaattggctcttccgtggcctcctgaccttgcccttcccttcagtgaggtcagcacggagacacgcagccccgtggctggttccaacacactgcaacggtctccagggcaacactggctgaaggtcatttcggtgctgcccaatttccaggaagcggctgttctctgtggtctggcatcggggtggaaagtttaacctgagcacaaggggaaggtggttggtttctgcagactctgcattcttttctctggtgggtcagatttgtgagcaaggattggctcccacctagatagtaaatatttttgaaaggtctgtggagtgtagacatgacctttgcccaatggacttaccacccatctggataagtagcaaccaaaggaagatgccgagcatctctgctcctttccttagaaggggaagtgacttgagaaatggaatgaattaacaaggaatgaaaaacacaaaagggtttagggcagtttctttcccctgtccctattggcccctattcttatcatttctttgtgatgttgctgattctagtttactttttgaaacggaattatgccacgggaggggtgtaggtctgctgatactaaaataaatgcagggtttagcaataactctcttcacagcaatgactcctctttattttaaatattgtctcggccagttctttcttgcgtgtccttttacttaatatcattgatgatacttattctcatgggcact

SEQ ID NO: 45893 - DNA, 1231 bp, Homo sapiens
atatgccaatggcttttagtttaatcacttttgtctaaacctatcatgtcttaaatatatgttgatgccacggtagttctagaatatctaaaatttctagcccaatgagaaacaatgccattttatatttttatacatttttataaatgttaaaaatgtggataaacagctatcagaatggagttgctagtcaaagtctacaatctttcaatgctccctagcccatctctctagtatgcattcttattggcccatttccaaagagctgcaagtttgtgttgaaagccgtgggcacatccctgtgactacaatgctatggtacagtggacaaagtccacagaattctcccgaaggtagaaaagacattaaatggctttctttccttgagttcttagctggagacagaacaaagcaacctgttcactgccctctacagaaatttgaatctaatcaagggctaaaaattaatcatgtttttacaggaagaacgacatcaggaagcttttctagctggggggaaaaatgaggatggaaataaagcaatgcacttcacaaatttgagagttctgaaaatgactcatcaagcaatcatgtcaggaatgcctggctgttagcagatggctggttggggtgtcagaccagcttcttgagatccaggttgagggatagtgtctctccttcagaacagaccttggtgtaaacttgctgggatccactccaatctagggatggagactgtggtcttctaaggggagttggagggtgctgtgctctcagctgttggttgaatttggaaggaggagatttgtctcaacactcttgtctgtatcctgaaacaatagaagcagccctgcctagtgtcttggtggggctccaagttgatgcagcacatttttggaagtgcatatatttctgggagtgtgggtagtgattcaattcatacaaatatatgcccttagatgtgacaaataccaccttgtctattaccttttaatctcagttaatcatgcgtcatgattaattatgatgcttcttatttactgtataatacaatgtaacttttatatcatttaatttttcatgtaattctcttatctacctcagccaactgttaagctcattaagagcagggatcgtgctttttactcttttgtgatccccccacagcatcttattatcatcttttcaaccaaaacattgttattaagagtctctgatgtccatggactat

SEQ ID NO: 45894 - DNA, 1412 bp, Homo sapiens
ctacaggtgcccgccaccatgcccagctaattttttgtattttttaagtagagacagggtttcaccatgttagccaggatggtctcgatctcttgactttgtgatccgcccgcctcagcctcccaaagtgctgggattacaggcatgaccaccgcgcccggcctatcactattccttagagtgcagttgtattttagtttcttctgtgtacgtgtgatatactccacaatgaaaataaacaaatctatacttaccatggccttctcatgtccagaaacccctcgaaatacccttatcctttaccgctggaccatttgggtgggaaatgattacaaagccctatcttaagcttcatcaatgtgatggattagttttaaggtttgaatgaacaagatgatagaaaatgagagagcgcactggctccccaggtgggcacagaggctcagaggataggaatttagtgagtgccactgtcaacatacttcacatagttggcagttttgcctaacatggtctctgcctgcagaattgccacaagttggaaatcccacatcagtcaccacttcctcggggacattagttgttcatgtaaattccgaacaatggaagctggcttttcatccatacggaaatggaacacaaagacagagccctagaagtggagtgtgagtgctgaggattttccctaagcctcttcccttccacatgtgttgatgtgtgatgtgttggttaagtatttggaaagcacatcaggttttagtaattttttttctctaaaaagaacaatttgctcttagaagaatgacagttttctttccttattacatgaaatcaccctctgaccccctaaaaagcagagatcttttgtagggatacacacaagtgtgaaaaactgaaaagcagaactggtaataatggacagaaaattaaagagagctgtcacctctgtcaaggggaaggaggacatgatcatggagatttactaggtgaggaaggtggttctgaaatactggcaatattctagttcttaagtgttattctttaaatggcacataaacgtttcatagtctcctttgcatatattgtatatttcacaatacatttttatttgttttattttacctgaagttctacctagttgccaaaaaaaagcagaagtaaaaaaagctttgccaaagaaccaggatcagaaccaagcagaccagtaggagagaggtttttcttttttttaaaatttttaacttctaatttttgtgggtatgtagtagctgtatatatttctaggttccaagaggtgtttcgatacaggcatgcaatgtgacataagcacatcacagagaatggggtatccgtctcctcaagcatttatccagagagagatttttcatgtacaccagtactcttcttttcag

SEQ ID NO: 45895 - DNA, 327 bp, Homo sapiens
atttaagaaagcacagctattggaaagccaggaaacagacccagagaggcggatgcatgtgggagcaaagagctttgggcagcctttaaggtaggcattggcgtctgaaatcatgttattgccttttgtttatttgttagatggattttgtattggttttatgctttgttcggtttagagaattttcctttgatggagctgccaatatcaatagatttggttttgaaatcctcgggccgggttcataggataggctggagcccacggtgttagtgtagatgcctcaaagtcagaagagatggatacaaaactggtgatgattttcaa

SEQ ID NO: 45896 - DNA, 536 bp, Homo sapiens
ggccaggctgcaaagtttccacttttaccctgtttcccctttaaatgtaagttccagttttaggtcatctttttgctcatgcatgtcagcatatatcattagaagcagccaggctacattttgaatttggctgcttagaaatttcttctgccagatactctaaatcatcactctcaagttcaaagttccacagatccctagggcagaggcacagtgcagccaagttctttactaaagcataacagaagtgacctttgccccagttcccaataagttcctcatttccatttgagatttcatcatcctggccttcactgtccatatcactttgagcattttggtcacaagccattcaaccagtctctaggaagttccaaatgttccgtcatcttcctctcttcttctgagccctacacactcttccaatctctgtccattacccagttccaaagtcacttccacatatccaggtatctttatagcaataccctactcctcagtttcaaatttctgtattagccttttctcgaactgct

SEQ ID NO: 45897 - DNA, 602 bp, Homo sapiens
acttcgcataagactccaaaacactggcctgatctccaaatgtaggcgccacccacatttacaaggctttctcaaaacattctgcccccaaaacttagcttgacttaaagcctgggtattaccaaaccattccataaaagtggctgcgcatctcttataaaagcagcaagtatttttagggaaaataaactggcaggtgagaaagagctgttaagatctttcaacgtggagttggtaagctgcattccagacctctgacaccggctcactcagttgcataatcatcgctttcctcctgcagcgtgagaatgctattttagaaagaattcaaagactactgcatccaaatttagaccccctaatattgtgaatttccaaatacacagctggcccttgtcaatggggatgaaaaatgtcttaatgggattgcaaagagaaaaaacaaactttgactgggagcagtggctcatgcctgtaatcccagcactttgggaggctgaagcaggtggatcacctaaggtcaggagttcaagaccagcctggccaacatggtgaaaccctgtctctactgaaaatacaaaaaactagcacggggcatggtg

SEQ ID NO: 45898 - DNA, 936 bp, Homo sapiens
gcagcaatttgtgttactttccaagatgacaatttgacattaattaagggaaaaaataaaaaggtgagctagatgacttaaaatgcatctcttttttgaaaaagctgtagctggcaagtcaaagtttattttatgtgtgtaaattcccagttgagcatttttttcatttggattagcgtgagaggaaaaatgtgaaatgtctcaaatcaaatgcttccttctaaagattagacattgcccaaccctgcccccgcccccaatcaatcagtgacagaagagaccgccatcagccaactagctttttttaaatggctgatatattcatctctaaaggccctcaaagcactgtaaaacttttaaaactttagcctttatgtcagattagagaaaccaaacaatgtgacggtacatgtgatgaaaagctctgggtttatttttctcccgcttatgaacatgtatttttatttgccgaatgaaaatcgtggtgtgttgctttgatgaatggaatttcaggctctccctgtgcacagccggtgggcaaaggtcaccttaaatgactttttctccctatctgtctgttaatccccagaccggttgcattttccagttgcttcctgggtgtctgtacatagtttgtctttgtataggagtgagtgtggtgaccgtcaatcccctaatctcccaggttctaatttaacagatgatggctgtatgaggaaaacgatgtaaatagagaatacaaattaaactggatctctgtggcctaggttttgtacatacagaaactgcatggtatttaaattattgtttgtctctgatgatgtatgcagtttctttaaaaacaaaccaaaaaaaagtaaaaaaaaaaaaaaaaaaattcttgactcttgtgtgttttgttatcaaccagcagcagaaaccaccaaaaatgctttg

SEQ ID NO: 45899 - DNA, 1972 bp, Homo sapiens
tatctttcttttaaacacaattctattaagtgtagctatcgaaattcaaaacccacaacaaataaatcgcattaaattataactagaagagggtaaagaatgtagccaattgacagtgatcccaaagtcagagttgaagacggaaaaacgatttaaaatctaccgcaagaactcaaaaagttcagtggtctcaagttccttcacagtaaccttcataatactggcggtaattcatccaaaaaaagaccaagttagatttggcgtttcaagaacagaaaagatctgatgcatttcccaaaaagcactgcactgcctcacccaaatgcttccagcgtctgtgcacaaaagagtaaatctttaggtttaaaaaccctgcgacgtccccagtgagcaggggagggcttccttccttattgaaaagatatcctctgaaccgattcagtcacaggaaagattaggattcgtttagaaaatgaaatgctaaagggctctgagctttcgggagcagatgtcttaaaaataaaaaagtcagcagcataaaacgcgtaatgagtgtggggatttatttttttaaagcatccaaacagctgcatgacgatttggtcggtccctgttgtctaaggacacccattcttagattgcactacaatgacaaaggcgtcctctaggaggaaatgctgcaaataatatctcctgcccatgcgcgtccacctgatgggaaaagtaaaaacaccctggtccaagaccccaggtcccattctctctatgatggatgcttcacctctagtagtgcaaacacacccgggttgagactaagtggtccgggagaagcagaggaagccgtgccctgtgcgctgaccgaccgccgggcaggcgggcaccgttggggcccagggccaggagggacgagtcctgcgggaaggagggaggcggcggggtacctgggacacccgcgcgcgcccagacggcccgggagacaaaactcagcgccgctgccgctgccgctgccgccgccgccggacgtgacatcaactccaggtcgccgggcgggcgccgggcgggcgcatgcgcagagggcgcgggcaggaagctccaccctcactccaggaagctctggcttcgtttgtgaaacccgacgggatgaagggctaggctcgcctccagagtagtgtagtttctcccgccgtgggcacccggccccttgctaccccgcaaaatctcgcgaccatttactctggccatccgaaggcgcgtgcctgggttgcactcccgtgtccggccctcgaggttcttgcctagggaagacccgagccctagggccgtacttaagctgcctgcgtgcaggacccgggttttgcttttgctaatttcctccccaccccaggtatgtgggaatagatgaagaccatccgaatgagaagaaaaaaggcaggcagaggagtgcaagtctgatttagagcaggcaggctccctgggttggttattgtaggtaactgactggttttctgggcaggttgctgcaggttgtggattggaggtctatttttatattagatttggccattgtcttagtatattcagcctctcaggtaaaacactataacataggagaaaaatgaacgtgttttttttttaaaaaaagatgtgctaaatgcaagctcctaatttgttattagtaggtctaacagaacagagttactctttaaagtagctactaacacttacaaatgctttctatttctgtgcttgcctccctggtcctcgggctggctgagcagcagtgcccaagtaggtttttaaaccgccagggtttgagagaaatccccaatgatgggtatcgtccctttgaaagttcaaatctctaccaaataagccacacggatgccaagctttgaaggaaacttaggactatcaacagtgcagaagtccagttatagtgcagacaaatgtgtgtataatggctagacagaac

SEQ ID NO: 45900 - DNA, 801 bp, Homo sapiens
ccatggttcccaacctaaggcatccagaggtcccatggtgaactcagggtaactgcagtgtgttttgaaatttagagggaaacattctgttacttgacatctattggatactgcaggaactgctaactggagaaagttcccagtttcaacactgagttacacaagattcctttcagtgacagcctatctctgtgaagctgagtttttggcagttgctgtgattagaacaaacatacactaggaaaaaatcaaggtgtgggatggaactgtgggtggcagagttctatctgattccaagtttgagaagtgcagtgccccataggcatacacatctcattgttaaaataattaatgggaaggccattaggctgagatggctctcacgccttgggtttctatgtaagcaaatcaaaacccaaccctatgtaaacagtaaaatgaaactgaagcttaaccaattagaaatgccaactaacatctaatagggactttccactttgacttgcttcttcacacccctgggtggagcactgaaccacttttggtctggtactgctggactcatgaattgctgaatgttcaagtaagcgctttaaaatgttaatgggcctacatttattttttaacaccattaacactgtgattaagaacaaaataaacatattggtactgcgcagtggctcacgtctgtaaatcctaacactttgggaggccgaggcaggtggatcacccgaggtcaggagttcaagagcagcctggccaacatggcaaaactccgtctctactaaaaatacaaaaatt

SEQ ID NO: 45901 - DNA, 2966 bp, Homo sapiens
gcatcctctatctctaaagaacaggcctcccgcctctgctattcagggaatattatgttctcccaactgttatattttgggtccttttggcaggaggtggagatgggcaggggtggaaagaacccacaaatgttctcggaacaaggaaccagtaaagtacagacatctggccccaggattttgctggctccagggacgtcactataaacccactaacactaattgctttcacgtctgctcccatttctagtggaaataaaatgcctctctggctaatggaaaatgaaacgccgtttgctgtttgtttaccacattacataagagctttctgtagcacccctcctcccctggcccctgccctgaaaccctctgaaggacagcttgtgcaaagcctgcaagcgctctacaaatacaaggtaacacggcttcagaaagggcgcctgtattcacgttaggactgtacaactccttaatcctaaacagacgggaggggagggcagaaagaagagagcgagagcacaatcgagagtgagaagagaagaattctatttgctttaaattcatgcttccaggaatattttccatctccttacttgatgctaagtgcaaagatctagagtagctcatcaaacctcaacttctaaattcaatttccctgacaaagaaggggaaataaaggtccagctgaaactggggtttaagaaagtggactctcatccattgggcctttaaagtgtctgacagtaggtgattgggaggccttctttgacagtcctgttctggttggctgcctgtgtttatccccatgttggcattttgtacacagtgtgatagcaaatataaagacctctggctgtccttcctctgcccttgtcagttctctccttctccagcagcagaaccactcatttcagctggacccatggttgccaagaataaaaaactccatttcccagtctcccttgccattaagtgtggccatgtgactaagttctggccaatgggatgtgaatggaagagctgtgtaaactttccatggtgcaccctccatttcccttttcctgtgtgacaagcataaggctatattgggccatgaaggcaaagacaatactctagggatggtggcgccaagacagaggatcctggatcccaaacactatagagctgccagactgcttacagagcgactgctatgggaggaagaactttttattttggatctgggttactgcagctgaaattgtatgcttgggatctatttgctgaagagaagaaaggaggatacccttaaaatagatgaccccaccatttggctttcacattgaaaagtcagcctcagctcttcctacttttcttattgatgaagaatcttacacccctaccagctcccgggcctcaaagactacatcttcctccttgcctttctttgtccccattttcttctgtatgctgcctactcccaggctggcacagagcagcactccttgaccagaatggcccagacagttggaataaaggatgacattaaaatagagccctttgttatgtctctagggagtgtcttcaaaacaccctgttacaatggccgagaaaattgcctgagatggccaagttcaaagggcttatctttgaatcaaaagcgggaatggggttttgtgcaaatgtcatcttctgcccagttctgagtttctatgtagcaaacttggagtaaagttaagatcaaatggggctcagaggatcagctattacaataggcctcagtcagatggcttttcttgagccactggatttcatcagaagagaattgcaaacacaaaccctttgtttaatgtagacggtgatgaaataaatagggtgactccatctcaaccaccctcctccctgtactcacccaaccaactgactctcggagattgcccaaccaaagagcagaagttcacagaatatctcttcttgggtcagcacccaaaggtgggagcacttggctttgctcccagaaaactataatctggtgaaggcatgtgagaaatgtgcccttccctactgcatactgcagaagaacgtggctgagagcccggccacggtagcatctatcctccacatagagtctttatgaagtgacaccttctctctccagctcaggcaatagcctctgcctgatcagaacacaattgaatgtggccttgggccagactatggcaggcaaaggttaatttcctttccttcttagagcaggacctagttccaattgcctcgctttgcctaactcaattttccgcacaatatagcaagctccttatcttgggcagtgaggtagaagcttccccttgttcctccttatggtttccagtggaactttgaggaggggcacattttgcttaaaaaacagcattaattgtgaagcgagaatagcttttctactgatggctgcttttctagcaaaaatgtctgcctgcaaggacctccccatgtgacctggcagggagaaaagataatgaggagctcaggtgaacaactcaggacctgaggaaagtaggccagtgagtcaaaataaaatccagccaggagcaaacagaagagttaatgaacaggagatcacctgatgcccgggcccctctacctttagcgatttcatgtccgaaggtactctgtgctcacccgggtaacacagctttgttaagagaatagtcaggctgatagatttgttcacttctatagtcgcttatcttggaattactccattgtttttagaaaaatgacagttcattttctaaaaattaacacaggccagtgtggtggctcacgcctgtaatcccagcactttgggaggtggaggtgggtggatcactttgaggtcaggagtttgataccagcctggctaacatggtgaaaccccctctctactaaaaatacaaaattagccaggtatggtggcatgtgcctgtaatcccaagtacttgcaaggc

SEQ ID NO: 45902 - DNA, 2866 bp, Homo sapiens
tgacgcagacacaacagagggaagaccctgtgaggacacagagaagacaccacctacaaggcaacgagaaaggccttaggagaaaccaaccctgctggcaccttgatcttgaacttccagcctccaaaactatgagaagataaatttccttgtttaggccacccagcgtaaacagccttagcaaacgaatacaaaggttgactggtatttttagcagaactgatattcaaccagtgtggaagcagagccaacatcacttctggttggcagtatcagttatgaaatatttcaaatgtctttaacatccactcccttccccccgttgttactgttactccaggggtgtcgaccctgggatgggagaaccagcgtgggctgcagaaatcagtggcaacaggcctgccttctgctccctcctcttgccttcccttctgggctaacacaactcagcatgccctgtgctctgagcacttcccccgccctcctttgaagcacaaaggttgtaatgaccaagtgtagtgacggggtggagagggctcctctgagcaaagctattatcaaatgctcatctgagaaggccttggggatcctgtctgcctcagagtgtgtgtgttgctatgacgataagcatgatcctgtttgcccagcatcttcagtctttcaagtggtctcagtggcaggtactgtatacatgagaggcccaaagaaatctgaactgggaatgaagttttgcccaggcacatggcccaccctcttggctctgccactgagtcagcctttgccaacatgttccgctggagtgcctgcaccctagactgaggggccactcgtacctgaggttttgccctcttttttcagttaccagccacacaatttgtcactgcatctgcccacagggccttgacccttccacactctcctgggagacaggaagaaggaacggaggtgacctgccagtcttaaaaatctacctggggactggcactatggggagcaggccacccacttgtgaagggttgttcagcctgtcattggcctccagttttctctcctgccaccaaggcacatcagcacagctggagtcagcatgcacaatgacaagtaatgagcacacatgcctcatcaaaaggataatcaaaagaagaggtccgatccaagaaaaaccaacgtgatcctctctaatgaatggtccccacagtggcattcagctctagaagggcagggaacttccagctggctgtagtttagctctgtactctccttacccaaggtaagccaagagtgaggcaggctgaaaagaatgtatgagcattccctggccaagatgggaaaaaaagcaccactctgaagcaagaattgaccctgccctccaaggctgccccagctaccaccccctggaccatgggacagcctgtgctgccttgtccaaacaagcatgtgtgcaaagcagcccacagcaaagccaaacaaacagcttggcagataagaccccaaggctctaccaagcaaacgaggttcaatctcaaagcttagtttggttccgtcccttgcacaggttaatgggaccaagagtcaccttaggaattatgcagcacagagatgcctgatataaagaggccaatatagaatgcataatagggccaagcccctaagactctcccagaaatcagtttctagattctacagatgatgctttccatctgctttacagttgccaaagcaaatcacgtttattctaaaaacagataagggcttgctcacaccaatcaaaagcaggtttttatctactattagtaggctgcctcttcagcagagactatcgtgttccccagccaggctaactggcattaaaccacttataagtacccactaacaagctaggtaccctggggaaactggacacaaacaaagcatgggccctgttccttagcatcttgcaatgtggatggcgagaaaagatgcacatatttggagatgacttgagatggcagtgcagtcacactggcaggagagccaggcttgtgacgcaggtctgtgagtgccggaagcactgggcagagtcggccagcgccctgcaaatccaaccaacagaacaaaactagccagcagaggcttaagaggctgagaagctgagctgtttgtcttaggttggtagcccagggtgaatacagctatctctggccaggcatgtagcacagcacagagttgatgagatctagtccaagagctactctgcttgggttcaattcctggcatggccacctaggtccctcatgtgatctctctgtgcctccatagccccatctgtaaaatggagaccaataaacagcatgcatatcataggcatgttgggaaaaatgtcagcacagtggctggcatgtaggaaatgcttgataaatgttggctattatcctgaatctaaacttctaaaggggttcccttttgtttatggcaggaatcagaatatccactctgagtccaaagacagattatgtagctcaaagtaattttcatgttaaattagattttcttgggtggtagtgggggagggcttagaatcctatgaacatggcataagtcaaaagagactgtgactcaaagtaaaggccattgtaatcccaacaaatgcaagggctagaaacagaatgaggcctgcttttcctgccagggaacagcaactgtagtatccgagcagggaagggaattaggcaccaatgagaaagcacatcagccatgatatcccagaacagctagcagcagggcacaagcccaactccctgctggcaggaccccctcttcatccttcactgctatatccagattcctccccagcactcgtgccctgtctggggaggacacttaaaat

SEQ ID NO: 45903 - DNA, 843 bp, Homo sapiens
aactacaacagtgctgctagtacagtcggtgtaaccaagcacaaagggcttcttactgcatcacacagcctgtcaggcacagacgcagaacaacatcaggctcaaaacagtcacagagccttgagcccaggaatggcttctcgtaagtgcagcaggagaataattcccggaatatggattctttcaaccatagcatgagtaacaatatcagttgccatgtttttgtcgaaacaacaatgcatgtctgggttcagaacctgctgggaaaagattaagctgaaagggtctaacccacccctcaccatggagagcacgtacactcctgcaggcattctggaaaaccttggccattttcatcaatgcatgggtgaatttcaaaacaatatgcaacagtccaagtgagaaaacaaaaacaaagtgagaggagaaaaacactttctaaagctgaatgccttgggtctgtcatcctcctgcacctggaaagaatgtgttaacttgcaggtaagaagagagaaaggtatcatgcttatctgacctggcctcagccccagacctggacaaaggttgtcatttttggaagctagccattcacctacttagtaaaaatcttacaccgaagccactgcaggggacaggcaggattataaatcataacaagatggagaagggacaaaagaaaaatgaaggctggaactggaagaaacagccacttcttggaaggggaattgtcccattctcattaattaccctccggagctgcaaaaatccaatctgggcacatggtctgattgacacatcactgatcaaactaggtccgtttgcagaatatgcagccatcaggga

SEQ ID NO: 45904 - DNA, 1603 bp, Homo sapiens
gtgagccaccacacttggcctcctttagcttttaaaaatttctcatgaatattgtcatgactacaggtgcaagcttattccactttcttttgcccattaaattcaggttaatttttgaactactcatcacggtcacctctaatcctttctagactaaagcaagaatctaaataaatatatagacagattagactgctctcttactgcaggtgattaaacctgaacagatgataggtcctgacatacagcctcctagggctgcaccatatagagtgggcggcctgcacgctgctcgtcttggccccgcacagatctgtcttgggagccaggaggtctgagcctcctgggaatgaaaaccttcctattcagacaatcacagggacattactgagtagaacagaaagttcacgtgagcttttcatataagaacaagagacctcctacagactgtggtgccctgcaggaggctttgagctaagccacttcacaactcgggggcacctgagcaaagaagtcagggacagtttcagagcattcaggtgatttcagtggcccacctgggaaaatcaaagatggggcttttctctcataaacaggaagcaaatgggcaatgctgcccacagcccacagctagcagagcaggtccacatctgcccaacacggaaagtgaaaacagactgcaaaaggagcttaaccttcccagaaaacaatcccacctgtggatcctgagtcagaccttgccagaagcaaatgggcacctgccaggaatttgagaggtgacctggactttctgaaattttccagagtctaaaatggagggatggtgtctagaaagttctacaatatcccaaactgtgccctctagataacaggcactcaataaacatttggggatgatgagaaatcagcctgccataagcagagagccaatcaagaaacttggctcacacagcaccaggagcacccaatattccggggcaggacccagagtctccctcttacccccaacccagggtcctcctgaagtggtcctcagatacactttgagagacactgatcccgacatgtcacacacccagggatgatggagctgcgactagaacgtggtcggataatgccccactcagtgctgcttctcttgtgccagagcatgactgattattgatagagaccgggtatttccctctaagtgccaacaaccatctataacaaagctctgcagttggatgtgattcagagtaagcaagtcatccttaacgcagttctaaactagactctatgacacatgttctttgaaagtggctgccggcctgttcttacaagaaaaatgaacttgggggcttccactggcttggctcagtgtgctcttcatcattcgcttgacccgttccagcggcagcctgcagctgaaatcaagaagcattttctatccagccaacagcacaggtcccagggcgatgcctggacctctgcctggaggcagtggctcaaaaggattatttcattccttctcatcaacccagaagtctcacctcatccaaaagctcatgtttgaactaatgacaattaaaatgcaaaagtactgtttcctagtccctttgcc

SEQ ID NO: 45905 - DNA, 684 bp, Homo sapiens
tctctccctcacatgaactccttgcctctgacttcagagagaaaggaggctctttctccatcatcccacctcaccccaggctcagctctttccagaaaacacacgagccaggctcagcctctaccaagagagctggattgtggaggaccagggttcccacctctcagagtgatgggcaccaagaacgccacttgcaccctgtgtaccaagcatggtgcaatgagtcaccaatgccctggggcagagcaggccacctccagctggtcaggcctcaagttgagaggcagcagagtagcgcaacagcacaaatgctgggagtcaagctctgacaccaccagctcctagttgtgtaacgctgggcaaggtccttaacctctcggtttctccatgtgcaagtgaagagtcacttcctcagactgtagtggtaagaattaagtgagatgcttggcacatggcaaataccatggggtttgcatttatgtcgcgggtgaggaaggatctgatatagtgtgtcttcaaaagtattgcactattttttaaaatgcccctcattatctctatacagagagaataagaagcaaacaaggacctcgcaaccttggaccgcttcattctaatcagggaatggatatttttgttcccaatttgtgaatgtcataaattagggttcttcctaggatttct

SEQ ID NO: 45906 - DNA, 1105 bp, Homo sapiens
tgaacctgggaggcagaggttgcggtgagctgagatcgtgccacttcactctagcctgggcaacaagagcaaaactccgtcttgggaaaaaataaaataaaataaaaataaaaatgccatttttttcccctttgccttagtgccttttgtagactggcactgggaagcttacccaggtgatcgacccttaatccaataatgatttttgagggattactcaactgcctcaagcaagctcttcctggcattgtgaatataaccagtcactctgcacttagtcatgtatctcattgcattgctccatgtttgcctatgcgctcttctttcaaggacaaagaccatgtcttactttatagggcatttctcaccacagctaacatagtgctacagggattcaaaaggtatttactaactaaaaataaatggaaaaaaagaaacactctccagacactgggcagaataggtggttagaaaaccctactggaagacaatcttcaacttggaaatgcccctggcagagggttcagtggattctcacagccctgggcaatgccagagccccaggcatgagcacccctcacctggtagtctttctcttctactccatgaaccatttcagtaaatacttggcaaaactaatttctcttgggttggagaattcgttccgctgtactagttccaaaatcaaaaataagaggaagtatatgaaaccaaaaacaaaaactctacgccttcccccaagtgaagtctgctacctcaacaaaataagaaaatcacaaaaccaatgcttacaaatcaataaatgacaaacaacccaatttaaaaatgagtatgagatttgaatagtcattttatcaaagaaaaatgtgactgtctaataaacacatgaaaagctgttcaacatcattaattattattaacaaaatgcaaaccaaagtcctaacaagatacttctacataccaactataatggctatgatcaaaaagactcacaaggctgggcatggtggctcatgcttgtaatcccagcactttgggaggctgaggtgggcggatcacttgagatcaggagtttgagaccagcctgaccaacatggtgaaaacc

SEQ ID NO: 45907 - DNA, 1026 bp, Homo sapiens
gtaggatatcaacaattctcaaggaaagtctaaaccccaaggcatcccagacttgcccaaaccctagaagtcaaagacctgtagacgggtatagaattggtcggggtgaagtgtcactgtggctctcagtggtgagtgtgacagcctctttaccaacaatctccttagctcaagtctgaacccaaaagaacgctggctttccaggtctcctgctttgaggacaagtgctcagaggcctgctgctctcctagggagcccacacccaccagcggaactaaccagagcagtttctccaccgacgcgtcttccaggtatttccttgctcagcttgcctagccaggtggccttgatccaggcaaaatctgtattagtcagggttcaccagagaaacagaaccaatagggggtgtgtgtgtgtgtgtgtgtgtgtgtgtgtgtgtgtgtagatgagagattcgttttaaggaattggctcgcacaattgtggggttggcaagtctaaaatgtgcagggcaggcaggcaggcagacaggcaggctggagacccatagaagagttgatgttgcagtttccagtacaaaggcagtctggaggcagaaatccttctccctcaatcttttcctgactcctggctccttcaagctcctaagacaatacttgagcagaaagggactatgtctcgtggcactcctgtgacctgctgcacacactacccaggaggctcttggtaaaggtctacaaacctaccaagaccacagaactccatgcagttggtcatgtttatctactttcccatcacactcttcaaaatatatatgtcttaaatttaataataatttaataataataactaggttggtattaatagatgaccacatctattatttctttcactgttttgctatggttattatcaaaacagtgaaatgccaaatgtgtatttcacaaagtggataaagaacctacacaatcaggccaggcatggtggctcatgcctgtaaccccaacactttggaagactgaggcg

SEQ ID NO: 45908 - DNA, 3016 bp, Homo sapiens
ttgatgcagagagctgagggcagctgccaggtaggtctttatattttccctctcattttacttatcacaccaaccctatatgatagtgttagctgtgtgttattggtaagaaaactgaggctcaggaaggatgattatgactcccaaagtcacacagtagtaacctgtcaacctttcctttcattgatgagtgttatgaagcacaacatcttatataatgatgctctttcctgggctatgattgccctgagtcaaatatataactaagtgcctgtatatttcattcttggtgaaacccttaaaacatgctattgacttccactttttgttgttgctcttcttccccagtttaaggtatcaaaatgtccaacttcttcatttagcttcttctccctccagtggaaacttctgcagaattgcacattatcaaagccagatatcctcaacaaaataatcgttcaactgcacctaatttcaattagatgaaatgagattggtgatgcttgacttttcctaacaataatgcccaagggcttcctcggctctacgacaaattgatagaccaaaaatcatttcactcagtgctcaggggcaggaacccaaagagaaaaacgcaatcacctttttcacatagatccagaagagacctcaagcaagaactggaaatgcagggtttgctaggatgtcagaatggctgctgtcaagtccaagtgcatcatgagcattatctgcagccttatttccgctggcgtggcaatgctggccagcaaaatcctctctcaaccccatttcctccttgctccctcacctctgttcctggcagccctcttcaacatgaagcaactgctgacaccatgaagaaggacagaaaagggccaattgctccaggtcctcagctgatgacgccaaacaagttgggacaagatcaatgtgcagcaagatcaaagctcatggaaaccctgtggccttactcaccatcccaaaagagccttgcactcccatggagaaacttcaccaagagagtctgcactgctgtctcaaaaacagagatcatgaaaacagatgtcatcacattccacacaaggcaacaggtattttagcacggttcccctgccaggttaattactcacaggagggtatgtcttctgttcccaaaggcagagagctatctcatctttagtgtctgactgttccagcatccacactgcctgagggctggatagaaattctgaatctcaggtcccacccaggaatctggtttttattttattttgaggcagggtctcactctgtcgcccagactggagtgtagtggtatgatctgggccttgacctccaggcctcaggtgatcctcccacctcagtctcccaagtagctaggactacaggcatgcaccatcatgcctggctagagacaagatctcactatgttgcccaggctgatctcgaagtcctgggctcaagcaatcctcctgcctccgtctcccgaagtgctgggattataggtgtaagccactgtgcctgacctggaatctgttttttgataagatccccaggtgatacaaccacacatgaaagtctgagaggcattcagctactgcatgcaggaggataagaatactatgtgttaattgacacattctctttagaaccttttgccttcccccaggcatacatgtattcagtgaaaatgcattcatttgtcattcaataaatattcatagtgtgtctactaggtgactaagtgtctggcactgtctaagggagataagggtaccctggtgaaccaagcagacaagggtcctaccttgaaataactcacattctagctggggaaacaaacagcaagcaagaaagcaagcaagcaaatgaaagagatcatcacacaccaggaagagtgttaccaggaagagaaagaggatgacagaagcaggactgaggttggaggagaactttctaattgggaggggaggatccagaaaggcctctcgcccaaagtaacacgtaagctgagacttgaaagtgagaatgagctagccattccaaaaagtgaggcaagaaccttctgggcaaagggatgagctggtgcaaaggccaagagtcaggaaagagattggcatgtgaggaacagaaaagaggccaggtggccggaatatagagtccaggagtgtgtgaagccatccaagaagtgggagagatggacaaggcagggccatttcaggccaagaaagtcatgccaaggagcttggatgttattctaggtgctgtgggagccactgaaagtggagagtgataccttacacacacacacacacacacacacacacacacacacacacgtgtgcacatgtgctcactttccccattgtacagagtagactgcataagaaacaagactggacccaggcaggctggcttggggacacaaaggtgagtgaggcttctttgccttgtctgcgtcctgaccgtcaagacgcttgctgggagaggcaacaaggaaattaacaaaaaatacagtgtcattttaggtgccagttaattaggcaatatctttgttaaatgtaatcagcatgtactctctgaccagcaatttacatatctatcccacaaacaagctggcatgtgtgcaaaatgacatatgctcaagattattcattacatggttgtataagccaaaattggaaacaacctaaatgttgagtaacagggaactgcttaaataaattttgatgtatccatacaatgaaatactaggtagccaaaaataggagcaataatactttcacattcagagtttcatatatttgtgtatatgtaaaatatatgtatatattatatgttatatattgtaatatatataaaaatgtgcatacatgtatatctataaatatgttaatatatgtatatatacaaatgtgtatatgtatatgctgtatatgtaaagatataaatatacataaatttaataatgcatattaactgattaaatataatttatattaatatttatattgct

SEQ ID NO: 45909 - DNA, 4750 bp, Homo sapiens
aggtctctagcactgccagatactccatacctggcagcagtgtagatagtggctagaggcagggttgggtggggtggactggaacctagttcagaaactacgaaaggacctgacttctatggggaacagacacagagagtttcagatggcatcaaacaggtttgggaaccgattccagggctgggatggaataaaggacaactccaacagtctgacctgggctgccatgatctatggcagaggaacaggtacagctgatggaagaggaagaaatgactccgggggaggtagagtgctgggttcaaatctctagctgtaggtctaggagcaaagtgactcaggtctctgaatctcagttgcttcatttgtgaaatggagctaatatctatcttagaggattattttagtcatgaaatgaaatgctttatacacagcacttaccatgctgcctggcatacagtatgtacttaataagaggcagccttggacagtgtagaaagtacacttggtagaaatgcctctacaacagaggaatgcctcattcacaaaggtagggattttgaggaaatttttaaaaattaaaggaggatgtgtgtgattcaattgatctgaagtttcatttcactgtggtccctagaccacactttgtagggtccctacaaagtagggtccctagccccttactttgacaggcctgtgaccagttatgagtgtggatcgaaggctacagacctgtcaccctcactgggcaagcaattcaaagtccaggcctttgctaaaaggacaatttaccaggatgagtcaaagtagctagtttcaattccaggcaaacactcgtatctatacactcccaacagccagatcagcctgataactgtttggggtttttcacttcctacgttctatgtgttgaaccttcaacagtgactgtaaagcaaaccaagacgaccaccccactgtgcactcgcaggggcaccctgcaaaagaaggagttaaaaaaagaaagaagaaagaagctcaaaacctaccctaaaaacatgaacaaaaccctattctgtcatcaccattactaaactaggtctattatgcctcttatcgctggttttgaagaggtaacagacatgtcttgttaattaaagtcacagggatatttgaaaaataagaacagaagaagtatccagaaatgtctaatttgtgtcacatctcttgaaaccagagcccccagacactttcatggccatggtcccagagacagccagaaaacaaggtcatccttgttccccaaattgccaccctcctgctctaggtttgctctgtgggtctgaacccaggacaggaactgccatctttatggtggagaaacgatgttaacaacatggtctttcagatatgaccagtcctaagctctccagtatacgcagggctcatcagggaccagttttgtacaaattgcactaatagaattataccataagatcgttataagatatttgatatgcaaagagccaatgtaaacaagggagttatccacccaacatacatgttccattaaacagaaaataaatattagcattcagttcaatggcattcagttcaaggccaaagaaacaggccacaaagggcagacacttaataaaattaactgacaattaaaactgacaatgtgggcagcctccttaggaattctatcagatgttgcatctgagtcaatagccaaatggcctgatgaaaatgcctttctatggagaaagagttttacattctgttcatagctcttcgaagacagaattaaaacacacgtatatttcacctaccctgaatccatacctatttttaacaaataaaacagtctttccaagactacataacttccggctggtttctggatgttgtctctgttccttcgcagctcctcccttctaatctgttctactattcgcttcatctggttataagctttgttcttgttataagctttgtgtttttcctcaccaatagaaacttcagctttcaaaggtgagctgctcattttcttggaattgtaagatcaagcaaccttcctgggattgttttaggttacgtgcaagaactgatgatgaacaaaacatgcccttctctttcccctgagcataggctgagaggctgctactctgtcctcagagattgttcagactgcctgggagttgaggggagcagggaccagatggtgaggcaccctgaactcatctccagcccacgggtcaacactgtgccttccgaaactattcctgaaggcgattagggagggccttttctcatgcaaagcatccatgcctctggagctactgcgcccatcctcctaaaaatttaaaatctattactccaaattggggcagaagacatttcccgggaggctgcagtcaaaagttaaaaccccctggttttaccaaatcagtctttactaacctatgacgcctctgaaaacattctaatacatcatcacccccatccaaccactcccaccgtccttgcctccagcgcagacgaaataattccagccgatggtaacatctgcaatctcacgctaaactaactcacagcagaaagaaacaaacgaccctagcagggcgccaccgctgctgaagggcaggtcctctatcgcacccaagaaaacccgacacacgtgtgcggccttttattcaggcgtttctgggcgcgcactcgcctctcccaggcgcgcgcgcgcacaaccctcctccacccccccatcccccccccccacacacacacacttggacactacacacacagctgaggagtaactttcctcttctcgcggagcaccctatcccctattatcggcatctgatcttcctagttcggatccccggaacacacgccttctccagcctgcaatctacacacgtggggaagcgcgtccaagtggtgccaggaggcaggagggaagcgcaaaggtggggaaggccggggacgaggaaggagggagctctgagtcggatctgggatctcagatccccggggcagcgtagatgcagggtaagcttctgggatgcggagagggaaaggcaggggggaaggaacctagagaaggttaaagggcgggggtgggacggaggatgcggggtaggggtcgctcacctagggttttgacagcgatctgtctggtgaggggcggcggcaggttaatgcacaccaagtccacgtcctgatgcagcagcacctcatcaatgcggctagtgtagaaggggacactcatctccttggccagctcctccgcttcttcctgcgtgcggccccacagcgccttcaccgcgaagccctcgtctttcagcagcgggatgatgacacgggccgtgaggctggtgccgaacacgcccaccccgggaagcatggctgctcagagccgcctggttctgcttctgctcggatctccagtccaacgcgcgcacacacccacctctagccagtcctgcaccccgctcctgtagccaatctagccgcggtgcgccagccgccgtgcaccgggcaaggcgcccgggtgcccagagcgcaccgagctgcaggcggagcaagctcggggcgcctcagaacggtgactgcggcagtgtccgccacgcggggctcgcgtccttcccggagtcggcggcagggacccccccagggcgccggaggcttcgaagccccctggagccccggctcaggctgcgctcccgcggcagcgccagtccgctgcgtgcgccccgccaaggccgctccatggccggctcatccccgcggccgcgccgccgcagcccgggaccggctctctcccgcgtcgtttgcgcagccggcgaatcgcacagacaaacgtctacaccctgccagagcacggaaccgctccgcgggggagtctcctttcttcctagctctccgttgggaatgaaataatcccgcggccgccaggaggccggctaaggatgcggcccggagcgcgccggactgggatcccgagctgcagcgcggcagcggcggccacgacccggcgccagcctcctcattctgctgccatgttcgctcgcctcgcggctcgggcggcctcggccccaggccggctcaggctctgggatcccgcggggacgagggcggagttggcgagtttggctgtcagcggccggtgttcctgcaccgccctcgctgcagcgccgcgcgccattggccgccgcgcgccgcccccgcccccgccgccgccagctccgggtgcgcgctgcgcccgggccccgggagcccagcccggctcctccccggccccgcccaggccgcctcgcccgcctcctgcccctccgcttcttccctttctttgccctcaccatctccttctcttccctgcttcactccaaaccccgccccaaccaagcaaatacatctatctaggcaggacgcgccctaataggttagtcgcctgtcccttggaagagagcagtgggcgccttggcctggggtaggtgaggggacccggcgaggtgcgaacagccgataataataacctcggctcccggagcgtttcttgcgtgctgagcatcatactaacgcctttccaggtattgtcccttttagtcctcgcagcaacctaaggttattgtaaacccattttaccagtgatgtgaatgagccgcaatgaaggctaagggacttgcgcaaggtgacatatataagcaacaggcctgcgattggaatccaggccccagagtctgggcacggaaccgcagacttc

SEQ ID NO: 45910 - DNA, 1075 bp, Homo sapiens
tcacccggctaattttttgtatttttagtagagacagggtttcatcgtgttagccaggatggtctcaatctcctgacctcatgatccgccagcctcggcctcccaaagtgctgggattacaggcgtgagccaccgtgcccggctgtgacttctgttttcaatctaaacaaatattcactttcatatctactttgatattcataattttgttcttaaaagtttccctcatattgtatacacatcaggcctcacaaaacctagatccatcccccccacccccacattaatcaaattaactctgaggtactaaaaagctataaatctacttcctcttctattttccatcccaaattaagttcatcatgttgttcagtacagcctaccaaaggttgtgcagtgagctcaaatgacatcataatgacaataaaatgccaacaacacatgcctcctgtcatgaagtcaccatggattcaaagttcaaagattaaaatctcaaagaagttaaagtccaggaattttatgttacagttcaaaggaattaatccaatatgtttacccttgtgaattaaagtgtaaagtccaaatcccttaggttaactaaaaaagaaactaaaggtggcacacgcatgctctcccagctatttggaaggctgagaggggagcatcacttgagcccaggattttgaaaccagcctgagcaatagagtaagagtctatctctaaaaaaaggaaagaaagaaagagatatggtttggatttgtgttcccgcccaaatctcatgtcgaattgcaatccccagtgttggaggaggggcctggtgggatgttggaggagggacctggtgggatgttggaggaggggcctggtgggaggtgattggatcatgggggtgaactgaccccttgctgctctcgtgataatgagttagttctcacttgatctggttgtttaaaagtgtgtagcagcacctcctccttcactctcttcctcctgctccagccatgtcagatgtgcctgcttcccctttgccttccaccacaattgtaagtttcctgaggcttccccagcctgcttc

SEQ ID NO: 45911 - DNA, 1313 bp, Homo sapiens
ctaatttttgtatttttagtagagacggcatttcaccatgttggccagtctggtctcgaactcctaacctcaagtgacccgcctgcctcagcctcccaaagtgctgggattacaggtgtgaaccaccacgcctgaccctaccatttcttttttttaaccctttggatcatccttgtatttctctgatttccttccaggtgctgccaggtgctcaaggtcctcttgaagtatagtctccaagctgagacagacaagagtcggtcctattacccctgccccagaaccctcccagaggtgggctggtagcacccttggcaacagtttggcccacccaaaagcagtgggagaagtggtgtggatgactgttaggcattgctttcctctggcagagatgcaggctgagatgcagacagcaggccgcaggaaacagggctgggacagagctgggctgtcaggcacaggagtgccaggcacggggaggaattaatttggctcacaacctgacactggattgaaaattagccaatttcaacaataacatattgttgttattaatgaaactatcattatcacaagacaatatattaaagccaacagacagtcctatatgtaaactctcgacatgattaaggtatttccctttttctctgagaacagcatacattccccagtccttaaaacactcccaagaaaaatcagactaataaaaataacagtgctataagcctggcttctaggtcaccttatatctgagtaatctgatgacagaggtcatcgttattactttggaataaaagagctacagtttggaaaagggaagagtcttgactgatgcctattgttttgcttcaaaactgaatgtgtgtggtttgaatttcaaatcatcataagtgtctccttccgtgtctgacaaccttagttgttactcaaactgaattgagaatgagtgaaatgagggctcagaggctgtgccaaaaacctcactcacaggtgaaaatcgttaccaacacaacaagccaaacagagaccagagctttgccctggggtcagggccactcactgacagaataggaagatgccagtttgtttttttttaaaggtttaaaagtggaatagggcaaaagataggtagtatttccaccagaaagatggccaccagaaaatagtaggaaggatataatcagaattaatcaaacttctaaactttattttcacttatgtagggtcttataaccctaaaacatcaattagttatacatgtctaaatttactaataattcttgccaaaatagactgatatctttagatagtta

SEQ ID NO: 45912 - DNA, 1346 bp, Homo sapiens
tcctatactcgggagaggctgaggcaggagaatcgcttgaacccaggaggcagaggttgcagtgaaccgagatcgcgccactgcactccagcctgggcaacaaaagggaaactcggtctcaaaaaaaaaaaaaatgttctcaaaagtgtatacaaaattttaaaaaatcggaagtgtttgtttttgttttgcttatttggcctgaagaaaaacacaatttccaaccacctcccagtttaatattttgtcaaagggaaaacgcttatatggcctaattaaatgaagctatgtcagcttcattgcatgctaaacgtagcccctaaaagaaggaatcttcagcttgtattgctaatgttgcatggcttctgttttgtaatcatttctgtttacatacgtcattaaatgtggaacatcctgcccatcagatttgtgtgaagggttcatttgaagaaaatattctgcatcttaaaaaaaaaagcttgaaaatgatatacccaatctcccccaatttaaccaaacaggaaatgtgccagtgagcttggttcgctgtgttccgcctgaacttccagctaagtgttctttccaacattcgcctctgctgacctttggtgacctgaacactgacatgtggcaggcccaaaagtcactcgttttctttttgagctagcagcaggattactcaatggccgatttggaaatgacatttcaatagtttagccggtgggttttgttactccacactcaacaggctccattcctacctggtccgggtcaaatacctaaatacttgccttctctacaatattgcattatgctgcctcagaaataaatagctgacagtgaagagctcagaaaattagttgatgctgagatgatagaatgcaagagtgaacaaaaaagtccatttaggtagaagctttttctactaggctgaagaatgattgactctcttggattctctctttagattactattgcttaattgtagggttttctagaatgcaaggagaactgaatttgaattcccttctagagctttccttcagcctttttgaggaaggtaaaattaaaaattgaaagacaagcagtcttctggtgctaaagcccagaggtagcaactattgattttgcatggcaatgccctaggattcacttcagtgcttttaacctttccttgactgagagtcctaaaaaaggtggactattggccgggtgcagtggctcacacctgtaatcccagcactttgggaggccaaggcaggcagatcatgaggtcaagagatcaagaccattctggccaacatggtgaaaccccgtctctactaaaaatacaaaaattagctgga

SEQ ID NO: 45913 - DNA, 577 bp, Homo sapiens
gcgtcatgaccactatgctctgtctacttagacctgctgcccggcttcagaccttagacttattgttgagaccagctcaacacgccttcctgtttctttcctgaggatgaattcacttccagggtccccgtagtccacactctgtcttctagagagcccccttccgcatttccctgccagttcaccacatacgcctttcttggtggtatcttgtaccacacatgtccatcatggggaggataagcaagttcaaagggctgtggacctgggtgaggccaggacatgtggaaagtcccaagagtttccactgcttttttctcatcttatgtctcattctcctcctctgcttccaaaaatcatcaggtaaatgccctcttgaacttccactggtaggtaaacaagggcagtaactctcaaactgtaaagtgcatacagtcaccttaggatctgaaaatgcagatcctgatggagcattttagagtagggatttatatttagcatttctaaaaacttccaggtgttgctgatgctgctgttttcagaatcacgcctgtttgacatgacggaaatttcagaa

SEQ ID NO: 45914 - DNA, 2768 bp, Homo sapiens
cctcttcatacaatgcactatcagaaaatggcggcgattctcttctacgggtcgggagttgagcatataatgatgtattaatgatctaaaagtaacaaggggtggctggttctggttttctctggttcctagtaggccttatctttctctggtacttggcaaagggcagtgaggatcccgggccaaccgcagttgttttaagctgggttacctatagataaagagactaggaaaaaaaatcaaacaaacaaaacggtttaaaaaacaatgagcattttcagctgtctactgtttaagaaaataatgagctctcagttttgccctctgagcgatttctccaggactgccctggtaacactactactcaacagttttgtgctttgcgcagttacttgacctccctgggcctcggtttccccacccataaagtggggataacagtacctatttcatcaggtggtggggacgatttaaaatggttaataatgtgcagttcttaaaagtgtctggctcagaataagcaccatacacgttagggggaaaaacagcagccggatgtgaggccctccccaatttcgttactccataaacctctgagttgctggtaacacctgcaggaatgagaagggcctcaacatgggctgaatttccagccaaactgtgggaagtggctgagattttaggtaggcaaaaaatgttaatgtaacatttttggcccccaagttctcagaccacttacttccctttctagtccactgacatgcccgcaagcaattccattctgccaagtggtgctggtggcaagccggaatccaagaaaaggaaagactccgattttaagggaacggggacatgcggagccacgtgagtcactgggtcccagagccacggaaggctctcagctcagcagtcagagtgcactcgtcattgcgttcgaggttaggtggcctagcctgggaaccaactcaccgtcatttgaaatcgttttagggaaaatgaccctaacatttaaaatcctctctcctgaagttgtgtggtccagccgtttgctgaaggaggaagcaaagccggtagtaactcactacatatttgggcagtggaatgaaccctggaagctgacaaagtcgaagcaagtcactgcgccgccccccacccccacccccaccccaaataaaaacagagagacaatccttcaattataaagaagaccacggcgcccgggtctccggcaggggccgctgcagccgagcagaacgctgagccgctccgccccacggcctcctctccagccggcgcgcccgcctcccgcaggtgcgtctctgcctgcgccgggccggggtctccgcggcctctcccgctcgggctccggcttcgaggtcccgaccaagcactgctctcgcgggactgcgcgcaccgcccagggcctgccgcgggctcgcgagcggaggtggcaccggtccgcggtgcgcatgcgcggcccggcctctgccctgcggtcccgggctggtgactggctagcggttggaggaagggatgtgggggatggtgggtgggtacagagagctgggagggaggcaccccggggggcggggcgtgggagactgtattcgggggcgcgagctgccccaggtgagccgtggctcaggtccggagcgcggtcgggacacagcgcctctaggagaaagcctggaaggcgctccgggggtacccagagctcttagcgggccggcagcatgtgcggggcccaaggtcttccgggctctgcgtgggggtcgctgcggctggagaccagggagggggatggaaacggggttggaaagtaatcccacccgagcaggtgggcatgggaggccgctgtgctggggagccccgcgagggctccgaacagagcctcccttttcagaaaggtcaccctggtcattgcagctgccagggtgaccgaggaaggtggccggggtggaggcagtgggcgtggagaggggtcggattccggacgtagtttgaaggtggagccgtcaggttctgctgagcagcttggctatggggcgtgcgagaagggaaggctcagggcctagtccctgggcacgagtagtagccgggaggatgaagtcccagtgcttcggggggaggcggcttgaggacggctctggagctcaggcttgcccgcgtggagtggaagctgcctcttggacacagggcggggaggccgcatgcagtctggcgcgctgggaggatgggagatccagaggggcagggctggaggggtaggaggaaaacctgaagagggtggcgcccggaagcccgggaaagtgatgaactgggtcagaggccgggtatcaacaaataggagggtggagacgaccttgaggaaagcaggtgatggaacgggagggaatggggccccctagtggagacacctgggagtgatgtattgcatttatttagctcttaggcgttcaaaaattatttattgggagcctgtacaactttttgcagttcattgcattatccttagcatgtattttgttttatataaatatatatttatataattatttttattgacaaatttatatatttatagcgtacagtgtaatgttttgatatatgtatacattgtagaaagattaaatcaagctaattgacatatccatcacctcacctacttattttttgtggtgaaaatctactctcctggaaatatacaatacatcatcaactatggtcaccatgctgtgcagtagatcactaaaacttactcctcttac

SEQ ID NO: 45915 - DNA, 2176 bp, Homo sapiens
tgttgttgttttcaagttttatcatttttgttcctatttggttttgtcgtttttaaattgagaattgcttctaaaacagaagacatgaaaagagaattaaaaatacaatatatgtgtaagatagaattattcaacttagcatttattaaacatctaccagatgatagacattagaaataaaatgactagcaagacctggcccttcccctcaggggttcacagaatggctggagcaactgtcatataagctgttatgaagtgcagaaactacacagacatttgtgcgggttcagaccagcgcaattagagatgggcagagtgggatggggtaggggtaaggtgcttgaaatttgcctgggtgggaatttttgaagtataaaaaggacttctacctggggggctgcggcagtagagggaagagcacggtcggtacaaatgcatggcaggtgtgaaacagtttgatttgttcaaagaatgatgaatcacttagtgttgtataatggatgggaggagagaaacacagcgatcacaaagggccatgtttgccaagaaataaaatatacttggaaaaaaagtacgtatgtgtatataccacaaaactcgggtgcattctctagggaccggcgaagccattctttcaggagatatgctcagcatttgccacgggccagctgctgttccaggtcgtgggttagggcccggcaccaggaagggcgcccctcccacagggccgacatcctaaccggcgtcgctgcggccgcggagctgggaaggccgagggcgccgggcacgtctgtgcagatttctttagagtccaggtctgtcgcccgcgtcttcgtcggtggcagcagggctgactggccacggcggccatctgctagagcgcatttcttcccatgaaacgccacctcctccgaagtgcggagcgaacgcagccaaatctacacaaagactgacaagctggatccactcgacggaacccagggccaaaaaacggcggcgagcagcgcctcgggcccgcgattaccggttttctgagcaccggacagcgtgagccgtgccagccctgtctcgccatcccagccgaggagggcagcgcgatggctcttccctgccttgaaatcaaccccattgccagccgctttcgccggcagagcattttccgtggggtccatccggctccaaggcggcctgcgctggccacgtggaaagaaacacgcccactgcctacaggccacgcccttcctcccttcgcgcatgcgccccacccgtcctgaggacctccgaacctgcagggggcgatgaaagtaggcttgcgctccgcttgtagctgcttccgggtcagaggtcagacggtctagcgctgcgtgggccatggtgcagctccgaccgcgagcgtctcgcgccccggcgtcggcggaggcgatggtggacgagggccagctggcctcggaggaggaggaggcggagcacgggctgttgctcgggcagcccagcagcggcgcggccgccgagcccctggaggaagacgaggaaggggacgatgagtttgacgatgaggccccggaggagctgactttcgccagcgcccaggcggaagcgagagaagaggagcggcgagtgcgggagaccgtgcgcaggttcggagcccgctgcccggcggggagaaccgccctttctcgtcccgcttgtccttccctttgctgacttatcacccttcctcccagggataaaacgctcctgaaggagaagaggaagcgacgcgaggagctgttcatcgaacagaaggttagaggctagggaggaggtgtcttattaaaacaactcggctcagggagaattcctatggtggatgtaatttgggttggcaggatattggagtggggaaacagtcaccaagattgcctctgacagtggtggaaagatgctcgggccgggcgcggcagtactttagttggacgaggtgggcggagcccgggatgtcgaggctgcctggagccgagatcacaccactgcgctccagcctgggcgacagagcgagaccctgtctcaaaaaaaaaaagttcgtctcctttagtgtccaccaactgaaaataagaggttgctgtgagaattaaatgaggtgatttgtaaactgtaagggctgtacagacttagtgtatggttgctttgctgt

SEQ ID NO: 45916 - DNA, 933 bp, Homo sapiens
aacattccagcaacaactgcaggccaggtgtggtggctcaagcctataatcccagcactttaggaggctgaggtgggtggatcacttgaacccaacagtttgaaactggtctgggcaacaaggcaaaaccccgtctctacataaaatataaaaaattagccaggcatagtggtatgtgcctgcagtgccagctactcaagaagctgaggtgggaggatcactaagtccaggagttcaaggctgcagtgaacagtgatcacgtcactgtactccagcctgggcaacagagtgagatcttatctcaaaaaacaaacaaaaaacaattacagatgctcctgtgaaaatatttcaatcaggttacatacttgagacgtatttcagtgtttagaaaaggcaatcactatctaaaagaaatgagaacttataaaaaataataaagaaccaaaaggaaagcaattgttgagaaagctatggttctcaaagattattaacacagaaattatttgacaaggtaaacagaacttcagctggccactgcatttaaaacatgtttcttatttactatattttattatgttttggctttttaaaagcttgctggccagggctagtgctttcttagagataagagggctcacaggagcatgtcttccatatacaaaccaaccaatcctgagtctacagccaaatccacctccttatctaacgctcacatacgaagccagtatttcctgccctaaatcattccagagtcaggtaccaggcaattagagaccacctctacagctcaaagcctggaggaatcatccaaactcttcaatcctcaactgtttactctgccctcccttgcctttcccaggaaatcccaatactctggcctggacttttccgtggctcctgtcttctgcttcctgactaaaacctggtgcttcc

SEQ ID NO: 45917 - DNA, 2883 bp, Homo sapiens
gtttccagacaagactgatacgttaggttgatttttttttcttccacacaagtaaacttgatacatgctattaaattgggctacatttcaatagttcccatagcaattcataattttatatacaactgatttgcttccagctttgttttaacctaggagaggtaggtgagggaggaaaggggcaagcacaagcctaaggttgttgtttttaactgcaagtgcaaaacataagccaattttcttcaaaatactaagctgcattttgttccatcttcgttttcaacaagacttcatgtgatatcaacacctaaggacctgtatagggcacttccaatcgggaggggtaggtttctgctcccctaagaaaaagggtgttcctggggttcccttctcttaccctcccggttgcttttactaaaatatattgatggcaaacttgggccccttgtccttttgtccccctagacaatctctggcctaattttgattactcctccccctgtgtatccctgctctctcttaattagaaatcatacctcagaatcgtgcctctcttccccccttgtaagaggagaacgcctgacccaccacctggagaacaatgtaacccaactccgagtccatggattcctctacccaagccccaagatttatctcccagggaaatcagaaagccagttctgtcctgtcatcccggattccctcaaggtgtcctgctcctggtctaggattaccagctcctttctaccctggggcattctactcaccttccttttccaagaatctcgcccctcaccctcggacccttcaccgcgacccccgcgcccacccggagcagcacaacaggcggcgagtggcctccgagggcagagcccgcgagggcgggggtcgggggcgggtcgagagcggcgcagcggcggccggccacgtcgggtcagtgccccactcccaccgcaggacacacgcccagtacctttgtagtgcacccgcaggttgttctgagagaggccgatgtagctgaacttgtccttcgggctccaggaccgaggcagcggcgtctcttgttcgtccacggccgggtagagacgcttcagccgccgctgcaactccttctcctgctcgttcagggccgagtccccgtgagggaagggggccgcggcgctgctgcccgccaccagagctggggtcggggctcctccagccgggccggggcccgctgcaaggcccgggggagcgggcggcccgctggcgggggcagccgctgaggcagggggaggcgggggcggcggcgggggcggcggggccgcggtggccgggggcggcggcggcggagggtggaggagcagggcggccgccgcggcccctaagccttcgccgcccgcaccgccgccgggcgagccggccggagaagagccggcgctgacggccgggggcgccggcaggacgactccggagactggggccaaggccgccggcggtggcggcgacagctgctgctgctgttgctgctgctgcggcggcggcggcggcggctgcccggacatcccggccgcgactcagcctgcggccacctccacctcttctctccttcctcctctgcttcccgggggcgctgtcgctgcggccgccggcaccaggcgcccagtccgcccgccccggaagcaggcggcgggccgcgcgcccagggagaccgcggcggttgaggagctcggagacgcgggagtaggcggcgggcccgggaggccgggagagaacgttggccggagcgcgggcgcgcggcccggggacgaggcgccgagggcgggggcgacgcgggagcgcgggaggggaaggcgcgctggcggccgccgcggccgctgctctcgcggctgtttcccggcgggcgggccgggccggcgcgagacgctgcgcgcgggcggcgctaggcgagggggcgggacggaggcgcgagagaggcgcgagcggtgcgagggggcgggccgcggggctcccggctgtgcgccgcgaggcgtcctcccgggcccgccagtcgctcgtgggcaggatcgctgggctcccggcgccgcaggtcccttcggaggtgtccgcctcctctcccttggcggccgccgtcgcccccctcgccggcgaatcccctcccacttgacttctttttgttgtcgtcgccccacctccccaccgtagggctcctcggagccgaggcgccgcttctcgtccaggcgagagtaatcgagccccgctggggccgccgcgagcccaggccccggggcgctctaggacccgtcggcccggggcgtgcggagcggctcaggctccccgcgcagtgctgctagctctcgcctcagtcccgttcccgtttgccgcctccctccaaagaggaacgcattgcctttggtacttcagtgtttaattccgtagcattgaccatatgggcagtagaaaccacttctgaaggcagtctcccacttagaatagtgactgtttcattaattaattttacgaggactcacagtgaacttaacagtggtagaagatgtcattaataaagaccggcatatcttcaaaaagcaggagcaggcactgtatgaatacaagattatagtgtgtgtttaggaagggcttctagagacgtcagaacattttatagactcgttaattttcataacagggttcttaggtaacagaaaattatgcccatttttaaaacaaggaaatatttaccgagatcagcagagtcaaaaataggacttcctactttgcaattcccaatagaatgcttcgtcgactaatttggcacaacttgccaagtgttgctctctgacccatcataacattactactttgttttcaccacttccctttgtttagcttatccctccctag

SEQ ID NO: 45918 - DNA, 1098 bp, Homo sapiens
ttatttcctcatctgtatcatctatttgtccaagctgcccaggagcagccagtcttgctcattttttatctttagcatctggcaaggggcctggcatacagcaggctaggaataattttttttttttggtaattgaactgtaatgacttctacaatctggattatgaaactgtctagagggaaaatttgagatgaattcctttctcctcagttcttcccttttcacataaacgagctcacttaaatctggtacctcttttttagtttatttccagtcctgagactaaaactggcctccatgagaagagacccaggatgtctgcccaacacagaagagacctagcctgagaaacagtgggagtgaaggaatgaaagcacttctccaggggacctcctaaggaccacctcacctgccccagaactctactggactgccccatgtgtcagggagctcgaaaacacctgagtctggaatgacttgtgaagagtgacagggttactctagacctaaattccttgtttctagtaagaaaataatcattcatgtatttaaaacataacctcctcacccccacccccacataaacaaaacaatcacatgactactttgtaacgccaatttggatactacagtttttttgttattgttgttctttttcaaaaagattggaaccagaaacagcaagcttatttccaagaaatcctgcctctgaaaggtcgacagaagggctggccactttccattggtcactccaacccctgatgagggaaggaaatgccctcttggccttctgtcaaagggcagtacctgaggacaccgccaactcccagactcctcactgatcataaggaagcgagccaactgagctgtgtcaacgtgtaacatgcaattcccctttctggggaccttcagcatatcaagagaatattaaaaacccacaattacaatagaggcccaaaggtagccttggacaggatgaggaaaccaaatacaaacttcctactcatgacatccttaagtagctcaaccgagaacctcaggcaccaagcaaacaaatggttgggaaacgctcattggctggttaatgggcatacatg

SEQ ID NO: 45919 - DNA, 2095 bp, Homo sapiens
ctaattaaatgctaccttctcaatgaaatcgattctgatcaccctatttaaattcacaactggagacccattccacttcccaagccttatcctatttttctataccaggcatcgaattacgaatatataaaaattatttgtatatataaattatatatacatcaattatgcatacgtatatccacacacacatatttactgcgtctgctctgctagaattaagctccagagggaagattttgtggactgatatatctcacacatctagaaaagcgccagggacagggcagacgctaggactccacgaattaatgattccatcagaatttgaaatcaaactgtaaagcaatcccttcatttcccagagctttgctgctcaaacatacacaccccttccccttgaacgcccaacaggctgggcgctgccaaacagaactcctggaaggcggcgcccaaaagcagaccctaggagtgggcgggcaccaactccccgccccagcacgcacctccctccaactttagcgcccgggattcccaggaattcgtctcttctgggctaagccccgccaccgcggccgagcagggcgggcccggaccttcgacccacgctccgggcagatgccggtggccttggaggacccgccctccggcctgccgggcctttcctcggggaggctgtagctgagatccccgccccgccgtccaaccccgcgagacgagccccctctcctctcccgcccgggcctcacctctcctgcaggaaacgagtgcaggcgccgggccgtggtactggggaagggcgccggcggcagcggcgacgcccggtgagcacctccacgcgctgctgcgcccggccgggggtgcggcatacccgaggcgcgagcgctcccagtccccgagctgccggcgcggggctgcggcggccaagcgcggggagggcactagcaggaggaggagcagcggtgaggcacgtgacacgccgccgcgggccgccggggcgcgagggcgcagcgcccccagaccgtcggagagcgcagagaggcagcggcgtgctgaggtttcgctgccgcccggtcttccgctgaggcccacgggcaagaagagaagccgctggcggccgggcaggcgctgggtcctctggccgccgaccgagccgcagtccatccccgagcagttcactggcccgggcgcgcgctcatgcctctcgcttttggcgccggccacgcgcggtccaggcccagagtccgacagcgggagcgagcgtgggccacagcgcaggaccgccctttcctgccgggcgcgcgggcggggctcgggacgcgcgccgggggtggggtggggcggggcggcaggagcccgccgtggcgctccgagatgcggggaccgtgcgagcccccaccccattcgctaggcgacggcggcgaccgggaggagcctgcgggcactccggaactggaaggagcttgttgctgtcacgatttgcattttcactgcactgctgtccttaaaaaggaattaccccggtgcccttcagagtcctgtgaaaagtctcagaccgacaggctgccctagatttcactgattatcctaagtccccaaacatgtggttctggggagcattttaaggaattattagcagggcccagggaaaggccctcacataatacattcaaaactaaattttcagagtttttgtttccagattagagcaccaaaaacatgggaaggtagcaatctgggaacttaaaacgtggggcatgaatgttaaaatgagacctgtcgggtatatttgaaactggtaatgtttagtttcgtggactttttgaaggcctgttacaccattcacagataactggtcccttatgtgaatttggaagatgttagttgaataaataaatgaaatgcataaggcaccaagctaggagattttattaaaaataaaaaaccgcaaaacaaattgttcttatcctccagaagctgttttcctatacagccatatgtgtacacatacgtgatggaagaatgtgttatgagccatgagagatgtacaaagtgctgggaagagaggagcgtgcatatggatgtgcaagataag

SEQ ID NO: 45920 - DNA, 707 bp, Homo sapiens
taaaaatggacaatttctgcattatacaataaaactgtgttttgaagtatagtatattcatagaaaatttgaggtacagtaaagtcaacagatcaggagatggctgccattgataagataacttgttacagttcccaagaggcaggggcatgacacaccatgggaggtcacatgagaagcaccagggtcagttaatagtcagagggagggagagggactgtgtacaaaggcctttattatggtttctcaagaaagaaacaggtgagacagggtaagcaggcttaggattggctagtgtgaataattttagtcggttctggggcctagggggctctccctggttgtctggtacctgattcttgggttattaggacaggtggatagtggcctggaatgcaaaagcaagataaaggaggtggctggtgtgtgggccctggatttgtttgttgacatttgacaagtatgctcaaaggtgagtcatttactatctctaggaattagttaaccccggaatgggccagctccttcagggtcagcaaagctccaagaggtcaaagcaccagaatagaaaataaaagacatacttaacacattctacaatatcaatttctaaaaatataatataagcttcccaatgtatagaatatgttcatcttaaataactccagaccgaatgaccatttatacctaatactcccacatggtca

SEQ ID NO: 45921 - DNA, 1357 bp, Homo sapiens
agcctggcttggggaaatgggtggatggtggtggcattccttggggtagggaacacagcacgggcacatggtgtgtgtggaggtgcacagtatgatctggttcctgttggggtcccccaccctgctaagaatggtcctggaccccccacttcactggatagccctctgtccctcgcttgtcctcatttcactagggaatagcacagttgtagaataattctcaggagtggcttgtccctccttcctcagctagggcccaatggatacacccacctcgaggccggatcgtcgtagtgttgcaacggcactccctgtcttgggatgccctttgggtaagacagctcctgcaaggtgtggtgtctatacacgttggaataaaaagtacctttgaggtctgtatattggatgttctaccctggtgtagctccatttggtctgccacttggggaaattgggtccgatcagaggtctaattttatcagacgtacaaagctcttatttagctttttctttgttacctttgcttatttatttagcacactcaaagtttaaaaacgtaatagactgaagaaaaatcacctatggcaggggttggctaaatatcaatcctgttttctcttccaggcaccctgggagattgcatttcccaaattccattctacttaggctggggccagatgactgggttttcgccagtggaatgtggctgggagagattcaagctgcttctgggcctggcataaaaacccgacatgctccttcttccccttctgtgacaacgtggaagtccacgtgtttaagatggtggcagcataagatggaaggaacttagattcctgagtcacctcctggaagtgagctaccaaactgctttccatgtgatttgagtaaggaataggcctatattgtaccaagccactgagatttgggggttgttgttgcagttatttatcctaacatactaatacagcagtagatcaaggtattcttctatgacagtaagacctctcttctgctgattttctgtattaaaacttgcctgctgggtcatgggctcatgagaggacagacaggacatcgtacaacttctctagctaagctcatcagcctctcattgtactactttgaaaacagaatgcacatattttaatgtgtatatgcacacagacatatttctaaagctaattcttgaagtatgcactggctgacaagtacatgcttcgaaggaatttgtaaatactagaccacagtcaagaaaaacagagttcaaaaaatctgtgtgcttccagacaggattttttttcagaattggaagtataatgacgacccctcatggggcataccctgaaaccaaccc

SEQ ID NO: 45922 - DNA, 1318 bp, Homo sapiens
atcagagatacaagtagcagtctgtcagaagaataactattctgtggttaaaatctttttatttcatataataaaaccacagttcaagtccagaaccggggcctaatgtgtggtgtattcagattatacaagagatacctaaacctacattaaacgaagaggcagcacaccagaacaaagccccactgtgtcataaacttcaccgaaaactaaactgtgccagctatgatagttacctcaaaagattgtcctgagaattataatgggatttgtatgtgaaagaacttactgaaaatcacaattataaccaccacattttgagttccattatctgccagaccctgtacctggcactgaacagacctcatttcacttcgttctcatggtaacactttgagtgaggaattaactcatccctcgttcaaggctacactgccagggagccgggataccaggaatgaacccggcccttcctcccacacatgtccctcccataaaccctgctctgtcttttacaaatgccatgcagctaatcccaagcattgtgattaatgttctcttagaatacagagttattcacaggattatttgggaggcccagacagctttaacaagctgcctaaagacgttcaagctgatggtttcattttcacttaggaagaacttctgacactgattggggcattccgtctttctgttacccttgcagtcgttgtgataggaaaatgtttttgtgtttgatgatgaaggttgttactgaaagaactcagatttcaactctctctagatctccaggatataagtgaaaaaagcaaggtttcagaaacaataaaatgccaagctatatataagaaagagggaaaacacacagagtcctatttgcttaatttttttatatgataggataaagcaaaaactaataaaaaacagttacttatcaggaagaagggacaggtcagagaggtgagaatggaagccagacttctgagttcacattttgttgatttgactttggacttatgtaaatgttttatataattacaaaatacaagtgaataaaaatagaaaacaatccttcaaaatcgaaagcaaagtggaaaaaaattaaccttgttaatttcttaacttctaatcacttttgttgagcaaatgggtcaaccacatataaaggaactatttcatatggctttcaagtactgtaatataaatacatccccagtggattataccttaatggaccaaacaactataaataaattttaaattgtgttcaataatactacttattaattatatctttatttggtaataatattgg

SEQ ID NO: 45923 - DNA, 828 bp, Homo sapiens
tggagaagagtgaggacttgggttcaccagtgcgttcccaaggacaggctgggcttctgaggaagttgcccaccctctcggaatctggtttggcctccgtaaaatgggcagatcccgctcggatggcccggttcccggcttccttttgcgggtcaacggcagcgtcacgcgcgcgagcgcggtctgcaaagcccccagcgctgggcgtcacgcggggattgctgtcgccgctgccagccgcagcagcgacgcgaactcggggcgcccggcccgggcgcgcgggggcggggacgcgcacgcggcgagggcggcgggtgcgacgggggcggggacgggggcggggacgggggcgaagggggcggggacgggggcgccccggcctaagcgggactaggagggcgcgccacccgcttccgctgcccgccggggaatcccccgggctggcgcgcagggaagttcccgaacgcgcgggcataaaagggcagccggcgcccgcgcgccacagctctgcagctcgtggcagcggcgcagcgctccagccatgtcgcgcggcctccagcttctgctcctgagctgcggtagggctcgcgagcgcctgtctcgcctgtcgccccccgcccctccacgacaccccctcccgtcggtcgcttgctcacgacgcgctctctctttcttgtagcctacagcctggctcccgcgacgccggaggtgaaggtggcttgctccgaagatgtggacttgccctgcaccgccccctgggatccgcaggttccctacacggtctcctgggtcaaggtaggtgctgcgatacccacgggctggggtttg

SEQ ID NO: 45924 - DNA, 443 bp, Homo sapiens
cctcaacctcgtctcccaccttgtccagctcatagcacacacttggctgtgcacccagcgtacccccacattcccaccgtacgtgaatcatcatccccagtgtgtcccccagtgacaggctgcacaggtgtgatattcatagctgccgtttgaggatgtagacgggtgactgctggtgtttctggaaaagccagctatttcgtaattgtaaaattgacctctactccacagcttcactgcacactggagtatttcctggcagatccatctaacccaaaatgagattacatttcctggcaagaagtgggcaactggtttaaaatctcacagcaaccgcatggctcaacttgcaatatttctttacattcacttacccaggtctttctgggtctattaactggcaaggttaaaggggcaacattgggagcttggggtcctacctt

SEQ ID NO: 45925 - DNA, 2004 bp, Homo sapiens
aaccacgcttgcctgtcggtcctgattttgccccagtccttcaatacgcctctcacggtttgtgctacggtcttctgtgcgttcaggggtgggctggtttatgtcaacatagtgggtttactgtaaaaatcattattggtacttttggatgtggcttttctatttaaaataattaaaaccaacgaagctttttctttctgacccaattcctggctgtcctctgctttggtgtcttcaggccaaccctgggctctgggaagctctaaggatggagcctgtctcctccacctgctacacgcagggcaagagggccaatgcgcaccccgccacggccaggagcctcattattctttttgttttaattcccctgtgtggatccaaatggcagtcccaggcccatggataagcaacaagtggctggaggagggacaaatcgggctctccgcgtcgctccccgcctgcttcctacccgcgccgccgcccactgccccgtacaggggtcgcagccgtggagcgtgggaatgggacagtcccattttacagctctcgttcatcccgcctgcggcaggcggctcctgacagggaagagcaagctttctggacttccccacccgcggtcccaccgggcccgtggcgcgcccacgcctcctcccgggccccttacctcccgcgcgcggcgggcgcacgcaccacctgactcgcgttctcattggctgctgcctgttgctaacccacgtgaccggagccgcgcgccccgcccccgcgggctcccgctcggccggcgcgttcctgcgggcgttcgctggccggcgtcgggctccgagccgcgggtcgctcgcctcgccggcttcgccccgccgcgccgctgccgccgatgcccacaaggtggcagtgccgcgctgcgtgtcccgtcgcccgggtccgcgcgagccgcgccaggcggccggtgccagcgcagcctcccgcaaaagtttccctgctccggaacggaccggggcatcgcactctcctggcgggctggtgacagtcctcccgttctcgggttgcctcggggcgatttgcacttcacagccccgctggcgtctcctggcgtcccgaacttggggcctgtcactgaggcaagtcgatgttttcaggagtgttttgttttgttttgttttaggatctgtacgctaataattgatcctaaagaggcaggcagacaccccgacagcgacacctcgtctctcttctgggcgtccggctgagcttgcctcactgcagaagcaaccgatagcttccctttgcgctggtggaagacacaagccagcagcccttcggaggggcctccccgcacgcgcctcttgggatcctgacttgcttaggaagaggagggcacggggagcctcctgctctgcagctgtccccaggatgcccttaattcccgggacaggagagataagctcgtctgacctcagttgacctcgccgcaggcgccaggcgtcctcatttactgcgaggcattggggagtctacttttctctctgctccctgggatttttttccttacgtcacttttttccttgttggcttgtagctggtctgatgtccccttactgctatctaaaccgcccccctctactccctgctcccacctaggcacgcgtttgccactctccatttttcctttaaagaaaacgttctgagagccctttgaacccagctgaccctgggaaagggcaggtccgtggatgtgaaggcaagtccagcaactggggctgcacttacctacatgtgaaaaggaaagagaaacacaccttgcctgcccattgtctacaccacgaagcccggattccattccctggtagtcaggcctttcacactgggctgccctccaggtaatatccaaagatgcccccagcctactccagcccctaacaggacactcaaagggactctgtgttcgtgactgctggaatttctgctgagaccccaacacagaacaatatatgggtcaaacaactc

SEQ ID NO: 45926 - DNA, 511 bp, Homo sapiens
ttaatgactatttcataaaatattgagacctaagactggcacttaaaacaaaattatccttttcttttcccttaaaaccgctcctgattagataactgccagactccagtaatgttgtgaaataaacctgcaaacactccacgatcagagtgacacagcgtgcctcactctcacgctagtgggctggtggttggttggttctagcacccattagcatgagttaatgagtaagcattcccttccctgtcacattccttgcctgttattagccaaaacctgaactttagcttaattgcagaaaccagcccgcccatagcagatgagggcatggtccctattgttttgactgcattcaaagtgctaacctgggggaccatgacagatgacatgctccagcactgcagagagcagcaggtggggtgctgggactatgggtgcagagaagaaaaatggcattttccaagcccccaggatttgattttcctcacacttacttactcagctgtgcaca

SEQ ID NO: 45927 - DNA, 872 bp, Homo sapiens
cccagcactttgggaggccaaggtgggaagatcgcttcagcccaggactttgagaccagcctgggcaacatagcgagaccccacctctaaataaaaaaagaaatagaatctgcattgtacaagatccccaggtgactcataatagcatcaaagtttaagaagcattgataagtaccttggccattagcagttggaggaggtgtcaaggcgtttccccaaaccagattcggatgaaatttgtaaatccattttcaagtatcaaggatttacttgttaaccaaagtgagtactatattctctaagggagtagcccagggaaatttctgtcttacctcctgtgaaattatcaaggatttttgcttgtttatcagattgaggggttgaagggagcagaaatctctttttctgcttatctgcctctggcttaaactaagactttagagggcaacagggaaaataatcttaaattgtctgcattgctgaaaggtggtgatttcatcttttggcgtgggattgggtcaacttgcactttgctcaagccatttgttcaggacaagaagttcctgcaccagaaatagcgaagtgtaatcagcagaatggattagatcctgaggaagccgttatcatggagtgtcagtgagtaaaattaacatgtatttttaataagtttataattacttatcctacaatagaccatatgacctattcacttttcgtggactcaaacacttaagccctcaaatgccatttagtttgaaacacacacacacacatacccacaccctcttccctcaaagaaaacaaaggaattgtgttttgagctctaaaatagtttcttaaggaggagaaatttgtattgctatcaaaggcag

SEQ ID NO: 45928 - DNA, 884 bp, Homo sapiens
cggccgcaggcagcactcacagctcacttaatttgcacaaagcatacagagagaacctgacctcttgctcaagaaagaaagaaagaaaatacagctggagctgggactgggagggagagaaagggctctcttctggacaggcagctgcttgtgttgcgttggagtcctctgtctgtacctccatctgccctggtgagataacatttcacgatgagagctgaggaggtggctccctcccgcagaggtgcatgacttggctggagtgttttgcttcgctggcacacgtcttctcttttcaagttagctgagctcacacatcccccttgcttgtttgcaaagtccatatgggagatgaaggcgagacagtttgactaagggcagaaggagggagtgaagaggaggaaatgtgggagcggggatgcctggccagaccgagccttcctcaaattaggtcactgtttatataaaaagttaaaattaaaccgaggactattttccaaggtttctgacactggacatggctctgtgcagcatccctggaatgcagtgcaataaacatcacagagcacatgacgtcacactgagggagaagccagggaatgtcactagcaatgaatcccaggctctacacaattatgctggagacagacaacatccttgttctctctgactctttcctctgagttttcctgctggctttttctgttcttctaattctcacgtttttatccacgaggcaaccatgtcccctgagagttaccacacacagggctctatgtttctgtttggccaatagcataaagctcttcaacaaagctttgaccttccttctccttccgacaaattgttacggccttaccttctcacagtgattcctcaacatg

SEQ ID NO: 45929 - DNA, 634 bp, Homo sapiens
agaattgatttttcaactcgaataaaaatgttgatcccattttgcatgtggagatagtcaatttagaagaattgttcttgctggcctaagcccagggagacaaaaattaaatttaacactgcagcagaggctggcatgtgggagaaggtgaatgattcactgaaatccttagagcttttccctctggttccttagtgttttgcaatctggtagctacagcagagaggtattaattattgacaattcagtcaacattaagcaaacatttatttggctgatgattcaatggtgcagaatcactgactttctctggctagggtaatcatgaaagatactgaatgatgggcatagctgtaaaaagtaacccagagagcaaggtctaccaaagtctgagactgtttgcctcattatctggacaatgaagttacaaagcagagtcccgagggccagtattcttccctttggactctcaagctaaccaagaggaatggaagccatcaggggttatccttgtgacttgcaccctgtggggggcatttccaaggggaagcatccactgcaaatgcacacactgtttataactgagaaccaggtgaaaggcacaagaactgtctctttgtgtgctacatattag

SEQ ID NO: 45930 - DNA, 1352 bp, Homo sapiens
cctgaaggcaggcagccttcaagtagagaccagaagatgacctagacaagtttctgagtgcagaggacagaattaggagatcttccaagtgcccttccaactgcaggggtatatagtgctaacaatatccacactgtaagtcaagacaagaatctgcctctgccatgttgggcaactcaggccgagcatttacatgagagggcaatggcctcgttacctcactcttgctccatccctctctccagctgacaatggcatacaccagggccacacactgccacttccttttcagagctgtaccaatacacatcccttccaatcaattaatatttccatctcagtgaacaagaacaagttaacacgctgacagtgtgggctaccttccagggtttgtctgctgacagattaaaaagtatgtcaacatggcttgatattaacaaatattgcaaagcaggagcctttgtttgttttgttttgttttgttttcctagtttattggtagtgctggcgaacccacgcctgcattcatccaaaggtagaccgaccaggtgatgtcagcccagccaagacctcagtatgtgaaagtgctggtgaactgcagcagccagtcagttgctcactcctgctgggtgaatcagccaggagaagagcagccagcgagtaggtgtgcagcttctttattatgcaattggaggggatgacatggttgtcataagatgcacttttaagtggctgagttttcaatatcgaaggtgaaagcaatagaagatttttgcaacttttaaagaaaaggtttttttttttaatggtgtcttttaattttttaaataaagcactaaatgaaccttttctcactctccatcctctctggctgcctgctcacaaatagtgattaagggctgtctgacatccaaggtcactggactggcagggatacagagcccctctagaagagggtttgccaactatggcccaccgctccattccagcccaccatctgcttctgtgcaccccatgagcaaagcctggctttcacatttttaaatggttaaaaaaaatcaaaaaagccatatgtcataacacacgactcacatttcatcacacatgaaaattaaaattacgggaaattcaagtttcaacatccataaagaaaggtgtattgaaacatggccatgctcatttgtttacatattatctatgaccgctttcatgaaataacagcaaggttgaacagttttcagagactgtgtggcctataaagtctaaaatgttgactgattctttagaggaaaaagtttgatgactcctactatagagtttgaggaagaagcatactggatcctgttatttgg

SEQ ID NO: 45931 - DNA, 2324 bp, Homo sapiens
gacacgtgtttacctatgtaacaaacctttacgtgtgcccccgaacataaaataaaaattaaactgtaaaaaaaaaaggaaattaatcaggacagtgcctttgacaatagatttccaagtcatcccattagaaaaggtgttatcaggtgaatcaacatagactccatctgaatgatgatttggagataatctgagcattatcatccagggtagctagcataagagagctccagaaaatcctcttatctcctagaaaagtaagagaaaaatcacaacaaaactataactggacaatgtcacccccatcctcccagggaggttttctcccctcacttttattgtacctgtcttctacctccacaaatgtacctgtctcctacctccacaatttactacttctctgaagtaacaattctgggaaactgatttcccaaccatcatgtttagtttggccaactgctcactcgtgactgcaattttaggtacaagggtcaaggctaaagtccagcaaagacgagtgatgattctgcgacccattctcacaggaaggcttggagtcattcatgggtggccgccgtcttctcttcactaggcagctggtggtacatcagaaggcaactcgttgtaggccttccaggttcgggctgcttggtctctcaccagttctctactatgaggctgcccagtgaagtgaagcttaggattcggggctgttatcttagctccacccttactagctaagggacctcggggcggggtggggtgggccatggacctgtgaatctgtgacaacacagatgtaggcactctgcaaatgttagtcaccatccccaggaagcaatctcaaaacacccctcctccctgccatagatgctgctgggtttctctgcatcattatcaaatggtccagtataacttcaacttctctccaaccagcctgattttccccacagacacaggacagaagaacaaggagcaggagctggctgatgctgttcttggtggtcatagatctttttgtccaccctcgtggacaggctttatcctctgcagtgcccagaggcttctttctttcattttcggctcttttctttttttaaatccagtcgcttgttggttatcatacttgcaaagcaaacaattggggggtggaggggaagaagaaaaaacgtaatgggccaaccacactttcctccatcacaccccatctcctgagccaacaggtctacttgtcttcttccagttcccttccccaagaaataacaatgcatgacattatttacaaaatgagtttcacagttccaagttttgaagcctttcaactgagttttccgactctggggatattagataagaatctgctgtcaaatgatatgaataataataatgataatcttttacaagggctgtgaaacccctaaagaacaacagattttgaattctgagaaatccagagggtggctctctcagacagcctcacacaggggagctccgatggcactgggggtcggggcggaggcaggatgctcacccaagagcatcctcagcatgcattcacatgcccagtggacttgggaattatgtactccagtaaccctgacgagatcacagttcactcatttacattgcatattgaacagacttgccccgagtaacagataaacatatttacatggattatgagtcatagccctgaagagctggaaaaggtctagaaatcatcaaaccaaacttgctcatgttacagaaaaggacactgaggcctggagaccgcaagttactggtccagtcacactcagtagcagggctggggctcagatattgctttccaagtgcccagtgtctccgaactttagtggaattattctgttatcttacaacagacagaaaagcagtgaggaaaacaagatggagaaaaatgaaattgaaacagagaaaaggatggaagagatagtgacagaaattacaggagagactgtctgccccatccatctttatctttctctgtatctgcttgatctcattcttttctgtaacctgtctccaccctgtctcccacaggctggctcgtaaaacagcatagcattatttagtttattccaaatacagctgatcctcaaacaacatgggtttgggctacagagtccacttattcatggatttttttctgcctctgccacccttgagacagcaaaaccaatccctcctctccctcctcctcctcagccaactcaacctgaagacaatgagggtaaagatctttatgatgatccacttccatttaatgaatagtaaacatattttctctatgattttcttttttt

SEQ ID NO: 45932 - DNA, 918 bp, Homo sapiens
agagaaaatgtgtgcatatgtagatgtaaacacataggtttattataaactttactgctatatgatacacacaatctggtaaattccatatagccaattgtttcttatgtatgctttcattgatttttattttacttatttttatttttaaatataataaccagagacagggtctcactatgttgcccaggctggtctcgaactcctgccccatcctcctgcctcagcctctcagagtgctgtgattacaggcatgagtcaccacacccagcaacttccattgatttttgacaaactctcttctctgtagccaaccagtgtggcaactgatgaacaagtatagttctgggatggctgttggttgctattttcatttatgtaaacaacaggaaagtgaaacaactaagatctgtgtcagaattccactcattcgtcaatgataggaacaactcctttacagaatcagatacagttgtcaaagactggaggaagattttctcaaatttttttgtgtcattcacaaagtaatggctattgataggcagactttaaagttttatctgtatgtttaatattatctccctcacttccttaagtctagaccaagggttccataaaatttgactcttacgagccagatagtaaatattaactttgtgagctattcggtctctgtcacaactactcaacggggccattgtagtgccaaatcagccgtcgacaacaggaacacaaaagagcgtccctgctatgtcccaataaaactttttatgaaagcaagtgggggcccagatttggcccacaggctgtagttcccaaccccttgtctagacaaccaatgagacaataaatccagcctgatttgtagcgtttgtttacaaatcagttgctgtggctatttcaagctaacaatgcaaa

SEQ ID NO: 45933 - DNA, 671 bp, Homo sapiens
agtttcaaagaaaggccctaatatgagctctaggaaaaggcaaaaatgcaggcacagatgggctagctccttaaggctaacaagtacccattcactggaggaggcaaccctaaaatgtgatcaggtgacaagtggccccacggtcctgaggagcaggcactctaacccatgtaaaataaaccggacacatggaaattgtaatgtgaggagagtgtggaagccagggaagggatgctgtaatgacaagtgcaaacagagagcggggagtttccatggagtctggaaagctggagggcaaaacactgggtgttttccagcactgaccagagcagaacatggctggccaatgtaaacatccagtccactgggcaaacatactcctcactgaaggaggatgtttcacggggacagccaccgtgtgataaaaatataccctctaggaaatccagtttcctttgcccagggttctaaactcatcaagcaaccttccgatcttaatttgatttttgatggtttcctcactggaagagaaggcgctaacagtatccagtctgctaaatgattgtgttttcctgccttatcaccccccatggtttttggcattgggtattttgttctaaattgttttctctctcaggcgtaatagtattttccctctaacaagaatataa

SEQ ID NO: 45934 - DNA, 645 bp, Homo sapiens
tttttttttttaaatgactgtccatcagtttgactggcccaagaggtataggcgtggactgcagcgcaatgagccagaggaatgcctggactggatattcaactcagagtgacattttcacaactctggtcatgaggcttgaagtgacaaactgcaagatcaggatgactgctcccagataagagtctgcccctggtgagcagccatcaggcagctgacagggagcacagaacagggattatgtactcgagtgacagcctggcgtggtgacctggcttcctgccagggccaacctccctgttggctaaatgacccagggcattctcccccacagcagcggaatcttccagagcctccttaaccagcctgtttgctcctaccaccaccttgtgcgtgagattatgctgggcgtgacacagtgatgacaccgttgcttgctctatagctaaacgggccaaagtcaaaatcacagaagtcacttggataaggcagaaacacacagacactgccacggagccagcagactctcccagcaaccccagttcagggaggtgagccttcctgaagcaaagagttgcagcacggtgcagtaaataccacgttcaaccaagtgaagctgccagtatcagatcatttttgcctaca

SEQ ID NO: 45935 - DNA, 443 bp, Homo sapiens
ttcatctctagaggtgcctttctgtcaaagggcggaaggagcaggacagacaatgtctcaccatctttatgacatcctagtgagtcagagaaccaacactgtaattcccaggctcctggggaggaatcagatccagggcagggagtgggaaagtcaagagcctctcaaatctagtcctggctcctgttcacctccagtccaaatgcctccctggaacacttaggcaatccaaacaggcaccaacatgatgattcattgtactacagcccttttgatcttttcctcaaaggaagagacattgtgagttaccttgtaattatttctcaagtccttgaaacatgtctgggattctgtatagagcataagtttcttaagggcagggacccattttgaatgaccctagtcactttgcagcataaccaggaagccctgaagatgcggca

SEQ ID NO: 45936 - DNA, 3027 bp, Homo sapiens
ggacagttgatattcctggcactcggtgttcgagatgtttccttacaattgcgtgtctgtgcggctcggtctccatattccactcatttttgtctcaacattttgtggtattttatcacaaaatacgcccggcaaagcaaagatcccgttcagtctctttaaacacggctatcttttctcaggaggcagccgccggggcttcactcctgggccaccagcgacgtcctccaagcgggtcgagcggaggcgcgttcgcgacccaggggcagcgtgccgagcccgggcgtgggggggcgtggcctttccactcggcgacccccggccaccgcccaccccgcgcgtgggggcgtgcgcgactgcggggcgcggagaggggtgacctcggactaccctaggcgcccgcagcacgctctgtacacagacgcgaggcgctgtcctgaggtgacaccggctgcacggcacaagcagcaggcgccgccgatcaactagttcgcaccgaggattcctcttggtgcgtggcccagttttccttaggacgggctccaacccctccctgacaccgcccccctcaccgccacgctccgaggccttccccggggaagcctcgcgtccctcccccgcggctccgggccgcacgcgcgcgattcctcgattccacaggcggttcgcgccgcgggtgggggcggggcgcgcggggagggggctggcggccgccaggggaggggggccggggcccggggggcggaggagggccggcgtggggagttcctcgctcgcggaccacacgctccgcgggccaatcccgagccagcctctagcagtgtcgcacgcgggacacgtccaagcgtttgttggcacggccagtgagggggagggggcgaggaggagggaggggagttgagtgacaggctttgcggggcaggctgggaattgtagttcccagcttccgtggccatagccattttgtagtcgggggactacaacttccagaagatcaaggggaccattctaaggtgccccgggaataggcggctctccccggggccgggcgtcctggggcactcctacccagcagcccggctgcaggtagacgcgaaggcagtggcgggggctggcgtggggcggccgtggggtgagcggcaggcaggggaaagggggtgaggtggagcgacggagcgtgccatgcattgagctagggagcctctctcaattccacgcctgggctcggcgtgggagcgacgcccgagggcttgcctgggaggggttcgtcgaggtcgctcgggtgtctggttggccaggctgcgggggtgccctggactgggccaggggcggtcggcaccaggctaagcgggcgcctggcggctgagcggtgggagttttcggctggcgcccggcggggaattatccgaggagccctaacttgtataaaagcagagtccatttaaagttgggctggatagcctctctctcattggttagggggcttggaaaaaagagactcggcgagccctcgctgtggtgctgccgccgccgccgccgccgccgctggagttgactcttctgctcgcactgctgctgcagcacaaacgtgacttccaacattttttatttatctttcccttttcttttccaagatgtaactacggatcagacactaaggaccttcacgtttcgctgatgtagtttttggaggaaaaaggggggggagtgaagggcgtcggtttttttttgtgtgtgtgtgtatgtgtttcgggggaaattttccattatgagtgttttactaaagtgaatttttttttgtttgcttcgttcgtctttggctctttttttttccttcccaatttcggatttatttcaaggcgaatctggctttgggggaagaggaagaaaagtcggattacaagatcaaccaccaccaacaacaataaaaaccaccaggatatttttttgcaaatttctgacggctttaaattcatgaagcaattgtccccttttgcaatcagcatttggatctcagaatgagcaaggaaagacccaagaggaatatcattcagaagaaatacgtaagtgctcctaacaacacatcctttgacttgcagttttaagcaatggctgtgaatgtcaagtttatagataattctgcctctgaagggttttaaacacagcgtccgataaggctgtttcttttttttctgaaagagggcttttcaagcaaagtggtgtctgcctagtttggttgaaaaaacagactggtgtagagatacctcaagtgaataaattgacctcgaatgacacaaccataatctacttttagatgaaaggcaagggattttggtggagcttgaggtggggggtggctgcggtaatgtaactaaactgcattctcaagcggatttggccccgtattgcactttgcatgcaaatgagcctgtgttattattattaatgttatttggaaaaatcgtgtaacgcatgtgtgttggaagccctttaagttgcgatcgagggtccgattatggcgatcttctctttgcactggcacatcaaatttaatgtctgtggtcgttttggcttatctggtttgcaacataaaccagttgggaatcatgttacagcgaatgcatttgttgggattgactttaataatgaggctggttttgtttaaaaaattcatggtttccagttgtaggggaaaaggacacacactatggctaatgtttttaagtgtgtacgtgaatgcatatgtaagtaactacaaataatttctccctgttaactgggcttctgaaattgggtgattattcctagatttaaatggcttggaatagttaaatttgttttgtgcatagtacagctacgttttgattggcatggggagtgtttttgttttgtgtgtggtggcttttttttttttttaagtttgaggggagggaggaaagggggaccgagggattaaccaaatatgcactcgagtgatctgtgattagctgcatgctttaaattaaataactctttttttttttcaaa

SEQ ID NO: 45937 - DNA, 1597 bp, Homo sapiens
aatgcctcttcaagagagctgatccttatctagacacgtcaacttcaactatgaaagaaatgcaaggttaaataatcaagcccaacttagaaagctgttccataaagaatttaagaattaaaatacatccgcattgcagagggctgggtagaatgcaaaggactagtttaaactcgggctgtagaaactgcactgaggcaaccttgtcttggagcgtggacgccttcccggggcacgtccgtttcggatgcagccacaaagcaaatggggtagaacttggacgagaaccgcaccccgcctcccattccggacctcgttgaggtggagagcagcgtggggtgggttttctttcttattgcgggcgttcagcggatcgtgtctccgagtccgggcgtccggctgcaagcccgtggctggcggcggctgcgggaggcacggcacgagttaatgcaccgggagcagagccggtgttcccgacgtcctcgagccggctgcgaaagggacggcccgcgggggtcgcggcaggctgggccggggctgggcgggcgggcgcgcgcgcgcggcctatagggggcatactccgggctctaggcgggcgcgcgaggcgggcaccggtctacccgggccggcttgcaggcgggcaggagggcgggtggggcgcgggggtggcgcggcctgcggggcgcggggaggggagagcgcgcggggagggggtgggagcgggggcgggggcgtgggcgtgccggggagggggcgcgcggcgcacagctgcagcgggcgccccccaccgcgcacacggccgagcatggcggcggcggcccggccggcttcccgcggccctgcctgcgggctccgacgcagtctcgagagcaacaggttaagccggcgagacgtcagcgcgccccctctccgccccccggttcttcccccgccgcgcgccggcgccccagcccttcttccctccctccgccccccgcggcgctcggttccccgacgctcccggccgcactctgttgtcattgtgacgtcacaaagggacgggctcgggtggaaccttcccctcctcctccgtgacgtcaaaagtcgggcgggaggctccaggcgcggcggggcggcggggggaggagggagctgggcgggggcgggggctgccgcagagccgggctgcggcgtgggaggaggaagaggaggaagatgcgctcggcctctgccttccgctccggagcgtcgcgcttcccaccaggtgagggccggggagccgtaggtccccaaaggagtgccactggaccctgttctgatgccacttgggaagcggggagcggggaggaggcgcctcctttctgcaggaatgttttcacttcctctgttccaggtctcctgatggtgttgcattactagcgtggtgcatgtgtcccctctccagtgcttatgtaaagaaatgaaagtattcagggaaagctgtgctttgttggaggaccgcgttgtggatttggccaccttgtcacttgaagtcgtgttaggggtgcttcagcaggatgtggccggatgcctttcatgatgatgctgcacagcagcaactgttgctctttctggaagc

SEQ ID NO: 45938 - DNA, 641 bp, Homo sapiens
agtaatgaaatgcctcagatttggacaggcttgtgaatatatggggtacctctgcagtaatggacaaggttgggaatgtgagcctacttcaagtttggccttgtgttaaactggctgtgtgactccaggcaggctatacaacctcgctgagctatttcctcatctggacaacttatttcatgcacttcacaggcttgttgctgggagaggcaggggaatttttgatgtgaaagcactttgtaaactgcatactgctgcacaaatgctcaaggtattattacccagttggaaatcaccaacctggagacatcaggcctgccggcggccttcctagctgactcagatataaatgaatcaaatgaattctgcactttgattcttaataaagcaagctgatagcaagtagcagatgcacattgggaaacagaacaaggctttacggattagaaggtgatgtaatcaccttctacctctgtcctatattagccaacacttgactcctaaatacacctggatggtgaattggaaagagggatagattgagaattaagactggagtggcactgaatctgtgcacgaagatgtttaaagaagacatagtccttgaaattaaaaatctgattatgatgtgaacacaattc

SEQ ID NO: 45939 - DNA, 763 bp, Homo sapiens
acagagagcaaacaacataagtaatagtttagagttttacttcttaacgtcttcccaaattccttctctttctctttcttacctgcaccctggaatagtagtaatgaaaaggaaaatagcaaaccgtgagctccatatcctctcccgctgggggaaggactaatttgcagggcctcataaggaaacagcagtttcatggtcattgttgtcagcctagcagcgcttggttgcacttccgttgctcaacgtgtttctcctggctagggtgtttgtagtatattttgagttttaggaatctttcatcaaagtttcttctgcttttttgtcattttaaggcaaaacattttcttttggtagcttgaaagttctacactctcaatgtttaaacattttttgggggcagggtgagaaacagctttgtggacgcatatctgattgtgtgtgtttgttatttcatgtcagagtcatctcatgaccccaggagacctcgccagtggcctgcctcctagaaaatgcactgctgtaataacaatcagggcgccagctgaccactggttgtccctcagccacttattagctgcatgtccaggaggatcaccaggccgtggtttaaattctcagtgttctccattgtaatgtggggtgcacgtgcgtccctgagtggagattaggtgctctaataggcacaactgtgcccctttcattgtaggcattctcttccacctgtatattagtattgcttctagctgcgtgatcgagggtt

SEQ ID NO: 45940 - DNA, 781 bp, Homo sapiens
agccagggcaatattgtgttggcctctttttgattctgggtttttttgttggtggtgatcctgggcaccttcagtctttggttcagcctgggaaggagactttagaggtatccactccccctttcccagttttctcctgattcttccttctagtccttgtgcatattagtgggattcttaaaaagccactgacaatctgatggtctaaagctccacctgcagttagaaagaagctggtcagccttctggaatgttctttctccactggaggctagtgagcacctccagactaaaggaggttttggttgcgcttttagctttgaggaggtcactgaacttcaagagcccttctggtttcccattttgtgtgataggattaaaaacctctgttttgttgggttacctccatctctgtgacttggggtgacaacctcggaccagtggagaaggtgtgtgggcagcaggaagagctgtttgatctctccttgcaaaatgtttctgggctcaggttcaagagtggagaaaccctcttgaacatggaacagttggctcttggggtcagtagcaaagacaggaatgagctggaaaactttgtcctgacctaaaaggaggttacatagacagggttttggatctttggtgtttccttttttacaaaggccatgtgcacagctgtacttccagaattggaaaatttcctacatacacagcttcttcattagatactgataccggttaattcacagtcacctgtaattggaaacagctgctgtttcccagc

SEQ ID NO: 45941 - DNA, 455 bp, Homo sapiens
ttgctttaaaacatttctgtccatacacctttcaaacatatggtaatattagcatatgattgaattggaagtgcagggtccagggtatgtgctctgtgtgtgtgtgtgtgtgtgtgtgtgtgtgtgtgtgtgtgtttgagacagagtcttgctcagttgccaaggctggagtgcagtggcatgatctcagcgaactgtaacctttgcctcccgagttcagaccattcttgtgtggtagctgggactacaggtgtgcagtgcaccatcatgctcgaccaatttctgtattttaagtagagaccaggtttcaccatgttgcccaggctggtcttgaactcctggtctcaggtgatccgcccaccttggcatcccaaagtgctgagattacaggcgtgagccacagcgcctgtcatgtgctgttttagagtaggaagaaattttttccttccgaaaac

SEQ ID NO: 45942 - DNA, 563 bp, Homo sapiens
gacttcaggtgatccacccacctcagcctcccaaagtgctgggattacaggtgtgagccactgtgcctggctgttttataatccttcataagaaaggacaaaataaggttgaaaaagagttaacatccattatgctattgtgtttacttttgaaaggcagcaaacataaagctaggagcttgcccttcaacaaacagctttagttgggtctggtagagtcaccctaagaactggctctgcgcccctcacctggattgcagtcactgcttgctctcatctgttgtacatatttagcattcatgaaatttcttttaaatgatgtaactgctttgaaaacatttcagaacaattgcattgaattgaacttttgcattaatgtgagtctttctgggtttttttttttttttttttttgaaaggaagtcttgctcttgttctccagactggagtgcaatggcacgatcttggctcactgcaacctccgcctctggggttcaagcgattctcttgcctcagcctcctgagtagctgggattacaggcacctgccaccacgcccagctaa

SEQ ID NO: 45943 - DNA, 944 bp, Homo sapiens
ttaaaagcatagagtgtaaattaggaaaacagtcaaaacatttaacattttgaacacttcacagaatgagtaatggaaatagtgtagccagaaacttctctgcgtggtcattattattggtgaatcagccaaaagatgcaatcattgctaagaggtattgtttaatactgggaaagtcacatcaaaagctttctcaaaaaatatatattttaagtcctccttccattcttcactttcctgtcttggggagacagaatacttcaaagtagtctgtttttaaaaggtgacttctttcaggttttgggaaagagtgttatgtgttgtaattaagtaattgttccctaagatagtccttaagtacaaggacatctcactagacttcattgtcttgtgaaaggagcggtatttcaggaattaactactcatttaataaagcaaaaaggctggatgtgatagctcacacctgcaatcctagcactttgggaggctgaggcagttcgatcacttgagcccaggagactagcctgggtgatatggcaaaatcctgtctctacaaaaaaatacaaaaattagctgggcatggtggcacacacctctaaccccaactagttgggtgtctgaggtaggtggattgcttgagcctaggaggtcaaggctataatgagtcatgattgcaccactgcactccagcctgggtggcagagagagagatcctgcctcaaaaaaaacaaaaacaaaaacaaaaaaaacaaaaaacctgtaggccaggagtggtgaaggaaaacagaaagagtgcccttagaagtataatactggaaactgtctttttgagcaacactttaagaaataccccagactgaatggggaattcacaacattttgcatttgtcaaaacctgtagaatgtagaacacaaagagtaagtgaatcctaatgtaagctgtg

SEQ ID NO: 45944 - DNA, 900 bp, Homo sapiens
aagttatgaattgtttattttggggatttttaaatttaatattctcagaccttggttgaccatggctgactgaaaccttggaaatctaaaatccggataaggagggctacagtgttgtcttttttgatagcttctgaattggaacaactactttaattgtagccttaacaacccagttagtttcacgagtttgcataccatcacccagtccgggtcaccctactatgttcttgtaattattggtattattttataattgtacagtgtggccttgttgacatgttagctatcgggccagccacatgcattacaaagttcagcactgttggtgtttcaggaattaccaagccttcttggaaagcattcaagccagactgtgtgtgtacctaattctggttggtatagtgccagtgtattaacttttatttaaataaaattccaacaggtaacatttattattactatactgctgtcacagagtgcccacactttaatgatgtttttgaaagtcaaatattagcacagtagatcccctttctgcattaatttttatcacaccctatgtgatatggtcaatactacgtaatttcatccatataacacagaaatatcattacaaatacatggctgatgctgtatgatcattacaattctgtattatgtgaaattctctggcaccataaccttgtactctcttctatcatacgacaatccacaccaccctacccctcctttgcgattagtagttttggggaaattattaatagcgtggtactgaaataccaaggcaccaactggggttggtcttggggttgaggtgataattaggtggatggcagccatgaacctgggtgtctgcatagaattactgtgaatatgagatcccatctgaaaattctg

SEQ ID NO: 45945 - DNA, 619 bp, Homo sapiens
actacttttagtgtaaacaagctctttacatattattcacatttcttggttcaagcctcagaagaccaggatataattttaaattgcaattagttaattgaaattaagtttctaaagaaagtgttgaagactcttatctttttccctttcaatgaagcaatttaagcactgtaagaaatttacagatggcagtttggataatgaccccatagatttttttccagagaggttctgtctccagtgttgtccctttattcagggacattgaatcagagctgtgaagcagtctgttttgtggtttctgttgaaatcctcttaagccaagtcactaaaggtatgccactggaaaggactcttatctcttgtgaaataaatccagtaggaagcctgttctcaggaatgcctggttaggtacacaggctcactgtgctcagtagtgctcctgcacttttgctaagccactgagacccacagttcagctggtaccagtgtgttaccggtggagggtgtccaggttcttggcgttttgaacaaagaattggacaaaacacacaaagcaatgaaaaaaaaaaaacacagatttattgaaacgaaagtacactctacaggccgggtgtgg

SEQ ID NO: 45946 - DNA, 855 bp, Homo sapiens
gaaggtctgtttctctaacaactttttatcgaacagcgaggaatatcatgagcatgtgtttcagcaaggagcctgccccagccgaaatcgaggtgagagaaggggcccctcacgctgcctctcatggtgtgggaacccctcggcgagctggaggacatcctgtcctgccctgacccctgcagctcggtgaacggaaaggactcagatggggctgagttcgtcctctgtgttgagcgtgcaccagggcagccaaatgttttaacttaggttgatctaaacttgttcacaagccaaaaacactataatgaaggtggggagctgccgagtgcaggggacgggttctgggcacgtcccctgctccccgtcactgtctcctcctgcttgctcacccggctgtttctcaccccatcctctgtgtgtctgttatgcaagagaatgtttggaatcccttgaaaccacagttgtgctttttcttctcttctattttttatttaatgggattggcagattgccatttttgtgcttctgccaactctcttctttgagttagtatgaggttggaaagacagtgagcacttctgtgcccagaccaattagggggagtttttgtgtgcggcgctgcaggacagagaccggatctgtttatttacctcccctcggccagtgcccagctgagtccgtgtgaacttccagctgctgacgtcggtgggctctcagcagcgcttggtcgtggaaagggaaagaaaccaaacccggactgctggttcagggcagctgccggccggggaacaggaggtatttgctgaccacagcctcatcttttagtgtgtgacaggcttttgctgtgtttttttt

SEQ ID NO: 45947 - DNA, 978 bp, Homo sapiens
gagctcacggcaaaggtagagaaaggacgcaacggggaggggcggccagccttgccaagggttaggccggcgagccgggcgtgaaagccgagacgcggcgcggaaggctgtggccggagggtgcaggctgctgcgcggtgcgatccgactcggggagggtggctggcccagctccaggtgcgcacgagcaggtgtctgctgggccgaggggcgcaggccactgtgccgcgggggcggaagcggtgaggcgcgctggcttctcacatgacttccctccagggcccagctgatgctgccgggaaaggaccgcagggtcccacaccccccccgggcgctccgctgcgccgccgagcgcctcccggtcctggggggtgcgcgtcacaggcggcccgcagggacctaagttactttgcgccgcccgacgcgaggacgccgggaagttcgttactttcctcggcggggcggggcggggaggtgcgggacaggacggaccctggaccgtggcgcggggaagggagcgaggcaggggcatcccaggcggcggcccggccccctcaggtcccttttcgtcgcccaccgtatacccacccggaggtgaaatcctgctgcacgctcagcagccgctcgcgaagggtctccagcattgccgccgccgccggtctcctctcctcaggcctcgggctgctgctgcctctgtcgccccctgggtcccacgccgccaaccccgcgctgtcaccgcgcgccccgcactcccactaccggccccgcccccggtctggtcctcgccgccgcgccgcaaccccagccccttccgcgttcccgccccgcgcgcgccaggctcgcgcagccgcagtggactgcgccgggctcgggctgcggaaaaggggcgggtcttcccccgaccgagagggccagtagctcctcggctcattcctatcccgcaccaggccttctcgtttttttttttttttctttaaa

SEQ ID NO: 45948 - DNA, 594 bp, Homo sapiens
ttttctgaagctgtgtgacacctagcgggtatctgtacaaaacaggacttagttgctctttggcagtgagtcttttgaatttttggctttcttttcatagttgcgtaacagcaaaaataaattaattcccattgttcatgggaaatgtggggtggaatgcaccacagccttaccaaagcctgacattagtatctcgcgtttacagcaaacaaactctagttttgcaataagtgcaaattacacttttgcaattctactttttctgtaatgctcactcaccagagattcttttccgatcgagcatacagtccccatcatggtttctcatctatgcaaagatggagtgtgagtggctctactgacctttgttctcagttttctgcccttagggtcaaattatgcacttttaatgagaattcatatcattttttttcaatgaaaatacgaagggctgattggctagattgttgaagcctgtactgacagctaataaacgaaaaggatcatcaaggaatcatctcccttccagtgtacctgcctaatgggaaaaacacagaggtaaattgtctttattccctgttaagccctaaaaat

SEQ ID NO: 45949 - DNA, 770 bp, Homo sapiens
atgcagctcctgagtatttcaaccttggagggttttctccctaagcataattaaaaatgtagattttaaaaattaggattattctttttatcctattttgtaatatggtattggctcagaaacatagcccttccccaaagttttttttattgttccatgcatgttagttttctaagtagattttaaacctagaaaacagaggtcatgatttataccatttcgacatttctagttacctcagagtatataattgggtacatggcactcattcaataaacacttgaattaaccaagaaaaatgtttaatcaacaaatatttattgagtgggttaggcttctctgaccttttagttaacaataaacttaatctgtgagttgaaagcccagctgaacaactcactttaggttggaataacctgctgatcttggagacagaagctcatgccgcttattagtgtctacacatagggtgagccattaaagctctgtcagcctcatttctccaactgtataggtgagaaatgtgtgcttgattaccttatcaactctctcacctcttccaggattatgtgagaaccaaatgaggtaatgttcaaatgacataatacacaagagcactccataaaataaggaggtatgttgtcattcttctttctaaccttgctatagtgggtgaaatgtgttctgaatatacttacaatttgtccccactattgatcacatctacatcttggtaacatgatctaatattatagactccaaattattag

SEQ ID NO: 45950 - DNA, 1236 bp, Homo sapiens
gacccctttttgtttaaatatgaacttattgaggatgtcagctgtgtatttacatctctgagcctgtaatccacagaacagtgagagagagttgaagaaatgttggttacaatatcaaatgaatgaatggggctgaacattagaactagccacacgtttctcatgcatagtgtcgtcaaatgattgcacaatagttaagtgtaacaatatgaagataaactctgagaaaagttccccaacataaggaataccctcaagaatgaagcaatgaacattggtttcaaggaatggagagattaaaacaggtcttattttttggtatggaggatatgatgcagaaaaaaatttaattacaaaaacataggctattaggctattactttattcagaagcagagtgaaattcatatttcattttgtcacccttgctgagaggcccaggagcatgagaaaataattttcccactttgtaatgaatgacaacagggtacccccactgttaagaagagcaacattccagcatttcacaaagccgagaggccagggagagctccttggattgggtccagacagactgttcctggagagggttgtaaagggcaaagacttctgaggccatcagcatgttgcaaagggagggaaataccctttgatgtgagacggcaaccctgagtcagcggcctaatttccagtctcaaactgtctgtaaaatcaaatcacaatcggactttgctgcgtacttcggctctgaggtcgtcaccctccagagagtgagttcatcttcctttagttaccaatctctcccagctcttccatgactggagcaaataatgcacatatggcacgcagttctgcaggtgctgtgaagatttttctccactgcctgtactttagcacagattcattttctttagagcaataaaggtaaatcttctttgaattatcaaatcttagctgctaacctcagtgagatttaagctgcttctaatttggatcccatctgccttgccttcctttattggcttattgtttattcagtcacatagctttcccatggcatctgatttcccatgagatcctcttctttaaaagttaagtaacaataataacaacagtcaagctcccagtgttctagaattctacctggagcttttttcttcagctgagcttgatcccagcaccaccctggatgctaacccttggatagtggctgctacctcaataaggtcctgagtct

SEQ ID NO: 45951 - DNA, 621 bp, Homo sapiens
gttttagaacttctggggtcacgtgaggcttatggtgataatgcatgtagtttcgtaacagaaacagggtttgcctggaactgtcccagttttaaaactgaaagtcttgtatcctaggaatgccctcagtaccaggcaaaccgggacactcagtgaccctaagatcaccggacggcgtttgtgatttcctgtctagttctgctctcacttccctcctctcctcacagctaagccatcttaactgctacttacagatatggccccacaggctctgaataacctcctcagtgctttccaaacctccttgactgtgggaatcacctgggtgcttgccaaacccagattcccaggctgcacttttggtaattctcatccagaggtttgcagtaggtcctgagagtcagtgaattcaccaaagccaggggagtcttataattggagaagtttgggaagcactaattagcctacattcaaaggggtatgcaagtactctagttcaagaaccaggaggctcagtataatccacactcgctgtggcctggcttggccactgggactgtcagaggcattcgaaccagaacaacttcatcttgaataggggctaggtaaaatgaggatgag

SEQ ID NO: 45952 - DNA, 1318 bp, Homo sapiens
ccatctcggcctcccaaagtgctgggattacaggcgtgagccaccatgcccggacgagaacagttttctttaggctttgggttgctccttttcctttttgctttcacaaccgaaatgcgtgctcagagtgatccaagatatttgaagaacagtggcagcttggaggtgtttaatcaccgtaaattcgagacggcagaaaggcgtccccgcctggagccccgggcgatcgctcactctgagcagcgtcgcccagcggacagaggcggctggtgtgttccggggtctccctcccttcccgcagcactcggcgcccgcaagctgccacctcccggggcggccagggaaactcagccggctctgggaggcgggggccgcggtcgaggggcgccgctattggctgatcgggcgggggaggaggggcagggaggccgtgattggcggggacccgagctgaagggggcggggccgctatatcagcagagtccctgtcgcagcgcaggcagttgggctgctggagtgcggcgccaccgcggaggacaggggcagctggcgggcagcgggtgagggggtggcggggacgcgagtggcggccgcggggccccggacaagggtccgcagagctgcagccttcgagggccagccctctccgagtccggggctgggtcccaccagtgacaaggcggcagccccgcgcacaccaaagagaaggcggctgtggcggcagcggcagccccagccatgctgtgttatgtgacgaggccggacgcggtgctgatggaggtggaggtggaggcgaaagccaacggcgaggactgcctcaaccaggtgagggcgaggggcaagaaggggccccggcgggtcccgcgaggccgaggggcctcgcagcgacgcctggcactctggcgcgccccctactaggggccgggaggcactgcggcggcagccggggggagcgcgtcccctcctctccacgggcgtggggcgcgcggtctcctcctggcgcgcgtggggtgcgcggagaaagcgcgcagcgggggtccccagcgctgagggccgggcgcagcccgcagccgggatccaccccccagcgccccatcatccccccaacccagcactttcccggaagaaggcggctccgcacacctgccgcaggtatgtgcgtgatgccgcctgtcgggtccccgcggcgcctggcagtgccacccgcgtgccaggatgggatggagtggctcgaagcagtctcgggccccaggggttcttggcagacaagccgggcccttgtctcacgctgcttctcaggctgctgctctcaaatgca

SEQ ID NO: 45953 - DNA, 1049 bp, Homo sapiens
cacctgccaggacgtgaggtgtctttaagggcggtgatacgggggcccatgaaattctctacacgtcggtcccgttgggtggcctaggggaagttcacagtgaaactcgaccacagatgagcgagatccagtggccagttggtttagaaggaataggggtacgagggcgcttatagcaagaaaaggaaactggagctaggggagagaggacgagaaaaacaactgcagatcccggtgatttttggctgcgtctcctagtgctgataattgctgctgctttcgcttcgggtccagcggtggaacttcgtgaacgcgtctgaaaaaccagaacccagggcacaagttcagggtttcctttctgagtttggcggccttgctggcagtggggcttggggactcagcggtactggacagcccgcggtcccagcctagccctggagaagagtttcgaaagctttggggtgagagaggtgggggcgaattggaagcctcgggcatttccctggttctgcctggatgtcctcaaatcctaaggaacaggtggagaccggactggaaatagcctgaggctgggggaagggaggccagtccctgaaggataaactagttgcctgaaaggcagagtgccccggggtggtgtgcgctggtgactggctttgctgagagctggagaggaaggtgaggaaaccggacacggttgaaggctggggctgaaggagtaaacacgaggaggctgggccaacctgcacagctccgtccactcagctccacaaacaagaccataaataaatcccctcagcaaagaagtccgctgcccactccggtgccaggcctaactgcagtgcctggggctgccagccgagggcttgcttggattggggaagcctccgcgttagccaatgactaaaccaagtggccttctgtaagcagcagcattggctggtttggagcccggcaggactggaggacgtaggggaggaatgattaaaacttatcgccccagattgggtgaccctgtgcctgtccctcatgacctttcaggtgctaaa

SEQ ID NO: 45954 - DNA, 1092 bp, Homo sapiens
ccacgccagcccatttgcacttttgagcccctgacatgttgggtggcaggactggctttaatgaaggcctgttagagagcagcagagatgtgtgtttgtgggtgggggaggggactttgttactttatgttccctttcaggtcaggcttagacagggaatctaatctatatttggcgtattggccggctgtgccagactaagtgccaagtgttgttcctgggaggctgaaatatttaaaatatttatctctgctagtgaacaactggcctgggttatgtgtgtgtgtctgggtggataaagttggggaagatcattttatttttcattcttagaattaacgatggcaaagagctagctcataaaaaggactggaaatgaggggaagcgtttactgttaaggctgcccttttccatgaagagctctgtgttttgtgtcctgctgataggttttggagtgccaagaaaaacccattgtgatctcagccgggtgcagagtgtagcagctagccccatgcctgttggaggatagaagagtaatttgagaccaaggaattgattgtttcaagcctgccaagccaaatgttacagagccattagccacacacagggttgctatgggtaggtcccttcagttctctttcagaatgtcactataaacgtgctccactgaagtagaacccagagtcatcaggaaggaggtggagaaagggacgtgccactgcgtaggttcgtgcacttccagcatctcatttctcctcactgatggctgtgtgaggcctgtgcagtcatgtttatgacatcattcacccaggacgccttctggacacaaaacccggtgttgagaagcaagagaaatgtaaaggctaaagggccagagcggtcccatggtgttttctgacttaatgctgatcgcaaagtgaaagttgcctcaagtgaaaaaaatgagaggagcatctaggtaaacactggcagaaaatgactcttgctggtgtaattcatgaagccagggttaatgtaggtctaagttactgcagaagcataagattcatacctgtgctcctctggccagttccccttggggaagcacccac

SEQ ID NO: 45955 - DNA, 461 bp, Homo sapiens
tataaactcctaaaaatacatcttaaacctagggcaagaaaatgggttgcttttcctacacccccaatcctgtgcttctcagtttgaatgaacccatggctgcctggcctgtatatctatggacaaacagggcacggtttcagctttaaagaagaggaagagcaggctgatgagcttgtgccaggactggaaaaactacgtatgcaaacactgaagagggcagaatacctgggtgtgaggacagaggttacttgggcatgtcaaggattctcaaagtgctgactcaccaatctccttccagctttattacatcactaaactggaaggcctgtgtggtgcactggcagaaagcacttcattttggccaagcattaaaaacaggtccaaacccgacatgcttggagtatctagaatggagaaaggtggattggatgatagctataattagatgcctttatggt

SEQ ID NO: 45956 - DNA, 1017 bp, Homo sapiens
gccatgattgctccactgcactccagcctaggtgataaagcaagaccctgtctcaagaaaagagaaagaaaacaatgttcagaataagggaataaatactgcaaccatagatggcacgggtaaagccacagttgaaatcctgctgcaaaggcacgtgggaaggatggggcatgtctagggggagtgatcagttgcgcaagaggtctggaggcaagcagatgagtaacagctgagacaactgggaatgagtgccctggggaagaacagaaaaagctgcagcattaggaagcaatgagaatggttaaaaatggactgggctgcctcatgagtcagggatctctgggtcaccccaagggtcaggatagaaactcagggatatggggtaggggtccctgccctggttgggtgttcgaactacttactctacatttttttgccattaggaacattctgagactgtgattccactctgtgtcaaggtggctggcttgtcatcccagtctactgtcacaatttcttcttgctgtgtcctcagtggaaactgactattgaccttctcttccatgtctatctaagcgtggagcttcatggggcaggcctcttggcccaaaatgaggaggctcctgaaggggactgaaggccctgtctagagacatccaggccagaaaccaccagagaggcgagctgggacctggcacaactttgtagaagatgctgtctgagagcctcgccccaacgcgctcgggtttcccttctcggctctgcacccctgggacatgggatcttgctcttcacggaagtgtagtgagtgagaagagaaaaagcaagaaatgaaagctcgtaatccaagctagaaggagtccacacgagggcctaaggacataaaaaataaataattttatgtatcttaatttttatcatgaataaggaaggacagtgggttgaatggtagatccctaaaagttatgcccactcagaacctgggaatggctttatttggaaaaagggtctttgcag

SEQ ID NO: 45957 - DNA, 674 bp, Homo sapiens
aaggcctctaaacattcatatccaattatccaaaactaattaaagattgtcttaggctcaatctcaaggaaacacctcggtagtctctggatttactggaagaggtgtgtatttacaaagacaacaattttgttgaaaccagcctaaatcaatcgtaggaaggacaaggagatcagctgtacacatcggccaagataagaattctctctgcaataaatgtttgttttaaaattaggggtatgactcacactcggtgaatgggtggctgacttctgaccctcaaaagatgaatggctcattttgaaaagcccagcaagtgggaagcctactttctacctccactgacttcagaatgaggctgcagtgtagtggagcccaagatggccccgagttgtttccagtcactagcaagatggacaatgggatgactcgctacctgcagctgttttcaataaaaaagctgagtaattacagcagcctctcctggggctcacatgcggcccagcacaaagccaatggaacattaaggacactgaatgagctgccagaagcccttcagcattgggctgccaaactgctcctcctcccccagctcagcgtcattaacttaatcaggtattcattcaataaaaaaaaattgacactccctggatgtaggcaacaccctctgaatg

SEQ ID NO: 45958 - DNA, 697 bp, Homo sapiens
cacgcccagcccctcacccacccttttgatgggcaacttgagctgccctctcctgcttattcctgtaactgcaaacacgtcttgctccaaccaccacttcttaaaactgcagatgaagggctgactctgggcatgccattggttgggctcgttccttccccgcgaccattctcctcctgagagctctgaagtcattacatcgaagtaagtaatttagacacattgcctctaatattcctcttgctcacatctgtgaagtttagcaaataaagcaaatgtctgaatttcctatctctggacatacagggaaacactgaagaagtgatgtcctctcttcttcctacatttcctgcccacggcactctttgcacaaaacctcagtaaaaaatcgtggcacaggtcacggattttcttcctcctccctgcttattctatgactcagaaggttcaaagcaaaggtttttgacctaatttggccttaagtcagaaaaggttccactgctgtctcacactgagtttcaaagcaaagaagaaatggaacagggctgtatttaattctgaatataatctctttgctgttggcaatgttatgggaatagtaatgaatttttgctttccatgaataaatttttcagaatctaaagttgaggctcacataattgttagtattttccccacagtgtttttcaattttcct

SEQ ID NO: 45959 - DNA, 1078 bp, Homo sapiens
tggaagagcaacaacaatttgaattaaggtagcctatttttctttataagacactcggaatacctaacaggccttaacttcatcaatctccgcaccatctgtcagaccttaggttacagtgaccacccccatgcattaatcaagaagaggcaaccaagtgtgtagctttgagaaaagttctgctctttcagacttgactgtattattaaaatttctaaaaaggtaaacaacaggaggtggttttaatcacagtgttgactttgattgcatacccatgtccctggcagcttagaatggttacagcgcttaaggtaacatacaaagtgcagatgagtaagaaaagaacctgacaaaactcagtgaaataacacgcaggtggcagcatatgcacacctgcgtcttcaccccacttccaaaaataagaagattctatttttttttactgtctactccatacactctagaacagattacatacatatttataaagagaaatgtattgtttcaatattttatgcaaaacttcatgtaaggtcatgtgtttgtacagcacaaaacatggaattgggtatctctccagtcacctataaagctgagctcatcccttcttctggcacttgttctatactgtgttctggaagccagaccagattgaacacagcaaaccatatcttcctttcagtatagaatgcaatgagtcagtgtttatgcaatgatctgctattaaagcaaataagcagaatcaggaattccaaaacatgccatgttttcatttccatttcacatgagtataaagctcaccaaatttgggcactttaaattatgaagtctcctatcacacacttctttatcagtcctccacataattgtttaactaagactctgataaaaatgtcaaaaatgcttgccatggttctcagcagcaaacaaatgcctgcaggctccgagcatgccctggggtttttcaaaccctctcctgtctttgaaaatgcatcccattcagttagcagtgctggtgataagacatggcacgcagagggtctaaaccaccacccctaaaggtgccagagcagaaccc

SEQ ID NO: 45960 - DNA, 1105 bp, Homo sapiens
caggatggtctcgaactcctgacctcaggtgatccacctgcctcggcctcccaaagtgctgggattacaggcatgagtcactgcgcccagcccaaaataactattctaacctatcctctcctcactacttacccccactatccttcacctgccaacccactctaagtctgttcatttagacttctacccattcccatgcagaaaggaccagttcagcaacagcagggatgctggcaggtaggttttagaaactcttaatcacagggctaatgtgttgatccagcttaaatgtatagctaatgattcattccacttttcattttataacaagggtttttttgcatgcagattttatcatgacgcttgctttctctcttctcttgtatcaagcatcttttcatcttcagctctgtcccaccccactgctgaattttttaaaaaagaaaaaagaaacccagccaactagctcagaggcctatgtattttgctctgaacttcacactgacgatattatacacagtcatggcagtgactgtattatacacggtcatggaagttatggagaattggaatctaatgaaaagagataagagaggagcagagagataaaggaacccttgaaaatcagccccaatatctcacccagatatgggtggcctcagagcttattgatatagactgtgtctctcaccaaagggcatgccatttgcttgccatcatttctttaaaactattagtcactctcacaccgatttacctttaaacaaggacattctataaccagggatccacctctgtggcttagtcatcggatcagcctcaaggtcaccgactagagtaacctgatgacaattacctcattcacccactatagaacagttctatcaccgatcaatacaggacacctctgcacaacatcaacaaagccttctcaagggggcaccctgcatgcatcagaaacaaattacacccttagaggcagatgacacaccgaaggcagaaagatcctctctgcaaagcaaagcctttgtttaagtctgagaggagtgccaatccaacctcaaaaaaaggagaaaaggagaggaaagaggatccatgccacaga

SEQ ID NO: 45961 - DNA, 2078 bp, Homo sapiens
ttctatgccttccagatcaacaggtctgtctcccctggtttctccagtttccaatttcagatgcacctcttgcctccttttagaatggtccagttcatctcccctgttcccccaaaccagttatgatggtgttgactgtatctccctgagaactgtaaactccattagggccagtcttttgtcaatcttgttttcctccattatcttcaatgcccagccctatactgggacatagctgcccctaaaaaggcctttgctaaattaataaatgagtgaggaatgactgaatgggattaaaattaaagaccttgtctcagtttctcacaattcaaaagttgtgctttaactttgtgctggcaaaatcctaagacaccccaaagtccccatgggactttgcgaactaagatttcaacaatgattctgcctggtcttgcagataggtcttgtacatgaatgcaaaaatggtgtgggcaaccatgtgcagtatatggaaacaaccaaaaactgctgaccacagatctgaggtcacagcacaattaatatggttaagtatttcccactctcctgtctccctagagaaatttattctggtaagcccttgacaaccaacacgtctgcatttctgcacaccagccagtgatccacagcaagagaatcctttcttcctctctgagtctttattgattttgtagtttgggaggaagctaagtgctattcaaataccaaatgttccatatggtagtgttattaccattcccactaccgttacttgaggccttctacctacactcatgaggtgcctcatcagaatctggcagaacattatgaactcttttcctgacctatatttgctaacacatttgttgtcctctctccctctatgaacttattaattttgttgaaataatatacatgtgtgtataaatccaagttttgttttcttattcatcctcatagtcacaggggaatgatttatgacacattaaggaggtattcttaagctaacatgtcttaattaggaattcagatattcctcttctgctgagaaatacagagctgttcaaattagaccagaaattagggccaaaacgaatgcagcgtctacatacacaagctcatagcagggtaaccagtgaaaggcagaggctgaagccgtacacgtcgttctgtgtttgtctccttcatgccaaatgattctttgaccacttttcctttcacttttcaacgttacgatggagccaaagggtcaagagattcacaaacctacagccttccccttcatgcatctgtaggataaagcatgcgtttcctaagagctgggtgtggcgggggggtctcttcatctaccttctctttcatttatttagtgaaatgaagcttatttagtaatgacgggaagagatgagccaactagggcagctcacatatggtgccagacggtgagggactctgtgcccaaggcacttgctgtaccacaggagctaggcagccctggctgggaaggaagctctgctctcacccaacggctgctccaagggtgcccccagccaggtgatccagacagccatggtttcaaagctctgtgaaaaatgggtctctgacttgaaaacttgaatcaggaagtctctccaggactgggattactccactaatacaaattaaatccattcagaagtatgctaaaccctttttgtagatactagaggaggatgaaaagagggaggaaagagaggcaaagtaattttggaagattaggattatactatggttcatgccaataccctacatttgtttacttctatattgatcattttctcaaatgattaaatactcctgaaataggagttttaacgattttaaacatttcatatatattatttgcagcaacacccaagggagaagggtactattattatccgaattttacatgcaaagtaacttgcccaatgtcacacttcaagaaaacagcagagctggaatttgagcccaggcagcctgaagcttgcaatcttatctacagcttttccatcatatggcactaacatagttatatttaatcatgttcccgatattggaca

SEQ ID NO: 45962 - DNA, 1821 bp, Homo sapiens
attttagaatgtttactcaatggtatactaatcattaataactatacggtagaaaaatatctgttgctatgaaagatgttcagaattatattgttaagaggaacaatactcttaataatctctactacttctacaatctctactaccatttgatgtttgtctctctaagtgaatttataaatctataaatttataaatgccttcagaattatcagcaatgccttgtcatctatcctaactagtgacctcaaaataagtagaagttatttcctttcccataaaaaagcaagggttccatttttataaaagagacagtaggaaaaaatggagtctacatgaatagacatgtgtatgttgtgtgtgtatgtttgtgtgaccagatatgtatacacccccaccactatcttggggactttacaactcaatgataattattttcctttaaagcttttggagatgtttacctgtaccatgtgctttcatcacaatggagaaccataagctatcagttccttgcagcagatcttttcacgaagattttgcttgagtagaaagggtggcagtggagaatctcagtgtaaaacgcctagacctgtaattataaaaacaatattctcactgagttaggctgcttctgtggtcttcattcacattcgctgaagtcacagaaacgggaaacatcatattgcataatctctcacacacacatgcacacacgcaagcatgcgcacacacacacacacacacacacaaggtttttaaatcagaatgtcaaaaactcagcaggcagagacacagcaggtccctatccccagggatgagtgggttctggccaggggttgcttcccaccccatctcctccccttgaggacaccactatcaaaataatcccgttcctgcccctccttccctgctcaatgattctaagatttctaagaaataacaagcagtcagttcttcatagaaaatgtcagaaacattgctgaatttgatgctctctttctctaagactccttctagccacaaaattatgcaaattcagtgcatgtatttaccattccggcctcactttcacttttgaaactacacatgcctctttgttaataactcagttaagacatgatgtcagtgatggccaaggtcatcacgaacattgattaaacatttactatgttctgggccatgtgctaagggctttacacacattgccccactccactgcagtctgtgaggtggccaggaatcatgtttacctctgcattattgacaagaaaactgacagtaaatacagccaacggatgttaaagccagtacttaagccaacagttcacagaggtcatgcttaggattctagtactataccatctcttcaaggctgatctttctaccaacacttctgtagttagtattaaaacatatcggggctggggcatggtggctcatgcctgtaatcccagcactttgggaggctgaggtgggcggatcatgaggtcaggagatcgagaccatcctggccaacatggtgtaaccccatctctactaaaaatacaaaaattagccacgcatggtggtgcgtgcccgtaatcccagctactcaggaagctgaggcaggagaatcacttgaaccggaaggcagagtttgcagtgagctgagatcatgccactgcactccagcctggtgacaaagcaagactctgtctcaaaaaaaaaaaaagtatcaaatcactatcacctcatttttcccagagggttatgtcacctagtcttaaaattactattatttgttttggatttgactgtactttgattttaattcccaag

SEQ ID NO: 45963 - DNA, 1272 bp, Homo sapiens
gtttcctatcctgattcccaactcacaaattaaagtttcggttatggactgcttgttgtgataaaataattttagtatgattccttctggttggaaacatcttcctaccagatttaactacaaaactgacctctactctggaatgttcaactggccaagaaaagtgttacatcaacaccaatcactttttttttttctattccatcacaagattggggatatcattgtgttcctttcctcttatgtccactgaaccctctgctgtattttgtagcctttcagatctaggcgtttgtctcattttgctgtttcattttattttcacttaactagttaacactttttttaaaacaatgaatgaatcatgtctgtagtggccactgcgagcaaagcaccatgggaaatgtaaaaaggaacaagaggttgtccttgtccttaaagatttccaacctgagtcagggagacaaacatgtaaacaaacaatacggtgtgaatcaaggggaatgtgggtgagcgctgagagatgacgagcaaagaactctgctggcagagagctcccagctgcaacacaggcattaattacgtgtgctctgggagaggggagtcttctattttttgattcccctccccagaatcagtgctatttgaaaatcccacgtaggtaagaggacagggaggcatacaaagcctagccatgttatttttacaagtcaaatatgctactgcgtttatctaatacttagataaaaattatttttcaggccattgcttattgaattttctctctgtgtcctcatcattaggtcaggagtggtttccagtaggtgctccacaaagagcaaaaagatggggatacaaaacttgtatagtagaattttttttccaagtcctatttatctcatctgttttgcctgtatcttgcttcattcacaccagaaaaagctgacacatttgtgccgttgtctgctgaaggttagtcttcatgaaatttaacatgaacatttgtcctttcaagcagctaattcctttttaagcagctaaatgttcacctatgtctttcacgggatgactaattgtgaatgtaagcaagacaactgatgaaattcagatataattgtttacaattttctattactgctcttaattcattctgtttctgtcaactatcataccctattttctatatttacagtgcacttgaaattgtttatgcaacttaaaaaaattaaatggtcatctgaaaagtgtttggtgcactcgaatgagattttt

SEQ ID NO: 45964 - DNA, 421 bp, Homo sapiens
tgtgggaatgctctaacttcaatacatcaaagacgctgctgcacacctccgtcttttttattcccattagctcacccttgtctggatgaaagagctcagtgaatcaactgcttctgttgaactgtttatatatttttcaagtcatgattaggccattagtcactgagcatattgcacagtaaactagagtaactgccattatgcaacttcccaagaacatacagagagcatttacagtgaggccacagtgccagcaaaatgtgcaatggagactatttatcagcaattataagaactgtgcatttaaatgccaaataaaatatacacgtggcagatacagaacttgagggggaaaagatgcatgattaaagtaccaatatttgctcttctgaatgtattagagcctgaaaacgaaagtccc

SEQ ID NO: 45965 - DNA, 1933 bp, Homo sapiens
ccagggagttgatgagatctaggtttccaaaacaccacgaaaaggcatcttttgctttctcccatctggccattaaaaaaaaaaatagttatttaccaaagaagattctttttgtaatacaatcaatcacttcctcctgtgtttagggttcaaatctagaagtccatatgtcagtctagcttagagcaaaatgtagctttcttcaccttggactagaacaacctatgagagaaagatggtgcccaatgggccagcacacagctgctttctaaattgacagccctgagcttctccatggacagtgttccaaaactaactgtggctgttaggataaagagggcagtttctcagcttcagtgcctttaaggttatttcaactttccacctctgttaactacgctgcagaaacttttgacactgaactctccttaatatccataagccagagatgttcattagaaaaatttctcactcctcatcagacagctgaagacctgagtcctttgtcttcccctattctggagatcacattgaagggatttttgggctacctgaaagtgtttatgacagacagactcttggattcaggcttaggacaagcaaacctttcatatgagtccttaaaaacagacagtgctctgtttgtaactttgaactccattctagtacaaacatgcttggcaactagtgccggagggttaaccagagagttttcttcctggcaaattgctctgccgccaccatgggtattaacactccaggatccctgcaactttcccttcttcctctattcctcatcccctgccctgagatattatctgtgcccaagctgcaggggttgaggtcacacatctggtgccaaggagctgtcagtgcctccagcagtggcacagttcatggttcacggttcttctcctggcccctcccttggtctggcatgctgacagaaaattgttctttttttcatcatttgtctgtgactcagaggcagaccatggggccaacaaatccagcccatgatcacgcttgaaggcacagggatatctagaagtcatcccccaaacttcagggactattgtcaaaccttcttgggatacagacatatttctcagatctcctttggaaagatcttagacttgcttgacaggggtccttggagatgatcaaatccataaccctcctctcattttaaagttttctttattggattctttatgggagaccaagttccttattggattgcttcctgtggaccaaggatgatgttttctagggacttattgaaacttgagagtcggaagtggtctgaaggattgtttgatttagtggtcctgtgaactgacattgcctaatagctgttgtaacataaagattctcaggtctcagccccaccccttacccaaacccttggctaattccacagaggcctgtctcactctgtcgcccaggctggagtgcagtggctctccagggttttctgaagccacatttgaaaaccacttatataacccaacttcctcattttcctaaggctcagagaacttcggttatttgccaaaggccgcacaacagttaatgacaggcctaagacttccacccagttcccagcgtgctcaaccagtgatggtctttgcatttactttctgagcatttagcgttcagtaaaacctcaatcatttactctctgctaatagagataatgtattcttaatgaatatataattcaatttccttgaatgtattatataacctataaaattttaggatcttattagcaagttaaatgtctcctttcttaaattagggctggttttttttttttgaagaattaaggattcttcattaattcgccttcatgttctaagagtgataagagacttcacgggaaacaaatcagaagcacaagtgagtgaaattttctttaggacaacga

SEQ ID NO: 45966 - DNA, 681 bp, Homo sapiens
tatgtgggaaggaattcaaatgctttcactgttatgtcaggtcaatctgttaagtgtattgtaaatttttgccacatcagtatcccactttgatcactaatgccatttgtatattagcttgtaatacacactgatcataaagcaataaaactgcattttgctaaactttaaaaatgaaggcttttgcccaatgacactgacatcctcacgccaccacctccccgcccccattattcagaataagtggagtgtggagcattgggttttccctttctggggaggaacaaatgaatgagtaactagtgagggcatcttagggagttcccccgcccacagactatgaggcatcttgatttgaaaggaatacacaatattgctgctgcacccacaccacacgcacacaaaaacacttttaaagttgacttcttacataaaagccagcagtactccctgctagaatctgaagaaaagaatattattattactattattattttactggcaaggcctttcagggggttatgcttcattcaattgagcctaattgataaagctaacacatgtttacaggtaataaaaatgaagtactatctacatggaaacaaatcagggagcagaggaaccagtcattattcattctttaaactgtaaaaactaaaatgttctctaagcattatcaag

SEQ ID NO: 45967 - DNA, 2389 bp, Homo sapiens
aggaagctgaaatgaattttctttagagcagctcatagtaccaaccactccctgcccctcccattctcactcccagtagctgggagatgatgcttcattgttctaagcttagacttaatacaacactgcacttttcttaaacaaataaaccttttgctaaagtggattaaaacatctcaacagctacggcacacatgcagtcattaaagactgttcagcatatagacagataatttccacagtgtatggtttaagaagttaaacagaaagttaacagagaaactgttcttgaagtatgagaatgattaagtggaaatgttaaattttcaaggcaaagtattttttaaataacctcaaaaattaaaaaaaaaaaaaaaaaaaagatcttcactgaagctaaaaagacatgaccaatgaaggaaaagcattaaattaggagtctggagtctggttttcagcctcagccatcaaacaaacaggctgtgtgttgtaggagtggtcatttaaccgcactaagcctcaaatgtttcctctgtaaaattagaacattaggttcaattaaagccatttaagctttaaaattctacgattgtccgtccaattcaataaaataaactgtatttaataatacctgctttttcaactaagctaattttttaaaaggcagaaaatctaaccagaaaagaataaaaaatgtttaacttgtacaacataaactttgtccagaaatcagtatctgctcttccaaagaaaaatagccttttgttttctattgttcagtgtacagcttaccactaagcaaggaataaatgtggggctacagttcatctgtatgtgccagcatgttactttcaagggttcagtagctccacggcagaaagaaacttctctattactcactattaaactgcatttcaaaacctacaaaaacagctccaaaattaagccagcaaaatgttgctgtcatccatctgaacctgttagaaatctcaagctcgtcatagaatctttgacctcaccattcaatgttttacaaattgagtaactatgtccctgtcatttactactaaaatgacaaaaataaaaataaaaggtaaagagaacactgaaggttaggagtaggtgaggatgggaaaagggaagaacaaacatgtccggctgaattcagagctagattccaagtgggtttcagggaggactgaagtcagagaactgcaaatgttgtttcaccatctgtttattcacagctttacctttgactcatcagagtgaggtctgaaaactgtttgtgggtcatagtaaaaagagttctgaaggacaatgtgacttccagggagaggtaagccaacctacactgcatgagccagcagagcagacactgaaaggtgataagaagaaaaagaagcacttgtttttattaacgtaagacctcaccaacttcctcagacttccccaaatgaaatgtcagactcgcatgattctgagtaagaatcaactgtgtcccttagaagaaaaacatcccaaattcagtgataatcgtgggccattctttttgaccaaatagattttgctcacgaacatttttttaatgtaaatttcccagtaggaagcaacacagtacagagttttaaaaaataaaattcttaatccgctcaggatgaaacacactacttaaaataaactgaatgacacctaaaatgatccgctgaatgaaaagaaaagctattccaagtcacaaaataaactattattaagccatggaagcttactctgtattctcactctccttttcagtgacatttttatgaaacacatgtggtaggcagtttgtgctttgcagcagagaaaactcaaataatgctttcccaattaaaaaaatcctggggtcttccaggaccggcccttccttgttctcctccatgctggtcaaactggcgatctggacaggctctttggagcaaggtgctcaactcttgaagaatagtattggcaaggacttggggatgtacttctctgcatctggggtgcagaaaagataagaacacagtccctgatttgcctctgcccctgttcttatgtttctgctggtgcatatcttgctgtgctctgcaacccccaccagccgaccccttacggccattcctactcgctgcctgacaacatgatcaaaggagggtggaagaggagagccaagtttaataaccttaccaggagatcagattgtctggggccaagcagaagtcctgagatagctgctgaatcctggccatttacagagcagcacaaaactagtcctgttccttttcctgccgcggttgccatggccgacccaaacaatataccccagcttcagcctcctttggcttcctaaccgccacccacagacctc

SEQ ID NO: 45968 - DNA, 1835 bp, Homo sapiens
gatggaaatgtcccatatcttgattaggatgctgattatgtggatgtatgcattcatcaaaactcattgcgctgtacgcttaagatgtgttgatttcactgtatgttctccctaaatagaaactaatttattagtgaaaagaaagatgtactttcttttcactattaataataaactaatttattagtgaaaagaaagatgtactttctacctggagggtctgtggggataacccctattccgtacaaaggaacagtgaacatgcttgagtgaaaacagccacgcaaggcagacagcaagtgagaaacgcctaaggcaggggaagaacggtggtctgctacagtgagaagagaaatagagaagactgagtcagaaggggaaggtatacaccaaacaggaagacacgagtgaactgaacgcaagaagtagaaagtaagagacctaaattcgtgtttccaaataatccagttaccacattacactcaaaaaaagaaccaaaggcagttttatttggaaattgttctcttcctccctcgacacctctgttaatcaaattggaagctaggggagggaactgagtaaaggcagggacctgaacatatccctccgtttttgctttttttttttttcttttgccccttaatcagccaccttcaaaacagtgcctttctagggctaacgtcctgcctgtggcatctcatcactgataaacatcaggaagtaactgccattcgccatttatagatttatatgtacctgctaggataatgagattcacaatctgttcattcccttagtaactgaatgaaactcacaaatggctacgagggagtatcctagttcactgaagcccaagctggcctcaggaaccagagataacatttctcctttttccagctgaattactaagacaagcaagagatgactcataataagcatagttgatgaagcaattaatgccaactcttcctctctgagtcatcccttccagtgaaagaatcgctaggagtattaaccctggctgaaaaagtagatgccatgtgagcacattaaactttaccaaacaatggagtggtaagggaagagttggagggtttctgtccaaactatctgaatctagagggaccgctccatgaataagtttcaatacaattgcggtaatcagcaccgcttcctctatttcaatttacaaacgctgggtttacaggaatagctttctgagacattcctataaaattagcttactcactgaatttttaaaaaggagaacaaagccaaaggacgccattggcctctgggggcgtatgtgtgtgaacaagctgatgctgtgtagaaatgatgtgtcaatatcatttgggctacttgtgtgaaaactgctcaatccaagagttacttcttgtttctactgactgaacatgaagagagaaccaaatattccagacagggaaagaatctgagaaaacatagagtggagtgatttcagtgtgtgtatatgaagaagggggagcaaatataaaatccaactggatgcttttcatcctccatgcagttctccacccgcttactacccctcacttaaagtgtggtcctggggccagcagcatcagtttcacggagggatttgtcagaaatacatattctcaggctccaccctagaactattaaatcagaacccctgggcctggcgcccagaaatctgtggtctaaacaagccttccaggtgcctctgatgcaaacattcaataaaatgtaatcgtcaaatcttaactggtccctggccgcgcgtagtaactcatgcctataatcccagtactttgggaggccaaagcgggtgg

SEQ ID NO: 45969 - DNA, 6071 bp, Homo sapiens
tttacccatcaaataaaccgaagggtgggcttaaggggggcttctaggaactgcagcctcctaaaaaacccaaacagaaatgtctcagctaacactgttgaaaaagtaactagctgtgcctaaaaataaccaagtaactacccactgctgtgtgcaatatataacaatgatgtttaaatattaaaaacagcctgcattataaaacacaaatgtcattgagatgtgactactagattgccaaaggagaacttatttgcatacacacattcccgtgcatgcacgacaggatgtgcagggagaaagccactgtaaggcattagtttttattctgtgggtgtaatagggtcttctaattttgctaattgtatcctgtggatctcgcagggaagctaagaatctcttcggggacagaaccagtttggaggagtccctactgcacagcatacggtaaacaaaataaaaatagcttgcctttcttgttagccacatcgcgcattatataaccagcttcttccgactgttttttttttttttttttttttttttttgcccttactactcttcagcaatttccctcttctcaaatatttatattacccttttatctgtaggattatataccaagaaagcaaaacaaaacagagcagccacgggctcgaaccgaatccccgccgtccttagaaacggatttttttttgttttgttttgttttctggcagagtctcgatcaccaccctacttccacccccactaaggttcttgctcaatctccctagaaaacctgaattgtttcatccctttcagtcagccccctacgtggtctgaaacaaaatgaaagcacaagccacggagtttaagaaggcagcctgaaggcggggggctgaagaggggtcggggcgctgcagagtcagccaagtagccaaggaagggccccctccgcgtcgcgacggccctcgccccccgcccggcgcgcgcgcgcacaaatacacacacacagtcactcacacactcactcacactcacgccgcgctccgacaccgcctcacctctcgctccgcccgtccggcccccttccctgccccctgcgggaccggcctgcgcgcagcactggaaccacgtaggaggaggcggcggcgcccccgggagtggcagagtctccggcccggcccagagtgaacgagcagtggggctccagggcgcatcccaatccccgcagcgcctcctccgcggcggccgccgcctcctcctccttcccctcctcctggcttcattcaccctcccagcagccgcgcagccgttcactcccggctcagggcagcgcctgccgcggctcctcgtctcctgccgcgggtgctggcgggggcgccggcccggactggggcgctcgcgggctcccggctccgggcggcggctgccgctgcacatgatcaggaagcggccgcaccaacagggcggcggtggcggcggcggccagggccgtcaccgccactccagccgcgctccaggcacccgcacacccgctacccccgcgcggtccccgaggccacccctctgcgccccccgcccggcacccggccgcgcgcaaagtcccgtcccggctgcaggagcagtcccttccccgcccgcagccgcacacccggcgaggccggccctccgaggggagacccccgccccagggcgccgaggccgggcgaccacccgcggagaagtccagccctccgtgagaccccctctctctcaccgccctctccggggaggaggaatgggaagagggcggccgggaaagggaccaccccccaaccccagccgccgcctcccccctgcgccacccggagggaggaggacatggctctccgcacttgcgaccggaccagcagccgggggagcggggcgccgccgccgctctccccgcccgcgccccccgcccgggcgcgccccctagcccggcgggcgcccacccagcccctgacagcccccccgccggccgcccctgcgcccagagtgggggtgtcggcccgggagcctggagccggggacggttgtatgtacacacatacacacacacacacacacacacgcacacacacagaacacgacgcgtcgatttccttcgctcctcttccagctgttttccgtgcagccgattggggttttgggtttgtttgctggttgttgcttttgcccctctcgggagatcgggggaggagggattttaatctaaataaggggagaagggaatgggggaggggggaaagaatcggaggaggaaaaaaaaatagtcacttactgtaaagtgtaaatggatctggggttgcgtggggaagggggggcagagggagagaaacaatgtcttgcggctgctgttgctctggctgctgctccacggggcttgttttggatccccctgcagtgaaacaggtcctgtacggctccgccactgtagtagaaatgatgtctgcggtatactctgctctctcctcctcctcctcctcctcctcctccccctcctcccgctcccctcccctccctcctccctccgcccgcccgccctccctccctccctcgcgctctctcgcgctcgctcgctcgctcgctccagtatgtaaatgtgtaatagaagccaaatatggagcagttggctgccgccgccgcagctcaaggatccgacttcatgggggtggggggcaccctctggcgggcggcccggcgagccgcacagagcacggcgagcgcaccgcgcggcggccggcccgcgcccttaacccttcgctgcgcgccgcccggggaggcgggcacctttcccaaagagtggctcgggatggggtgcgggggaggggagacgcggaccggagggcaaggttccttccaggtttgggaagggggcggggagctgggcgatgaggtaatttgagcggtgacgggtcggtcctcgcgcgcctccctgggtccctgcacctagttggaggggactgaacgacaacggggcgctactcaggcaacctgggggactcccccaagggctgtcaggcttcagctgggagccgatgcaacaccccagcggggaggggaggtcggcccattctaatcccgacgtgtccttggtcccaggcgctcggagcagcatctgagagggctcactctgatcatcagctgcacgttaagccacaaaccggcgtcgcttcggcgttccggaacccaggcctgggggccgcggggattgcctctgcgtgcaactccggaaagtttcaaggggtcccccgactgcacaggtaccctcacctttcctgccggcgaacgctggcgaccgcccgaccctgccctctttctctcttcgcacgcaggtccggaaatcggctttgatatggaactactccgctctagcctggaaaggagacccgcgcactcctctcgcagctaatttcggatcattaatttaatcggaaatgaggtaaccagtgtaggagacagagaaagcaaccggagcatcaaatggcagttctcgagaatcgacgaggaacttaaatctggactcagggtttcagtgcggtctccgactcccaccaccccgcccctccgcctgtctcgccgccaggtgtgacctccacgcgaaggaatcttcttcggatgggtgcaccttgccaacaggtgtggcacctggaggactaggaggcgcctccagactaagggcgctcagtgcggcgttcttgttgcagatgattctggaaggccggtaggtgtcgggcgacatttgaccttcttcaggtgcttagaactaagtgtctggaaacatgatcctttcgcgtaagtttctttctgaaagccaccaatcttgactgtaagctgtatttgagagatcttttggctgagtttacttatgacctaacggttagtcaccaactgaggcagggcacaggatgaccaaaaaaaaagtgtcagtttttacacaactctggcctgcaagagcctacgtgcttcataaataaaaataaacatacgagcgaggaaggtgcagagccccggaaatatttttttctcacatttttgaaataccatgcacatatatgtggctatttaagtataactactagtgttcactcttactcatttctacaacttttttttttccatttaaaaatcgattattgttacggtttaaacctcgggttggtctaaagtgacattgttggtctcattacagcctctagtggacagttaacatcagtttcctgaaaaggctctgactggttttgttttcgttgacaagctttgtcaaggtgaaggttagtacgtaagagcataaccgggtaaaatgtcccctcacccctatcctcacccccgcccccaacaccctgcttggcaaagacgacttcagaaaggagcagaagcttgttggctttatatagaaaagacgtatgctttgtgctgcaggtattattattactggactgtgaataaacagaaagcttctgctattcatttcagtttcagacagctttcataaaaactaaattcatctcaaatatttttataacagaaaatattggttgccatgtttttggcttaactgcgatgtttttattccaactcataatctgcaaactgtccaatccacctccactctatttttagacatcttacatttagataattttcagttaaaaaaaagctaatattgtaattttacgttggcacaagcagttaatttacgtgattttaacaaccttaaattaaaacacataattcagattacagttagtcaattaatttaaatgttctctcaaggaagctaaatatgtatattacccaaatggtaaaaacaattaataagaaatgtgtcatttactttcttagccattaagtttaaagccataaactgccaccaaaatctgtaactatttcttcctgcaagatccaacataaacaccatactcatgaaactgtctcattacctttagtactgaaatattttgttttcagatggcaaaatattaagtgtacaatcacaaataacaggcactgattctttagaaacaagactttctcgtgcaaataaaaactcaatgaaaaagggcagagcttccaagaagctagtagacaaatatatagtactatagtcctactcataaggctggtgttatgtttgtaaaagcataagtcaacctttgaaattacaggaaatcgataaataaggcctgatgagcttgactcgtatcctgtgtcatagattgcttaaataccatgaaaaataattgtaatcacatatctattttactgttttggtggtatctactcttgaaggtgttaaatgggccagcaagtatatattatataattacatattacacccttacttaaagtgtagttttcaaagtcgccacagcagcacttgggagctttttagacattcagagtcaagggttctaccccagacataccaaatcagaatctgcctttgaaccaggcccctgggtgatttctaaacacattatcatgtgaagaacactggtctataccacagggatcaacctaaataaatttgggcacaagtgcagaagttaattcctctatttatttcttttttgctcctttttagtaagtacagcccttattaatttgtgcttttcaatgaaaaattattatgttatatgctttggataaatactactgcactgtaagtgcacacatctgcatcattattgccaaaaaagaatgctctgctgaggaatgtactggggtcttgaacatgaacattttcttcatggcagcagagggagcacaagagtgcttaataaaaccagtgcacaggtctctccaaatcatgacagattttacattgtagtatatgttttcattggaagtagcctgttatgtagttcaaaatgaagcaaatcaactgagcaaacacagataggcttaccaggtcataacaactatgtaactgaacagattgaaagttgaataaaataaagataaacttctttagagttttaggcttgaattcttaaaagaaagtggacctcaaaagtgaaaaagatgccttagctttgctcaaaaacaaagataacacaaca

SEQ ID NO: 45970 - DNA, 955 bp, Homo sapiens
aatcgatacatcatagttattacaaatatatgaggcactggatgcatttcctctgagagccaatcaaattacaggatatgtttcctaactccccacacctattccagtttaaaagttgtagcttgagtaccaggagtaagaacacgtgaacccttcactcccagggctagcttttcctgctgtcaatttcataattatattgctccgccccttggcttagcacttcctttcccctcactaccttctcaccccaacccccagcaatgaatcatcaggcctttaaagagacttagacgacccagtgtgaacttcgctggcatcctgtacattcttatgccaaaaaaggggagttgctctaagacagaaactagccagaccctgatgcagatcttggaggcaacaagcttgggtgcttatctgggaagatcagcgaggagttaattttcctagatcgcaatggtgattcagaattgcatatcttagttcatgattgggtttttaagaacccagttcgaccctttgtacagaaaggaatatatcaaagggaaaaatgttggcagatctccttatgcaatcagggcaaaggaatttataccacattcaactctttgatttctccagatctggctgagggtggggtttccatatttgtgctttggcaaatgtgtccaataattaactcctcctgatatatgcccctagtgttcttccaggttatcatgtgcttatttgtgcatttattaaaaccagaaacatttttgccccttcattgtttaaatactgtgtctgagtaatacaggttaaatagacaacaagagccttgccttttaaagactttactccccacctaaagaggtgaaggagatatcatttaaataacattatgcgtgtgcatataccttctatatggaaagccctttcttctcctccctcctttttttttttttttttttgc

SEQ ID NO: 45971 - DNA, 1016 bp, Homo sapiens
ggaagaaagaaacatcaggcaccttcacacctgactttgtctcctctgtctctgtagcactgagtgggtagcaggttggcacagacatggggtgaaaaagttgagctaatctttaacttttttctaccactcttctcagatgtgccagacaatgaaaatagactgtgaccttttcattaaaacaaagtgaaagctgaaaggatgacacagttctccaaggtagtaacctgtaatgttgtaggcaccttgagtgccctcaaattctgtattatctcacctggcccttctctgcaggttttgctctttcccgtggtttgcccctttctactgaagagcctgctcctcacctattcgtgcaatgtttgtttttagcctgtgttctgaaatatcgatgttctagcagccaactcagaatatggcatagagtttgttctgggtgttctcctgtccatatcgattggatcaaagggagatccatctggaacccacttaatgtccttccagatggtaagcttgcttccagatggcatgtttaataggagaaaaagaaatcactaaacacaagcatcgtagcgctagggatggccctgtaactttatttctttcaggattcctcaagacattaactcttttttttggtcttagattttcacaggaaaagtttccaattctcagggtgaaattaggggcctttggagagttatgatgttatttatagccaaataccaatcatctataactgcgcacctgcttgtggtggtttgaatcttctcattttaaaagtttagataaattgataaaccattatcaagctgcacaaagggcttaggagcctctgttgtcaaagtgccacctactggatgcaagctaatatttggctgatcctaaaaagcagagagctttcagcaagcctgagccgcctccagtttatcatcaacttaaaaaatgatcattttggccaggtgcactttggctgggattctcaactgtaatcccagcactttgggaggctgacg

SEQ ID NO: 45972 - DNA, 1383 bp, Homo sapiens
tttggaacctggcctcctaagcaagtactaccagataggacacatacttcctaactcctttgctgctaccttggtaaatgtcctttgcttcagacttttcaacacacaaacttgtgtggcctggtaccttctattcattcaacaaagaaatacatattcattcattttttcattcattttatcaagggtatcctatgtgacaggccgtgggcttggaggtagggacacagaatgatgatggtgggcaaattttcattgaagcctggatcatccagctctgagccccttcttcttcagcacacatccctgggacagtgggttagtggaatttgcacctttgccctgaacttgcccttgctccatagatgacacagggatcaactaggggcaaccccaatcaaccctacaagctatgtgtgctccctcatggcctactggctgtcaactcaggaacgaaaggtccagacctcatctaaagttctcagggcctggatccatagacaaggtagtaggtcattcaactttgttttttctcctggccagtcagagattgcaggtatttgcacatgtagcccagctgccagctgaacagtgctcaagatcaaagagtgatatgtgacaggtccctgtgtggtcaccaacactggccgctccaatggccacaggccaagtgccctagcagtcccgtggactttggagtttggatccctgcagcccttagttacgcaaaaattgaaataaagattgtggcgatgtagctaggactgatgttttcatttgcagtatctatgaagatagggtttgcttagcagagttctaaaaatcctatcttctttgtatacttagttaaaaataaagcgaaacaacaatatccccaagactgggggtaagagacagctgataaatgcttacatttattaagaggatacacagttctcttcatactctgtaatgcagaatacacagtaagaagaattaatcttacattaattaagagaacacacagttttcaagtaacctggaatgctctataaacacctatcaggttcatgcaactatagatcatttttatctgtttctaagcaaacatttcttaggaagatttggttattttagatccacttatctttatatctaaaagggctggatttgatggactgattgcaataaagtccggctcttcactaattcagatgggttctcttgccccattatactgaaattgatgagttgtactgtagtcacagaaaatcagagagttagaaggtgctttgaggtcatttagcctccaggcagagctgttcctaaaactattttagacctgtggtggcttatatctttatcctgcgatctgtataatcattcctattaaatgttgccacc

SEQ ID NO: 45973 - DNA, 1377 bp, Homo sapiens
gctaggaatagaactctcatggtccagctcattgtgaatagcaacaacttctcccagtctcaattgcctgctcaagtatgcttcagagactgcctcttctcttttgtttgaagatgcggggtcctattctctagcttcccgaagatgtcctagttcccaaagcattcagaacactgccacctcctgcagtcatgcaaaccagcaggtaggagacgggggagagaaggaaataggtgaaataaaggagggagagaagcaggaggcattgtcttttgggttcccacaacctgctagcgggcactgtcccttacacatcccactcgactttcagttcagaaacagggcaaggctgcccttagcaactacttcaacgggagctatatactggcccagaaataataaagccaattttttgagtgcttgttaaataggcaacgtgctgagtgctatcccatttcatcctcacatcaaccacagaggtcagtcatattactctttccattttgtagatgaggaacccaaagcataaagaggggaagtcacttgctgaagcccacatggcccatgtgcctgtctgacttacaggtgactgatgaccagtgcactgaactgcccctcccgagagcttgggagcaatgaagcatgtttcaggtatttcacactttttagacaggcataggaggtgccctgctatttttgacacctctaagttcataatggacaatcagacaaagctgtgcaaaagtcaggtctgtggattattggaattggaatctgtcactgttttcaattgttctttttttttggacataacgctttttttgcccagaaagcgtgaagcccttgaatggacatggtgtatcattcccaggagctcttttgtcatttctgttggcagaacttagaattgcacatttcacagtctgaataggagtgccaaagtccaaggtttgaagaaataaaaggacctacccttttgagtttgttttcattgactcagaaataattatattaataatgtgatcaccaacattgtgccaggcactgtgctgagcagtaggatagaggtgaacataatgggcttggcttttctctcatagagctcatagtctaggacagggttggcaaataacagccatgggccaattctggcctgctgcctgtttttgtaaataaagttttattggaacatagctacactcatccatctacaaattgcctagagcagcagagttgagtagttgcaacagggatcatatggcctgcaaagtctaaaatatttactctcttgcccttaacagaaaatgtttaccaacccctggcctaggatgagatttatttttcaagtttggacatttttcttttggatagaacaca

SEQ ID NO: 45974 - DNA, 830 bp, Homo sapiens
ttttcagacattagacaacagagggtgcaggactgtgatctctagagcagaaaaataaatgagcatgtcctatgattcctgcagtttctcacctggaggcagtttcctggccatagcacagggaggggaaacccaaacataagccagcagtcgtgttgagttaagaaagacagagactgacattcaggaagcataaggcagccaaaataaatggtacaaatactgatggagaaggagagagagaaagagaaagagaggagagaaagagagataggtgtgcagaaagatacccttgattttttggcagaaaaaaaattttggaaaagaacttccagaatggaggctgaaaaaattcccaagctcacgtgagactggaaatagatcacatcgccaccagtcaaagaggagagagtttgtaataaatgggtattgggtataaaattcagaaagggctctccctagtagtggggctaaattagtcatagacaaactgtttttctggccttgtcctagcaaaggttaaaagcaaagctttgataggatcaaactgatttgaagttacataactgcattccagaacaaagtcccatgctaaatgaatacagtataatccagcatccgataatgtgaagttcacaatgtctagtattcaataaaaatattaacaggtatgaaaagtggcaggaaaatatagaacttgtaacaaaagaaacaatcaatagaaagaaaacatttcagaaataacagagatgctgaaactagcagacaaagaccttaaagcagctattataaatatggtcaatggtagccaggcgcagtggctcatgcct

SEQ ID NO: 45975 - DNA, 1241 bp, Homo sapiens
catcaatctttcagtcatgtccatcaaattaggctttcaagtttaatgctgaataaaataccctaaacacagcagagagcaagcccagacagaacatcttgaaagtggtaaagctgaaagagagagcgtgcacattccacgtgaatgtttcagcagtgtcagaaaatgcagcacattaaaaaaaatcagtcagtggatgtcttcagtgcattcccttttcatagtccaaagggaatttacgttttaactgtgggatgcactgtcatagctgcttaggcagagtggttagtatcagaagggggaagagcagttagccaaacaccctgtgctctacgataaactggggcactccaagagcagggaaaacttacacaataggtgcgtgcatcacgtagcccagctcttcatgccaaccatcagcacaaggcaacctcagctgtgtttgtctggatttaggaccaagggcataggtcgggggagtggagggtggcgtgtagccacaaacttgcccacaagcaaagggattagctaataatagttgtgtttataccagggaggattgaagccacagcagaagggaaactaaagacattaaattttagtggagctaattttggaagaatggggaaagtgctgagggaaatgaaacaggataaagctgttgaggagaaagccacggaggaaatagaaagtgttcagagataaattaatgcatgaccaaaatcactacaagctacccagtcataaatattccagcagggggaaagaaggccaaggtggattaaaagtgagaatcaatgctaaaagaaacagaagtgctgtataatatgaatttgtggaagtagaagaaatcaaggattggctaaaatacagtgactgaatgaaagtcaaatgtagagaggtaaatcttttgttggacaaaccccactgtttacttctctgtacatttcgcttcaagttcccttcctgccatcctataaatactcttatttgtatttttctgtctggcatccacttcaactctcttgattcacatcatgtttactcccatatgttcttgactgaaggtagggagttgttgtatttgaagatgggttggggggaacctaccccagagaaaatactaaggccttaagcaatggctaccctgcctgtttttttgtttttttgttttttgtttttgtttttgtttttgttttttttgagacagagtctcactctatcacccaggctagagtgca

SEQ ID NO: 45976 - DNA, 653 bp, Homo sapiens
tctgctaggcacttggggataaagattaataaggtaatctttgctttcaagaatattataatgtagtcctcctcttctgatactagtggtaatcacatcactttaccatggtgtaccaaaatcgtctatttatatcacttgctccatgagattgtgtcatcctcagagtcagaaatggatttattcacttttagtctcccaatgcctagtatacttcctggcacatggtacgttttcaattactgtttgttgaactgaacaaataccacacttcatcattctagtcttactcaactcttggcaaatattctgcaggcaagtctcaaattcataaaaactagtttataccagttccaaaatttactttcttgtttctgctgtgctgaagaaaataaaaatgttactgcactatttgtctattatttctgattaatttagaagtctgcagactttagagacaaaatatgctatatagcaccttttaaactatggagggaagtaaaacaagatttattttggctaggttttcttagcaagctccataaagtaatcattgtgtacttttctggaagcaccaataacagtcctgcaccatggacaaatttcagcaaagatcacagaaaccttgagccacccatccatccacccttctc

SEQ ID NO: 45977 - DNA, 587 bp, Homo sapiens
cattctgttatacactttccatggcatggttcatttccagggtgaagcggcaagagaaaagaagcaaaaggctctccccaccctttcagataacagggatccttttcctcgtttctttcctcagagaggatttttctctctctgagggatttagttgcctgttcaccactgctgccaccaacagggctgcagtaatacatcgtcaggactgggcattgccccatgggaggggcaggagagggagaaaacaggggatttcccgtactctctttgtcctgaagtgccccaccccttccttatcttctgcttagaaaaacagggatttttctggagatttttctgcccgtgcttgttatgcagttccaggattcaggctacccagagactaatcagggaaatacagaaagaaaaaataggaaagttgcatgccattcaccagttttcagttttttaattctcttcccaatctacctgctattgtttattttcagagtcctcagacagttgctttgtttagtctgtccctgggtttttagttgtgattagtgggacacagagtgtgtgcttccttcaccaactgaaaacag

SEQ ID NO: 45978 - DNA, 606 bp, Homo sapiens
cggggccgcctccacaccgtcctccggccctcaacagccgtctctgcgactggacacctgcctcgcatgccacacgatcaccttcactacagacagtgtctaaaaacaaggatgtggtccaggcaccaggggtaggggcgtgtcacacacaccgtgtcttacaaagaggaaaaataagaggttcccgcaagatgcttgcgactctggtacttttcaaagtaacgcagccaggcagcgggctttcccccggcccctcgctctggatagggctgccatttgcatcctagctgtgatttagacacctccaaccttctagttttcagttacaagagtcccatctccgcccaggtcccaggtctgcatgacgtaatttattgtggcaaccattcctggcgactgcccagaaactcagtgcgtcctgcccggggtttaagcgcgggaagtgggagaggcgggtggcgcccgagcgcagtagcaggggcgtagggcgcagggcgcaggagcgcgggaccaccggcgccggagcgcggcagggagcgctcgcgggggcgcacagcagccaagcccgcggaggaggagcgcgcgcgcgcagcatgggctgtggac

SEQ ID NO: 45979 - DNA, 537 bp, Homo sapiens
catattgaacttcacagccctcaaggaaaagtactctttttatttcaggggggaagacttttgctccccatcactgttatttcttctctaggtacaagttgggattggaaaacagatgggttcatacatgtgattctatttcttgaactttcctggcacactcaggttatcacagattttctattcgccctccccttgctgtagtcagcgtgacctcagagaatgactaggaggttgaggaatgcagcacaggaatggactctccctcccttctatgtgttaggttgacaaatacattttttttctttccaataattttgttgatgcaacttccctctagacagcaacatgaatgctaaatatcagtgttggtcacagactgcagagcgtcaggcagacagggacctggtgacccagaacagtcagtgctgccagctgtgtgtacaatgttaaaggtggtatgaagagggtgacaggtaagcagaagggtgttgagagagaacagctagggaggaagtcagccaccaaagcagatgt

SEQ ID NO: 45980 - DNA, 510 bp, Homo sapiens
ctatctttccccacctagagcataagatctacgtgggcagcaacctgtgttgttttgttccctgctgtgtcctcagagccaaggagggtgcctggtacatgattgatcctcgatacagactcgtcgagtgaatgaataaatgagtgattcctctgcattggatcagcagttgacttgcacaatatttattgtgcacaaacataatctttcattcctgacatacagtgtgttgcccttcctaagtacaagcacaggcagagctccaagtccttggtcaatgttttattgaaaggtaagtttaaaactcagaacaaaccggctctcatgcttttgtaaatcatttaccaaaatatgttctaccaacaatttcctttccttgggccagcttttatctgaatgtacaacacttaatggcataaattctacaaggctgaacacaatggcatgttttataaaaatacccagctgaggacataaaaacacccttacctccagaattatctataaatg

SEQ ID NO: 45981 - DNA, 816 bp, Homo sapiens
tagtttctattggctaagtcatgcagcctatggtattttgttattgctgaccaagctgactcatacagggcatgatgtgagcacaaagtgatgactaaaacaacatggaacaattccctacccagcctcctcccagcttttgtagttgaagctccatccacctaagtggactcagcttgttcatctgtgaatcaatagagtaaactctggcttctgggtggggtggtggtggggatggggagtatagtcacctggtgggttcatcttgtccactgcacagacaaaaccaattcactgagacacgggcattgctgtagagaaagagcttaattatcgcaaggctaaacaagtttctacttgtttagatgggagtaattagtcaaaccaccctccctgaaatcttggaggctagagttttacaaggatagtttggtaggcagggggctacggcatggtgagcgctgattggttggggatgcaatcatagggtgtgaaaaacagtccttgggcagagtcagcctctgggtggaagccacgggaatagcagttgactcatgagtcatgagtccaggtagtcagtcagtcaccagaatgcaaaagtctgaaaaacatctgaaaagaccaatcttaggttctacaagagcaatgttatctatagggtcaattagggaagttatgaatcttgtgaccacccctacacaactgctgaacagtaaacaatgactagttaccattcagctatgcatagatcttaacagaaattaggcctctatcataatcctaatctcatggcctttcattagttttacaaaggca

SEQ ID NO: 45982 - DNA, 1333 bp, Homo sapiens
tcaattttttttcagtaaatatttctttagtgccaagtatatgtagaaccctctgaagggttttaataaccagcaggagatccagtgacacctaagagtgtcaccctgctctcaggtggcttattgtccaaagcaatattatctctggggtacaaagcccaaaagagtgcttctcaatcttcatgaaatatttctctcttttttcaaaattattctaaaaggctgtgagcctgaagttgatttccatgattaatttaagaggcaaggggagaagagaagacagttatacatgaatgtgaaacttgtgagtttggttctggcctttatagtcagataaagattttgaacaaagtggacaataatttacagtaagtaataaaataatattgatcttgccatggagtaggaaccaaaacttcaggcccatccatatgtactaatttggagatgacaaccttgtggaacctatttataacttttacagtattttatggttctttctttccaaagaagcacacattatattgcacaaggcctgtgaatatacaagtattctctgccaaaagcagctgacaaagcaaaaggattatccaagcattgtttttcaaacctgaatttgtaatgagtaattgtacagaaatattcggtacttaaccttgaaaccttgaattcagaaaaactttatggccccaaggctacatgatttgatggctcagattcgtaaatccaccaagaatgaggatctggccattttaactgtgtccaccttggtgcaaatgtaaaacaaaacccacaggggcagcaatgatgcctaccacagtgcttgcctgggcgaagggaagggggtcttgatgaaagtttgttgagatgaactgggtatgaattctggcttccgtttaaatacgtttggaaaataaggaatctccatccctcttaacctttgttctcagtgactcacgtaataccagtgtattagtaatgttttaattatccctggaattcaaaattagggaccgtccaggcaaagtttcaggcaaagtgatcaagtatttactgttcccttgaaagaataaaaacactgcagtcaggggttgcacgggatgggagggacaatgacaaggaggcgtcttatttccagaagctgagttctaggacacaagtattccaacccgggatcagaatttccttgtagatctcaccactttacctagtgaacatcctagctgctggctacactcccagacaccctccttccctgatattatcacagtcctctccagggtgggctcccaatccaggtaggaagaaaggcgagacagccaaaggcgccctt

SEQ ID NO: 45983 - DNA, 1675 bp, Homo sapiens
acccaaaaagctcgcgtcgtcccctctggaaagcaacgcagcttcctccttgggcacagtccccgcaccctgggtcccggctggtgctgcgccgggtccctaagactttgactggttagagcaggcgacgccgagagccaggccgcctacaggcgtctccagccctaccccatcgccggctacagagcgggagccccgagccccagcgccgcgccgcgcggggagagaagcagctgttcccaacagctggggggcggcggcgcccggcgccccaggtgctgccgcggccaatcgcaggcgtccggcccgcccccctccccagccgggcgtcgacccccggcccgcgggggaagggagcagagaggtggagagctgtcctcggcactcgtcttccagatcccacggcgggagggacagaccagagccgaagctgcgcggagttcctcgcccctggccccgccgccgcgccccccgcccgcttcggcgctcggacgctcttcccgcggaccctccccacaccccacccaaggcacctgattcctaaggaagaaaaatctacctctaaagcacccgcttcttcgcttgagaactaccctctcttttcatttttggcctccccgccgggtgagtggaaaccgcttgcacattctatagaacccgattctaatccagacgatccggagaatttgtacggtgaccggcagggggggcgggaggagagagcgaagtcaagtctccagggccgctggcgacttcggaagccgcgcgcccggcgctctcggccgcccccggccgctcgcccccgccgcgccgccgccctcgcccccgggctcgcccttggcccccggcggccgcgaaagggtgcgggagacgcggagccggaggaggaggcgcagccgctgcccgagccgcagccgcagccggagcccgagccgcggggcgggtgcgaagatgcacacgacccagaaggacacgacgtacaccaagatcttcgtcggggggctgccctaccacaccaccgacgccagcctgcgcaagtacttcgaggtcttcggcgagatcgaggaggcggtggtcatcaccgaccggcagacgggcaagtcccggggctatggatttgtaagttgcacggactgggggtgacggggagggacggagtggcggctgaccccggggatcgggagcttggagtgaggggctcggcgtgacccgtgaggagccccgcgggtagagcggcgctgccccttcgctccggggtgaactgaaactttgctaggggagagggtcggcgccagcctcgcggggttcggagaagacccagcgctgtgcgaggtcgggggccgggcagggcagagcaggggtgaaaggagagacctgtaatgacggcgggatttggggtgcggagggttgcgagggaggggccgcaaccctgaacaattgcattcccgggctggatgccggttgttaagcgcgctgttgctttgtaaaaatgcgtgtgttctggtgttttggctggggcagggaggggacaccccacgaggtctggggctgttgcccttgtgtcatccccccgccttttaactgcaaaggtaggttcttttaaatcatgatcctagggctctttgccgaactgaaacagagcatattaagcttccttcctagagatttaagcgtg

SEQ ID NO: 45984 - DNA, 2826 bp, Homo sapiens
aagatcatcattaacagttttcccccccaatataaattcatttatctttaatgctttttttcatcccaatgtctaatttataaaatataaattatcttcctctttctttggctgttgcttatttgtgaataataggaattggtgtgttaagttatgagtgacagagcccctggatgtatctgcgcaagaggttacttcttagtatcagacgtattacagatttgttttttttattttggtttttttttttgagatggagtcttgctctgttgcccaggctggagtgcagtggtgtgatgttggctcaaggcaatctttgcctcccaaattcaagtgattctcctgcctcagcctcccgagtagctgggattacaggtgcccgccaccatgcccagataatttttgtgtttttagtagagacggggtttcactatcttggccaggctggtcttgaactcctgacctcaggtgatccacccgcctcggcctcccaaagtgctgggattacaggcgtgagccactgcgcttggcctacagattagctttaataataaaacagaaatgcaaatgtgagtaggatatgttaaatagttatgatatgtgactcatcacccaactttttaggagactgatgctttttctaaacctaataatcaacttgccagatactaggatgggagtccaaattcctagagttgtgatatacaccagaggaaaaatagccagatctaaggagcacagaggaaatcctaacaatacaaggtaggagcccaggctcagaggaagccagcaggctgtatgatgagaagagcatgggactgggaagctagaggctccaagttcaattcatgctccaccagtattcatcattatgtgctggggcaagtctatttcttcgtcttaagtttcttccaagagtttgggctaggtaacctcaggagtcccttccttcagttataataacactacaattttagttcaagtccctcctactacactcctatcagaggagcttttaaagtatatatgaaaagaagacaggaaaaataattaaacaagcatttctttggtaacctactttatcttacaatagacctggtgctttgtgcatttcagtgcatttttgcatgtaataaaatgcctaaatgaagaaagacatgagaaagagcttgaagagaaggtattttaatgcagccaggttacaatcaggatttggggtccagcgagagcttcccggccaacctgagggacatccagcaatgatgtctatctagaacaatgacaataattgccagtgtccctcccctcccttttcaagctcacctgatacctctgctattcactcagcctgagaaaaggcactctgcctttgagcagcagcttgaacgacagccaccctcacattgccttgggcgagcacgcacgtgggctgctatacggagacatctgtgcccgctgaagtgaggctgaagagctgtgttgtctagggtgacaggaggccttgcctaacagtgagctccatcaataatctatggccctgtggagaaagaaccctattaataagacatgttgctgtttggagaagacagagccaatgaggccctcgttccagggaaacagaatatgctcagcatgacgcagcactccctgaactttccggttacatcacccaatagctgagatcagaagcaattttagaagatacattcaacatactaatgccctttcagccagcctagttcagtaaggtcaaagtctggtcaaaaacacactttgacctgaggtttgcttgtttgtttgtctttaagactgatcaagagcactgagttattttcgcacactgggcttgttatcaggtcactgtttaagtatagaaatgtttatctgggtggttttagatccaatatggaagactgaaaatcctccgaattcccaaatatattttccattccatttaaagctcacaatcttctaggtccgcccagttcttctttatggcaacagttaattattaatccttccttacttttaggttgtaatttaagagtgcattaatagattgctcactcggtattttgccaaaatcatggcaggacaaattcgctagtgtatgatggctagaagcatgaacttggaggcagactgacctgggactgggtctaggctctaccacttgccagctgtgtgatctcaggagagttacacaccctctctgagtctccattccttctctgtcatgggggaaatgtctcataaagtatgataatgtaaagcatagagcaaagcaagtaataagcattcaataaagagtaggtttttgttgttgtttttgagatgaagtttcactcttgtcgcccaggtgggagtgcaatggcgcgatcccggcccactgcaacctctgctccccaggttcaggcaattctcctgcctcagcctcccaagtagctgggattacaggcatgtgccaccatgcccggctaattttgtatttttagtagagacggcgtttctccatactggtcaggctggtctcaaactcccgacctcaggtgatccacccacctcggcttcccaaagtgctgggattataggcgtgagccactgcacctggccacattgcttattaagtatctaagagaagatgccaagcaggcagtttcatccaccggtgtagagtttagcagagatgtcagggtctgagacaaaactgtgagaactgttgtaatcattaaagctattcaccaattttttttttttaagttggaatcttgctcttattgtccaggctagagtgcagtcgcaagatgtcagctcactgcaacctcc

SEQ ID NO: 45985 - DNA, 1056 bp, Homo sapiens
gggaggctgagacaggagaatggcgtgaacccgggaggcggagtttgcagtgagcttagattgcaccactgcactccagcctgggtgacagagcgagactctgtctcaaaaacaaaaacaaacaaacaaacaaaaaacaagaatggcattgcatgctgccagtgataacactgaatactgtttgaatctcaatactggcaatactgtttgaatctcgaaagacttgagaaccctgccaatgttttgggttttaaacttgagaaagcccaccctcccattcccaagggtaaatatgaaacataactttcagttcctctttgtacattcaatgctaattagctcagtgctctaattttatttctggactttggtacagctgaagctttgctggtgtattagtaacgacataaatgtttgcacatttctgagagtctgcggatatgaatcaccttgagagaaatagctttgatcacagcgtgagagctacatttcaacaatttctttactgtgttgatgttattggtggtaaaaagggaatttgaactttagaatgaaaaaactagaagataaataaaagagagggagctcctgcaaagtatatgtaactcttagatcaggcagtccaaagagaaaaaaatcagaaaattaatggctcatttgggagacacaaattaatttgatgatatgataaaagaaaaaaataacattttcctaggtttagaagaatttacaaataaattttcagaaatgtcgaaaatctttgaaatgtttcttgacatttcatttgacaaccccagaggtcagacccactgagggttcaaaggctgttggcctcccacttccatctgatggtccctcatatctgatatgtcccttcccatctagtgtgctctcattataccacatgagacacacactccaggaggggatttgagctctcaatagccattttgttctgctcttgcaagtgaaagatgaatcttcacatccaaaaattaaatatacatcattgctctgtttggaacgacatttcataagtctacatctacatcacaa

SEQ ID NO: 45986 - DNA, 2649 bp, Homo sapiens
tcattttgtttcccttctttccagacaaagggaagcaaagactcactgcacctcattactgtcagcagagagcaatgtgtaattggaatgacctttgtataagtgctgacctatggggtcagaataagccttataatgtacagaaccaacttatgtgcaattttaacatcgacagagaatattggcctttaagaaattcatctcatatttattgtttggagattttactttcagaagatatcagttacatttcccctctttttttctcttttctgcaattattttcctggcattcattcaataaagagcttcaagtcacttttttagactgaaataaactttgatgaaaattgaaaatcaatgctttccttctaatgacgttaagagaaaagcctccaattttgcaattataatcaatatataaaggggaagtggccacaaatatgctgcacatcttaagaagccaagtgggtttggttactttaatttttaaataatcaggacatttaaaaagttgctgtttataaaatactttttaaaaatgtcatcacacgcactatgagtgcactcagtcttgatgtctcgctaaagcattagctgtctagctccttctcctcccagagcctttatcctcatattgggtctggggacacacatgccgtctcttgattcctaaggatccattacccatttctctgcacagatcttcgggtatccaacctatctgtgcctccttcagccaggagcctccggatctttccagacttctttgcaatactgcctcatgcactgaatccatttctcgcatagcctggcgcttggcaggcaggctggcgttccctggctctgccttccccatctccctgtcttttctcccacggcccatctgcccctcctttcctccacccccttctcctctctgctcccctttatttccactccccacccgcgtggctttgctctccctctcccccctcagctcgtctgtatttggagctccggaagctgccggcgactctcccctggagcagcgtgactgacaccggctcctattcagctgggaggagggagaggggaggagaaggggagggccgcgggaggagggtacgagtggccgaccacggatttgcattgccgaggacgggaccccagggcagcgaagcaggtaatcctgcagcggtcggggcccggcgaggcggggaggggtcggggtgcaggtgcggggggcgcctggcggcgggcgctggcaagttgagcccgatgggtggggtagggaagcggccgggacgctgcggctgtggcagcagcgcgaggggaataaaggcggcgcgggcgcgggggccggggcgcggcgacccgggcgcggggcgcgggcgcgggcggactcccatctgggtcagcggagcggcgcgccctgcccccgcctccccagctccggcgtcctggccgctcggaaggcggggtgcgggcaggagctgcccggggttggcgggcggccgcggcctccccaccccagcgccgccgcccgcccggccgctctaactttggggggtctcgtccaccgggctgtgagtcttccaggggggtgggggtgggagtcattgcgccggctctgaccagagccacctcgatcagaaagtgctggaaagaaacagacctggcttcccctctgcagaacctgacttgaggcgatgagtcacttctaaaaaatgcagaggcaactgagactgggggaacggctcggaaaaacggcacccgccgctggctctctgactgctttgggtagaggggtgttcgtggaagtagccgccgtatcatcacttttagggccaaaaatcaacctgcagatggccttttctttattctcatcagagtggtgttcgctgcaagttgtagcaatatttgaatggatgcattcttaaaaatgagtatgtatgggtgactgcatttaggaagttgaaccgggactaggtccaaacagccagagtggagatgaacacttggtaaaaacatctaggacctttggttttatagttatggaaatgcagaagcttctgggacttgagcactgtagtttactgagtactcctatttccttactgcttctgtagatttcattgaagctatgttccttagaattcttggtaaactatctaagcccacttagtgtaaaattacaacggtagagtgaactttagagaattggatttatagttactagagtctaattagactgcaagcctcttgaaagcaaggatgggttgtttggtagttcctacggcaccaaacagtatttggctcacagcatgtaatggatagacaataaaagtgtgtgaaatagttaattcagtaccttaagtgtagatggagcatgacttcttgaatatactgcatattttgcaaggaaaggcgacttctccatgaatcccgaaatttaaaaaattcttaataacattacaatcaaagtgtcatataaatacttcttaaggataaagagaaaaagaagttgactatgagaaatcaggaaggtgattatcaaggtggtctttgctagtaggaagtaagtttttgttccccatcgttaatgtgagaagtaatttaatttgttgatacagggtagggtttggtaaacctttgagttaagagcta

SEQ ID NO: 45987 - DNA, 511 bp, Homo sapiens
acccacgttgttgcatgtaggtatgtaatatttcttggcaaatattccatgatttatttcaccattcttgttgacaggcatttgggttggttcccatgttttgctattacaaagaatgctgctttgaagactttttttccatgtgtcttggcacacatgtgcaagagttcttcactgtgaatgtgccatgtattttaatgggaaaaaaaaaaaaagaaaacctgattctcctttgacttacacattgatggcatgtaaccacttactcatttccccaaaccaagataaaatgattagatctgacattctgacttctcatcctatttacattctagttgtaaaagtatttcccaacgttttaagaagtgtggaaaatctaaaatttcacaactcaatttcacagcagagccttttaacccggtcactcacggacatcttcatctccttatatcacctgggtttaggatgagagggaggacaactttattattacatcaaaggaacattactt

SEQ ID NO: 45988 - DNA, 870 bp, Homo sapiens
tgataaagtttaatatataaggccgggtgtagtggggcacgcctataaccccagcactttgggaggccgaggcgggtggatcacctgaggtcaggattcgagatcagcctggccaacatggtgaaaccccaactctactaaaaatacaaaaattagccaggtgtggtatagacgcttgttaatcccagccactcgggaggctgaggcaggagaatcgtgtgaacccaggaggcaaaggttgcagtgagctgagattgcaccactgcattccagcctgggcgacagagtgagaccccatctcaaaatttaaaaaagtttaatgtataaattaggcatagtaagagattaacaataataactaataataaactagaacttcattgcaatataccataataaaggttatgtgaatgtggagtctctctctctctctctctctctctctctctcaaaatatcttattgtactgtgctcacctatatttggaccattgttgaccatgggtaactgaaactacagaaagtgaaactgggcaaagggcaactactctatttggatctgtaaatgtgtagctttcaccaagtttggaagtttttggtcatgatttcttcttttgttttgtttatttattatttttatttttatttaaagcacaaaagcataatgttttgtttttttgaaacagggtctcactctgtcactcaggctggaaggcagtgacacaatcttggctcgctacagcctcgacctcctgggctcaagtgatcctcctgtctcagcttcccaagtagctgggactataggctcaggccaccacactcagctaatttttaagttttttgtagaggcggggtctacctatgttgccca

SEQ ID NO: 45989 - DNA, 1003 bp, Homo sapiens
aatatatgcttttaatttctggagaagtgtattagtttaagttcaactaaaatatctgcttaaatataatttatgtagtataggtaaaaaccaattgcattctgatacttacaagattgcttttatgtaaacagcagctttctgagtagcagaaggtggagaagtgaggcaaaaagaaggcttttttccttttcctatgagccttccaatggcaagagaattaccttggtaattacatggtggctagcatgtgacggctactgcccgtgctggatgtagatgctggttaacacacaataaaacaccaaggaaggaaggagaggcaggggtttgtgtgatatcatcagggtttgcttgagttgacagcctgaagctacccagtcagggctgaatcccaacaggaaagctaatcattagtttatcaggatgcagagagggaggtaatcagaaaagagagtaattctgtcattcttctgcccagactgtttgctttagcaacataaagctgtgggtgagcctgtgagctgtgactatgagttggtagctttataggtatttagaaacccaggactgtggaggcagaagggatttgctaagatcctgtcctgttggaacatcactcatggtgacctttttttttttttaatctgataaggcacattagctcatctctctttgtataagacatgaattagataatgaatggctgcccaaaggaagtgaggtggttatcacaccctggggattcaagagattatctgaggggtaaaggttaataaagaaggataatatcctttgtttgatcaactgttccatactaagttcgttagaattccagactgccttgatggcaaatgctacataaatgataaaactgtgtatgtactaatatttgactagggaattttttattctccatttagttaaatattgaggtcactttgtgtttttaataaaataattatcaacgatctatcattttacactgtgaagctcaatattt

SEQ ID NO: 45990 - DNA, 512 bp, Homo sapiens
atgtattttgattttaactttgtattttggggtcaccaaaaaaaatcaaaacacaaataagtctatgggctggaagtcagaaggagcagaactgagggaaggtaactgaaagagaaaaacaagattggtgaggcaccagagggtctagcaggaacatggaactgcagctggcaggctttattctgtgctgccgatcagcagcaggcatattatatcctggactatgtgccggcgtccaaagtggctggaattgaaagtgaactttagcctatgcgtggctgaattcaggtcagccagttggggggaaaagcagcttttatccctgtccacttcctgatttctcctcattgatgttccatactccgttctgatcagctgctagcatgtgacaggctggctggatcaaacagcatcaaccaaatgttcagtcaaacgttgtagtcagctaaatattttcacataagccttttttacattaataaaatctcccctcctcctctgacccctttgta

SEQ ID NO: 45991 - DNA, 448 bp, Homo sapiens
gcagaagcaactcaatgtttttttatatttgtttgtaccaacactatattttacaaatatttacgtttgtctttcataatagccttctattgctgactggaccaaagccaaactcagcctccctccctgacctttctgcatgatgtcaccctttctagcatctacccacggcactctcttgttggcttccttcctctcgtatgtcacagtcattttcttcacacactcgacttattttcagttttttaatctcatgctatccctacccaaagcaatgctttctcttggccccaatctcatatttcacaagtaaaatccaatcctaatctaaaatagtctttccttttgccagaatatcatgggcgatgtacttctatgagcatatatctcagagctgctccacagtcttctattagtataaagcggagaaggctgaacagattacttt

SEQ ID NO: 45992 - DNA, 3142 bp, Homo sapiens
tagtctgcatttacgaaaacttactttccactgcggtagacagacgctttctactccagcgcaactgtgcctttcctcaaatctagtctcaaatttaggttccttttcattttctgttatggaaaggccctcagcgtatcccaggctttggagccttttgttagtagtctggcccatgcataatttccccttcctctgaattatacatagcacctcactagttatattttaatacactttcctatgtctcagtggtagtttcctatattaatatatatcccagtttagtttggcttttaatttcttttcttctaaggggatagatgcgttctgtaccaccttctcgagtactaatggttaactggaatgaacacaagcaacaaaccctccggcctggatcccaaaacaacagtcgcggttctgcaacagaaaaggctgcgctggccctgggacctgtctcggaaatactcctcatccatctagtttctcccaggacaactaggcccaaccccacgggaatatacagagaggcctcgggtcacagacttaaagctgtaaaagggaggaggcgacggtctggtcccagtcaccgaccagccaccgactactagggcccgaacccgggactgcagacgcacctccccgccctcccttcccagctccgcctggcggcgggcgttgctcctgaggggcggggcttccgcttccggcgggggattgttgacgcctgcggttgctgcggtggtgacggggctgttggggaggggccattgggggagggaaacggagcagtgacaggtatcccagagggtgctgctgaggcgacgatggccgaggggcccgaggaagcccgaggccaccctcccgggcaggacgatggcggaggggaccacgagcccgtcccttccctgagaggccctcctaccaccgccgtcccatgcccccgcgacgacccccaggccgaaccccaggccccgggccggcccacagccccgggcctcgcggctgccgccgcagccgacaaattggagccgccgcgcgagctcaggaagcgcggggaggcggcctccggctccggtgcagagctgcaggagcaggcgggctgcgaggcgcccgaagccgcggcgccacgagagagaccagctcggctgagcgcccgcgagtactcccggcaagtgcacgagtggctgtggcagtcctactgcggctacctcacctggcacagcggcctggccgccttcccagcctactgcagcccccagccctccccgcagagcttcccttcgggcggcgctgcagtcccccaggccgcggcgccgccgcccccgcagctgggctattacaaccccttctacttcctgagccccggggccgcggggcctgacccgcggacagctgccggcatcagcacccctgctccagtcgcgggcctgggaccccgggctcctcacgtgcaggcgtcggtccgggccactccagtgacgagggtaggatccgcagccccttcgcgaagcccgagcgagaccgggcgacaggcaggtgagaagcgcgaggtggaggctgggcggagtagaagggttttcgggggcctgtggggtagagctggcacgctttttagacctgtaactgctgcttctactctgattgactatcctgcccgttcagttcactagctatcgtttgtccaggccctaaattcccaaaatgtacaaggaggcaatacagtttcttcttcctttagacctggcactccaaattgactcccttactcatgggactagttgtttattcgtgaaaagaaattgctcttcaaaccatcctcttcctttggttttcacgctctgcagtgagggccaaagctaaattcgcaaatggcaaacccacttttggaggggctcgactggtaatgctgaaaattattcagacattggctacttaggacagtggaactgaacggatataaaaggagatcgacatggatacaagtggagttaggaagttttgattgggtcaaagcttcacttcatttgatcaatatcttgtatattgtgtaattgtttttgcttctgtgtgtgaactagaatattttgaattagttacacttcttagtttactatttaaactattagacttttagtttattttagttagccacagatagatgggacaagaactagttgatgcctctgatcccagtcagaatttaggatgacagattgatactcactgggtttattttaaagaaagcaaaacaaactaaaaaacgggtggggggggattacagggatttactttatactaattgccaatatttaaccttgatttgtactaaaaaatgtttaattttgtgtgacttagatgtgatcacctggattctcctcattagaattcctagtgaaatgtagtgggtaccctaatcaaatttatctgtgaaatcagttttctagggggaaagtggggagggtggggacaaggtctgcttctatcgcccagcctggatagtgcagtggcgatcttggctccctgcagcctccgcctcccaggttcaagccgtcctgccacctcagcttccctagtagctgggactaaaggcatgcgccaccacgcccggctaatttttgtattttttgttgagacggggtttcgccatgttggccagggccagactggtctcgaactcctggcctcaagcaatctgcccgcctcggcctcctaaagtgctgggattacagacgtgagtcactgcacctggccgtgtgaaatcaatttttaaacgttaaggtgatgaaagcaaactttaagctcagtaaatagtggattctctgttactctattttagtaacatggattcttggtggaatcaatatcaatagttgctgcacggttataaatattttttattaagttgtaccttgactttctttagcaattcattacatggcttgtgttccaaggcttatgtgaaatgattcgtttttcctaacttttttttttttttaatttacaggcagagaatatgttattccatccttggcccacagatttatggcagagatggtggatttctttattctcttctttataaaagcaaccattgtcttaagcattatgcacctcagtgggataaagtaagttgaggaca

SEQ ID NO: 45993 - DNA, 468 bp, Homo sapiens
aataggtaaaaagagcctccaaacctgctttgattttattcacctattcttttaggccaggaactaatttacctctcactatcctgttccctcttgctatcttgtggagtctctaaagacaaaggtataaagagcttttggtaggtgaattaataatcaactagatggcatttccaaatgggattgcacatactgtggggcaagtcccaagtgaacttcaaagtgagacgtttatttgagtaatccttccagattaacaataatcataatagcagttaccacttcctgagtactttctatatgccatgtattgagcttgctcacttctttatgtggattcttatttaatcttaataccaagatgaggtgtagagattaataccaccattttatagagtttgaaatttgggtttatgaaaagttgagcacagaacctaaaatgttacaaaggtagtaagtgacagagtc

SEQ ID NO: 45994 - DNA, 957 bp, Homo sapiens
cttctacaattcttaagagttattacccttataactcttcagttatttgagcaagacaatgaatttgtctgcacaacttcatgcaagatgacattttaaagatcagaatttgggccgggcgcggtggctcacgcctgtaataccagcacttttgggaggctgtggcgggtggatcacctgaggtcaggagtttgagaccagcctgaccaacatggcgaaatcccgtctctaaaaatacaaaaattagccgggcgtggtggcgcatgcctgtaatcccaactacttgggaggctgaggcaagagaatggaatgaacccaggaggcaaaggttgcagtgagccaagatcgagccactgcactccagcctgggccacagaacgagactccatctcaaaaaaaaaaaaaaaaattaaaaaaaaaataagttaaagaaggaaagtagtaaacttacagcatttcccaggagagctaaacccagaagtcaaaacaggaaattacaagtcaaatgaacacatgcagaagtcataggtactgggtgactgtactagccaagttgccctgacaggcactggcaaacatccattaactaacagcgccagacctctcattgtttcttactccaactttctgctatactaccaaaagcttaatttttgcccagaaacccttggacacttaatcaaataacattagtataaaacatgccatgtcatgaagcttgcttcatgatgactcagcagcttctgcaaaacatccagttgacagcctaggataataaacagcaagtgggtagaccctatgtccaccaaagcctcaataaggactaaagaaagtccttatttttaagattaaaaaaaaaaaaaaggagagtattcttttgaatatacctgaatactttccttgggtagtggtagtttctgccaatattaaatagcacctacagtgttgatcaagaaa

SEQ ID NO: 45995 - DNA, 3326 bp, Homo sapiens
gaccatccaatgacctatatttaaaacaagtcatttttctacatgtcatacaagaaaatctaagcactcaaaggcattcataggagaaaagaaagcatgcatgtgtaacttccattctacagacggattaggttaaatggccaggcttgtgacctgaattctaatcttaaatctgctcgcaaataccccttttcttcacaaatttgaaaactaagcactttatgtacatatctgggggaaaactggtgggagtagtaacagtgccaaacctaaccatcagtagagaacgactgaaaatacctgaaccacaatttttactactcaaacatttccctcaaaataaaaaacatttaagaaaactagaagacaaaaaaaaaaaaattcctcaaatctttactttttttttttttcttcgagacaagagtctcgctctgtcgcccaggctggagtgcaggggcaagatctctgctcacggcaagctccgcctcccgggttcaagccattctcctgcctcagcctcccaagtagctgggactacaggcgcctgccaccacgcccggctaattttttgtatttgttagtagggacggggtttcaccgtctctggatggtctggatctcctgacctcggtgatccacccgcctcggcctcccaaagtgctgggattacaggcgtgagccaacgcgcccgacccaaatctttacttttaaaaatctgttgataatgacacaatttaacaacatcaaccatgtgaaagtgtgtaatctttattagcatccagaataaagtaatctaggaagtctacctttaacagtaggcaacaagttatcagatccttttgctacacttttgtttttcaacaaatttaagacacacacttcccacctcagtatcactgataagtggctttattaaaataagttaacattttcctattcaatacttctaacaatcaatattttaaaaatggaattttctcagaatcaactatctcatttacaattaggataatccttttttataattttaaacatccaggagttcatacagtggctaaactataagaccaccaacattcctggagtgtcaaaagtaactatacttctagaatacgcctcataatattaaaatattttgtgtatgagatcagagctggagtcccggtcaactgtggagaatggccaattccagcctccaaaataaaggcgggggtggcggtgttggggggggggaggggagtcgcgcagcagagaaaagacgtaagggtggagagggactttcaaaatgccccagtgccacggttaactataacctggttaataaaatctaagccaatgctctcaagacgaggagggccacaggcaggggaaaccgagaattaactcataggctgagactaagttattccactttccatgtaacagcgccccccacaactccccgtctgccccagagttaagattccaaggggcagccccccctcctcaaacacactaaagaagggacaccagaaaacagcaagtataagggccatcaaccacatcttttcctttctccctcgagagaacatgagtaataccctcaaattccaaatccccgccaaaaaataaagaaacgcgcgcatcatgggcctacaatttcttttcccgcccagagcctgcctgggaaagcccctgacccagagagttgggggaaaggcggcccaaaccacacgtgtgcgccgcaaggctgggcctgtctcagcccacttcccgtcgccacccccaacggcctgagctcccccggagcctcactcgggcctttcctcaggccctcctgtctgctccacgtggggcgccggggcctcgaaccgcccgtcccctccagccgagtttccccacccgccaggccaccgcggcgtcggggtcccatacctgatgctgttgtcgcccctgctggtaaggcttaattggcccctggtggcaacgccgcgtccggatcttgccgccaccgccccctccgactcctccggctcccgaggccatggcggagcctccgccgcttcccgctccggggcgggtaagggggcgggagaggcagaggcggaggccttagagagcctcccccgccgcccggccccggcccaaaagtccgcccgcgctgtccacacagtgggcacaagcaccccaggaaccgcgaggttgcgagcaggagcggagagagggtgagtgctggcagcggggaagggggtggcggccgcagaggccgaggaggctccggtccggccgcctctgcggacccccgcctctgtgtgtgtcacggtctctatggagatctcccgcagaggacagcacgaacagttccccgcggtgctgaggcctaactcgaccgccgactggtgggagttcttccgtcgccctagccgtagctgccgcagttgaagccgctggcgacgcccgcctacccctcccctgtgcgcacagcgcccgccccgccgccgtcgtcgtcgtcgtccctgcagcctccgccgccgttgcgcctattacccctgctaaggcggctgccgcggtcgcgagccagaatgtcgtcactcatcggcgcccgacgcatttgcatcatcatgctgcgacgagctgataggcaaagaggaagggctggtcgagtccacgctctcggccgcgcggcacgctgggaaacgtagttcaacaacggaacgcggcttctcggaaaggaagagggacggggaaggagatctccggggcgccgcagaggcacaaagccaaggggtacttttgctgttcttggctgtaaattagactttgaaaagacacttaacataaaaacagtaacctcttcccattctccttctccctgtcggttggttaagtaggcaggaagtaagcagacagtaaaatcaaagacaagagctaatgatttaagaaggaggaaaaaaaaatctgtggttgaaaaataaagtccatgatccttagaattagaaaatatatacggcttcattaatgtttctttaaacatataaaggttttgttgcagacacacggggctggaattctggttctgccacccaacctatttgaccttggatgaatcaaaaccgtctgagccttagcttcctcctccataaaatgggagctttaaaatccaccttataaagctgttgtgaggagcagacgtgatcatctatggagagcatgtatatttgctaatagacgaaaaatgcgatgaatgattacaattataacccatgcagtcagctaacattaggggtaagtgatatatccttaacaataaaagtatactatatttgctccaaatatttaggaaactg

SEQ ID NO: 45996 - DNA, 3208 bp, Homo sapiens
gttttgtttttgctttgttcacttctattttttaaacacaacagtcccttttctcagcataggaaaagacgacttgccaactgctttttgaacctcagttcatgaaaaaaggagctgtttacgctgagtggtgggaatcagggaattcaaacagtgcatgggtggatcccataaaagacgcaatatctccaccctaaacgttttccgactagtttacactcaaatagaatgaggtgctatttgtctaggggaaagcataccagcccataaacgaaggttcgttaagtcccgtgggaagcaggaggatctatgagtatttgtttctatcccagacaatccgagcagagccataacattgtcaaatccaagaggcctgtgacttttcagcagaaccgatgccaaaaaggcggtggccactctgcagatgttagctccacatgcctggtgcagcaaattcacagggcaagcctgacctcacttgttaataaccatgaccacaatgccaatttcctctggggtttatgattagaccttctataatcatgtgaacaagtcttaaaacacaggcatgcccaaagtaacccataacacaatgtcagaacaacagagagagctcctgtatggaatttctacaagcaaagtcacagacctgagtcacccaaccctgagtcacatacgatatgaatctttttcttttttgaaagagatagggtcttgctcttccaccaggctagagtgcagtggtgtgattatagctcactacagcctctaactcctcgaggttcaaggaatcctcctgtttcagcctcctgagtagctaggactacaggtgtgtgccaccacttatggctaattttttatttttattttttagtagagataagatcttgctatgttgtctgagctgatcttgagctcctagcctcaagtgagcctcccaccttggcctcacaaagtgctggaattatagtcattgtacccagcctgacagagatctttgaaaagctaacacccttgggtgtccacacttgtgcataatctgtccctacttagaacagcagcaataggctcaaagccaccatgtgtgtgtactgggagatgggtaaccaaggcaaatctctttctatagcaagaaagaaaccagggatggaaggaaaaatgcagctatcattcctacacccaacatctgatgactgaagaggcacaggataaaagagtcacagtgggctgtgttctagaaagtgagagaatgaaatgggaggatatacgccctatcttgtttaaaatctgcattaaacaaggcagacacctatggcccatggctgaataaaacactaagcatggtgatgcacagatcagacctggcatatgcacagagtatttcttgtttttctaaagtaactacatagaaaagcatccaatatttgaacacgatcaataatttcatcagtttaaactgagcccccagttttccttcctttccctatctcttctctttggaatcagagtagagagagagaggaaaaaaaaaaaataaaggctgggctcactatttatgacttggaattcctgggcctactcatttgtgagggtgttttttcacttctaaacagggctgacaggcacagcgattttgatgagtctggacttggcaggtggcccagctccaaatcagagcacctggacagcgcaagaccagacaggttcttctcacatacctgaaggggtgaagaatgcccagcttggatgaggtttaaataaattcctttctcaaaaatctttggtgtatggaagtgcagctttcaaaaattctcatatgtagtgatttcaaacctggtttaagttaaatgaccaaaaactacagagttcagataaagaaactgaagctgtaaggcttgacttggtattgctagatttaagttttaatcaactacagaaaagtctaccattgaggtgcctggtaagaagatcccaagaaaccaggccatgagggtaatagaccacggacacattttccactgtagcattcaaaagctatcagtgttagtctggaagtctggcttgcagcatggcacggctgactcatccagatggatgtttccaccacagcaacagcactggggctggccatgagcatggtctttttttgttgctggacacagtggctgattcaccaaggaggaggtcatgcaaccactgccctgggcactggtctcgagaatgaagaaagaatataaagccactcacctgtgaagaatgtcttacagagaatgtgtgttggagtcatacaggagggtgtttcccataaaataactgctgacaaagtaaaccttcatttctatcttatttgatggtgttttacaccccctctctctgacaaagaagcagacccaactcaacatctcttctggattgtgggctgcacaatatttatagtatttgaggcgaggttaaaacaaagcccaaaccaaatataaggatcctagagaacttctgacaggagtgagggtaactttagtagtattcctggctaggttctaagccagagcacttcaatatgacttccttaggagtcatattgaatgactcttcaggatgagagaggagaggagcaccataggctggagtagaatccataaaattttcaccagcatacatgtcattaactaacatccacatttaccaatgctttcagtgctctcatagggagcagggcttcgctaaacctcagttttcttatctgtaaaatgggggcagtaatagtttctacctgactgggtgctttgacaatcttatcacctagtgcatgtagagggatcggcacagtgcttgggattcaatgctcagggttgtactatctattgctattgttattcacccctctaaacacaagttaaatgatgtttctgggtccaacaaacaccctaaggaacaaatgtggacaaagaaagggaggtattgaagaaaatgggatttgataggataaaaaataggtgagtaaaggggagaacaaaaaagcagcgcatatatatatatatatatatatatatatatatatatatatatatatatttacacacacacatatatatacacttaaaaaaatttaacacgattagcaaagctcatttattttttaacatcctttacaagaaaaatttttcttaactgaccttcttatccaattctctggattacccaacattct

SEQ ID NO: 45997 - DNA, 492 bp, Homo sapiens
aaattttgctgcacaaatgttttgtctcattacgattctggttagttaagttaatatttagttaagcaatatgaagcagaaatcatttctagctctgagcacataaaatcccccatgatgggaacagaatcaaacatggctgctcttcccactgcattagtccacagattggaggtgctcttctgtcccctcacagtataaagcaatgctagcagaataagaggcagatgtacaacctttctcctgagttgcagggcattaacaatgctcgaagacacatggcttcagcacatttgagcaacatgccatatggcaagaactgttatataatttctgagtcaacagtttagaatctctcaggccagggaatgttcacatccacactgaccccagatatgccactaccagactgctttttttttatttttgatatgaagatttctgtagagctgggaagaaaataaaaaccaaagttactggaagtcactgtta

SEQ ID NO: 45998 - DNA, 3621 bp, Homo sapiens
tccaatgtggcccagggaagtcaaaagatcagacacccctgttctaagtattctcctaatcagcaagtatttattgagtactaactcccacaatgcatattaggagtgctttgagggaatatttagaggaattaggcatggtctctgacatccggaagcttaaaaccatgcaagagagacagatacatacatgaataattaatattaagtggatggtgataagtgtgacaacagagacaggaatgaagagctatgttcagtcaacaaacatttcacatgcactgtctgccactttgttgggatacaaaaataaattagtctttttgtctttcaaacaagaaactgattttttatacatatatcacaaaacaatataaagtgcacagcagctctccaaaaaagcgggggattcactgggcaaagagggaattttgttggaggagaaacgcctggagcagaatttaggaggacttaataggaattcaccaagctgacaagccaaagaaatgttatcccaatagggggaatcatctgtgcaaaaatcaccagagaacacagctcatttgagggccacagactcatgggattgttctgttgccaagctcagcagttagactacagttagcagagaaagtgagacctgggatgatggtatagggatgaggttttgcaggacagtaggtaccattttcaatcaggatttatgaactgtagtttggagataagtttatatacttttctatcaataatctaacattacctacattgaaaacatacaacaaatgcttctatgaattataaaaagtagaaggggttacataagcatctggaagacctttgaaacctatcacaagaagaatgcaaatttcaaaaactttaagttccaagataaagcctggtttgaaaattttaaaaaagagagtcatcagatgatcaaacctacaatcactacagtaaaattttctgaacatgtgaagaagctgattcattcaagagacatgccaccaagtttgttttggaagaatactgggtagatcattcagaatctactaagtttaagtatatgcttaatgtcattttctaattgtttttctcctaaccccttatttcctctaagactttgatctcactgcctatggtgctttgctttttcttttccttccctccctccctccctgccttcctttcttccccctttccctttccccttcccccttccctttccctttttctctttctttcttcttttttttttttttggaggagatctcactctgctgcctaggctggagtgcaatgatgtgatgacagctcattgtagcctcaacctcctgggctcaagagatcctcccatctcagcctcccaagtagctgggactacaggtgtgcactaccacacccagctaatttttgtatttttttgtcaagacagggtcttggcatattgtccaggctggtctcgaacttctgggctcaagcaatcctcttgcctcagcctctcaaagtgaggctgagattacacgcattagctactatgcctggctgctgtggtacttttcaagaacactattcttgcagttggtgaggggaagctacggttccatgagaatacctggtagggcaagaattgggtagagaaggaagtaaagtcaggaggatgacagactgggagaaaacggcagaggtaagacactcatggtctggatacaattcaagaataaagatgcagaggtgctgggtgagataagatgctacagtcaacaagtgaaacctaacatttcagaggtagcacatttcagggttgtaaattctaacctggtcatatagtatatgtctgtgaattgaaatggatgatcattactttaattaatagctaacacttactgagttctaattatgtgccagataggtttctgttactatctgctttaactcacttaacatatttaatgaccctatacataaaaactctcattattatcatttttcaaataaaaaatactgaggaacaaggtatacagattgcatgactttcacaagatcatagttaactggcatcagtaccatgattcaaacccaggcagtctctggctggagcacactgtacacttaactgctattgagtattgcctctctggcatcaaagaatttggtgagagctctttcagcttaggctaggtattgattggatagcaatccatgtggatgttcaatgatgtggatcattcatgcttacaagggttatccatgtggttaatagcatgaattagcccttctgtgtccttcatgaatgtgcaggagaagcctacacagagtgaacctccaagaaggaaaggcatttatggaaaaaaaaaaaaaaggaactggtatgacaacgtggagttagaaggctgcaaacgactacttcctgctgaggtagtaggaaactgagggccactgaagaggggtataaataaagccacaaaaatgtagatgcagatgtgttgggagcaaatcctaggcagaaggacagctggaacaaagctagagtgcacaggatatgttcagggaatagcaggtagacagaatgtaattgagagccatacagctggaagaatagacaagaaccaaaatgcagacagcattgactgccatgatgactcagccttttctcagaagaaattgccacagatggtttgcgcaatgggaatgacatggccagatctgttttaggagggtgagactcaagcgtgaatgtaagaggccacaccatctagagtcagcagtgagacacgcactggtgagcctctgcctggcaccaactgcagccctcaccgtgtgtaagttaagacactactgcaaggacaagacaaaaagtaggacagaaagacagaacacaaagacaacttgaaggaaaaatctgtaagacttgttgagtgtgtgccccctccacctagccactccaccatgtctacaaagattgaacgactgccccacagtgtgaagggactttccacatgggacttcagtcacagaccttgaagcagacctgatggaatgaatgaagaaaaaaatggcttcctttcaattgatacttattatattgttgacagatttaaaaattaattgaggctgggcatggtggctcatgactataataccagcactctgggaggtcacaatgggaggactgcttgagcccaggagttcaagaccagcctgagcaacagagtaagaccttgtctctactaaaattgtttttaaaaatcagccaggtgtgatggtgcgtgcctatagtcccagctattcaggaggctgaggtgggaggatcgcttgagcccgggagattgaggctgcagtgagccatggtcatgccaccgcactcgagcctaggcgacagagcgagactgtcttaaagaaataaaattaaaatgaactcaaaatacacttgtaattttaaaaaatgctaatcctgatatgccttcttaaaaaaaaaaaaccctgtttctttttaaaaaattaccagttaatctattttcattttcaataaaactcaaaaagaaaaacaactaattttgtactgaagcagacagacttgtggtttgattttttggactactttggtatatttgaactacttcc

SEQ ID NO: 45999 - DNA, 1543 bp, Homo sapiens
ttgcccaggctgatctcaaacccgacctcaagtgattctcctgcctcagcctcccaaagtgttggggttataggcgtgagccaccacacctggcctggttttacctttctgacctcctcctgtagcaggaatgaggcactacatgcaaacacattagccagtcttcatgatggcactaatcccacaaccagacaacagtcaacggcacagttgaaagacagctgacaagaagggcaactgttacacaagactcactgaaccttaagtcaaacaaacaggactaaaaatggggctacagtctgcctgcaatgcttaaaaagatatcatttgtgaagtgtattatccttttgctctctgaaggataaaaggacttaacaggtgacaaaacttggccaagtgctacggaaactagaaaggagaacaacattacccctttcctggaaaaaaaagaagcacaatttattttgaaactttcatcaatatacattaaaccatttgggagtatttacttaggaaggagatgaaagaagtaccagcttagcgggcattgtgaagcaccatgagaatgtataagggagagctcacaaatgcctaattccttagcttcctaatacaggcactgaacaagaagtaacaaattcctcaggtgataaatcattttttaaaataacggattcatgcatttccacagagacagtaattattttaatttcctggaaacagggtaataggaaaggaacttacgttatcaggaaaaacagcattcagaagctatcttgcatttgctaaagttgcctgacctcagagttcatacaaaggctgagtggtactgccaaattagctgggcaggatggaaggtagactagaagaacctggatttgccacactttgccataaccttccctgggacagaaaatccagggagttaagtaagtttccacaatagaccacagggctgggaaaagaaaagggacagtggtgatctcactaccactaccctggagttcagaggattttaacacgcttctaacaggctttctcaagcatgagttcacttgatcattgtgaaaatccaaactgtttacagaccaatgttcccatttacagaatacggtttacacaaggggttaaggaacttgcctagaatttggtagactcaggcttaaaaattgttctctgtattctaagtgttttctccactaatcaacatccggcaggttcatttttgattaacaaagggccttcctaaaatatcaatgaaacacacatatatgcataatatccttgctgttctttcatgggaaaacaccacattcttaaggctttgttttttatgtgtgatgttacacacttattattcctaaaatgttaaaggccaaactgtgagagctttcacataataaagtgctatttctagtgctagagttttgttcttggttgaccagtttattctaaggtcacgagagctggattatcactttagctttgtcttattttgctaccttatacaaattctttactgttctttcagattttgatgaga

SEQ ID NO: 46000 - DNA, 2485 bp, Homo sapiens
ttttggggcgttaacccatactgttgcatggaacagaacggaattaataaggatccaacagttaccacttttcaaatgcaaatatgttgccatctagtaaatacagcccctttttaaacatccctcagtgtctatacagttcagggccctacttttgtttctttgaaaatcaaaattcgcgcattacattgaggcattatctcaactcagcaacaacaactaaaatagatactaactagtccagcctgagtctacatcgtacaagacttttgctttattttttcctcccattttagacacactgtccctaaacaattctgccaaaggaaacaaaccctgcagtgatgaaaagaatcacggacactgggttccacgaacaataaggtcgtgggctggtcacctgcccgcctcgggcctcagttttcctgtctgtaaaatgtggccgctggacgaatcacctatggggtcccatccggccctctccctcccgggtgcctcgcagcccgcccgggctcagctgactggtgctgtggccagggtgccctgcctgccgccgctctagatggaggagaaggggggcgagggaggagaggaacttggacttgcaacagcttcaaacaggagccggcgacaaacttgaagccgtcctcctaacaataggaaagagcactcccattttcctggctcaaacttgcgggaccccgcgaggctggatcctcccagccgccctctcggaacccgctttacctttctccctgtttggtgttagaaggaggagggtgcaggaccgtttgattcccttccatctccaccacgcacttggtgttcagttccagttctgaaagcagagagaaagggacgttgcaaagtccagcatccgcgcctccagcccgcccgcccgccagccgcgccgagcggggctccgtccctggaggcggccgagcctggagacggcgccccgggcaccacggccagcgcggacgccgcctccgccccggccccccggccccggccgcgctctcgccgtcccggccccgcagtttctaaagttgcccccgccctcagcccgagcagaaataaaaaagagcggaaagctcctcacctcgtcggttcatgggccggacccggacggcaacttttaccttggtatccgacatgttggctgcgctcgcccggccgctcgccgcgcccgctcggccttaggcggcccctcacgcgcggcgccgccgccgctgcagccgcgcgcccctcgagcgcggccgccgccgctccgccgtgagctccgagaggcagcgccgaggcgcgcgggccatcccgggggagcgcgacgcggggcacggccgcggcccggggaggggcgggcgcgcggggcggggcgcggcggcggcggcggcggcggcgggcggggaggaggcctcgccggcgggcccaggcgcagctctagccgcgccgccccagccgagaccgcagcgccgcggcccctcgcggctgcccggggccccgcgccgccatgttccgcgcccgtcacccgccggggctcgggagaggccggacacggccacgcgcggcgccccctggagcggcgggacggcagtgagaggagcggcgagcagcgcggcgcttaggggaggctggagtccggggcgggacgcattgtttccccaggggacctcccaggccaagcctgcaccggcgcccgcggggcccccccccggacaccgccgtgagctcgagccgccttctggggccgctgccacccggagccccgggacggcagcaaggaccacggctcgccgcgctgggtgcgcaggccttcccctccgagtcccggcacgccgccccctctgtcccacacggagcctgcagcggtattttaagatctctgtggtgaaccgagactagaaatgaatctgtgaatccaccaccgaaacagtgtatgtttgtaaatagtgctctcccttcctttcccggcctctcttgtctcgggagggatgtcaagtgggctgggagggccattaactcttacataagaatttaatagcaatggattctgtcatcctgccaaatgcagacctcgctgccagggcggaactgggcgaatccgatttattctgtttggttcaacaagtgcttaaggggcgctcaccgagtgccaggcattttgaagcgtacagaagtcaaaaatccagagtttagatccaggaatctttcgattttgcttaaatctagaaatccacttattggaagatgcattgaggttttactgtgtgcagggtgctgttgaggacacacagaaacatgaatagcatgatgcagaggcacacgctaaggtggaagagagggcgtggagacttattatgctagacagtgtacggcaggtgctaggagaggggtccgtccgcctccaaccgaggtgatgctacgcttgaccctcgaacaacacgggtttgaactgcacgagtccacttacacgtggctttttttc

SEQ ID NO: 46001 - DNA, 553 bp, Homo sapiens
tacaagtaaaaattgcttacaatatttttaaaggaagaagtgagaagtttctgaaacctaagtgaaaagatttttctttcttcaaataggagcagatctctgtttttttttttttgttttaacatttaaataatgcgttcagcattgactaccaatagcttgatgtgaagaatttgctgatttccctggtgtaaatgctgccaccaccatggctcattgccagctgcaacatgacgtcattgagcacaaagtacaaaccccgctctctggagctggaactagccagctcccgcaaagcagcagtggtttgggttcttctactttctctctgctatttgctttgcttaggccaatactgttggccagtgagctgtatcccgcctgaagaagtattttgtctgactgccacattatttttgttttaaatttagatataaatgttttcaaatagaatgtgctgtttccaggtcaggtgcagtggctcatgcctgtaatcccagcattttgggaggccgaggtgggtgggtcacctgaggtcaggagttcgagacta

SEQ ID NO: 46002 - DNA, 672 bp, Homo sapiens
caccagaaaaattgacaccccagagatcctgtaacacttggacatcagtgtctgcatccttttgttttctgttctttctcctgctaagtgaccccttttcttgttacttttccattcaagctgctggcagaaagaagctgtctggccatgttcaggctagaagtcacagtcagctcatacctgcctaggtcagaggctccatccggtcccacatccataagaggctggtggaaaacatgctgcctaaccccaccactttgacaagtggatgtcagtgggcagggcccatggagcctgctcagcagagcactgttgttcctggaggccatgctgactgcagcagtcaaggctttagctgctttaccagtgctcccctccagagctccgtggcagggtgagtcatgctgtgggaatctcacactggaaatggccaaaaagcttctatttgcttcagtgttagtttctttctttctttttttttttttttgagatggaatcttactatgtcacccaggctggagtgtaatgactcgatcttggctcactgcaacctccgtctcctgggttcaagcaattctcctgtctcagcctcctgagtagctgggactacaggagcctgccaccacacccagctaattttttgtatttttagtagagacggggtttcgcctt

SEQ ID NO: 46003 - DNA, 711 bp, Homo sapiens
aaaaaagaaaagaaaaagaaaaaagaatcttcagtctcctgcagtgctggcacatagtagacttttaataaatagttgtccaattaattgaatgaatgaatgaacggctatagaaagcatttgcagtataagattattgaataatttctgattgttatcaaagtattttttctgtgagtgctcatcccgggcttggaaaaaaaagtgagcacattttgcaatacaagctctgctctgtcttcactgcacaggatttaacctgtactaacagcaattgattgatgtttttctgttggcacactgtttaatcatttcctgtcacaaactgaagcaaaggtcatgttagataagcactcaattaagtctttagatgatggtgacgtgtaaacagcttattagtctatacatgtaattaattttaacattactttgcaggttgctttaattctgtagtaacacagtccctgctaatttgctgcctatattccattatggttcttaatcttttattaagtccccccatccccctcctgctgttcctgccgcattttcttgtaaaaaatttcaaacataggcaagttggaagattttacagtgaatctccacactcctgtccttttgattctactatttacatttaacacacttgctttaacacttaactatcaatccccaattaagccacttttaaaaagttatccactcatccat

SEQ ID NO: 46004 - DNA, 1303 bp, Homo sapiens
tctgaagatggctgtctccacaggataaggacctgcaaacagcctctaggagctgacagcaaccctaattaacagccaccaagacagggacctcagtccttccaccacaaggaactgaattctgccagcaacctgcatgactttagaagtggattcttccttagtcaagtctccagaccagaatgcagctcagctcaactcaagcatgttgtacttggactttggacctacagaaccatgagataatgaatgaatgaatgaatgaatgaatgaatgttactttcagctgataaatttacggtaatctattatgcggcaatagaaaaccaatatagattctaataaaaagatattttaaaaatcagcatctgtaatacaaagggcactcacaacgagtgggatgatctttgctttttgaatgacaaatggtgaatgatgaggtggcttgtaggcagacacaaacaaaatctagtttaaaaggagcacatctgatttctctacttataacttgattatcttgtcgttaccttacttaaactctccatgggtgcccactgcctatgggagttgacacttttgagtttaacattcattccagctcttccgtcatctccagaccctactattccaaactcatctcttattgactttctgactcattaaatgttgaccttagcaatccgctgtcctttacatggtccagaatacctccttcttcatcatgttacgccagtctttcagcccagaatagagcagaatcatcacagacaagacgagccatggaatggcaaacattttaatgctggcgcctatccaccgagtctctagagatgctggaattatgataaatttcagaatgccgcaatcccagcaggccacctccttgccaaaagtatttaatgggttcctattttcatatttcaaatcagatcgtcagccaggtaatcaaaatcttccaagatatgaccccacaaaacacccttccaaaactatttcctattacattgccccatagcccatatcttttatttacatggcactgactttgccatctgttttttgctcaggctggtcactgtttctggaatgtccctcccttttttactgattagtcaaattctgaggcccaaagaggttcagtaacttgctcaaagtcacagaatttgggtgaatatcactttttccagtcttgagcaagtaactggatctctttgaacctcagttttgtcacttgtaaaatggggcatatgaaaatatctaccttgcggtatttcccaccatgaaataatttacttggtgatag

SEQ ID NO: 46005 - DNA, 734 bp, Homo sapiens
aggcaggtgtaaggattattaaatttgctatcatcagtggttcttcctcatttttctgaggtgcacaggttaatgcttcttcctcagaaggttcataattcacttcaggtggggtctgcaccccacttagtcgggggccagggaagatatcttctgcataaagcactagcaaaatggtgatggtttgggtcctggggtccagagctagatttggtagaggggagatttatgagtgtgaaccaagttttttacaaaatgccaaggaaagagattgagaaagccaagtccaggcggcaagtccagaaggcagaacaaggtcaaaagcaggagacagtccaaggatcgggaattgggcaaaattggaacagatggagggtgacgtgagaactgctgacacaggagccaaagtgtctgtgtttgcttttatggactcaccaggcagggcatgggggatattctggaagagcctatttccttctccttctccctttactcctgggcaggttcttttgtttcaacctctgagagtcattccaacccttcttcatcaacttggaagcttttactttctgctggggttattttttcctgcctgtctcagaattctccaatttctttaataacctggagttcagcatgacatatctcaagccttttaaccagcttgctttaaagaacagtctgtctgggcacagtggctcatgtctgtaatcccaatactttgggaggccgat

SEQ ID NO: 46006 - DNA, 1339 bp, Homo sapiens
tgcacagatgagcttgcaacctttcagttctccgaaggaccccttccgcgaagtcgacgtccaggaggtgcagggaccctgcctccgcatcagttaccacaatcccattctgaggggtggtctccacaccccaaggtaaggagaattggcctccaatgacaagcttgatctggccaaaaaaatcaaacactttgatggagcgatcgccggcgtcagtgacaaccacatggcagtcgttggtgatggtgacatccacagggtacctaatgtcttgggcagcgtcccccttctctccaaactgatgcgcgcatcctccccctgagtcaaaaatcttgacacgcctcctgccgtcgtgcaccaccacgacacgccccgtcttgggacaaagcgccagtccggtggggttgaccagggtcccccagccgccgaaggtgtggtggcaggtgagggctccgggggcgctgggggcggcgcgatgggcggccggggactggcgaagcgctgagcccaggagctctatgaggtgcagcaccggcaggcagtcgctggtgtcgcagccccggcaagctcgcctgcagaatgggcactcgagggccagagtgcgcgggtgcgccagggcggccacgcaggccaggcagaccacgtggccgcaggacaggttgcgcgggcgccgctgctgccggtggccaaacttctcaaagcacaccttgcactcgagcaggctgatctccgcctcgcgcatgagctcatgcagcgctggcccgctctccgaggcttcggccgccatggcgcgtcctgtgcactcccgccgcgccgcctggccgtgccccagcgacgctctcggtcacggtcacagtcatggtcacggggtgggacgtgcgccctgacgtcgagcgccgcgggcctctgcactgcgatctgctgccccttggtgggcacgcgcggcactgtttcctgagggcctgatggtggacgtttgcaagacaaatccacatgcgcgttgtgtagacctgtaatcgtcacagcagtcatggatggattgtgtacactttcagatgaggaaacacacctattgaggacaacaggattgctccctgtcacccagcctgtaagcggcaaaacaagaactagaacccaatcttccagcccgggtgcctagcagtgtctccaatccgcagcgccgggtgctacggctgtccgggcataaaacatggtcccttagctcatgatgcttatgatctgaaccggaaaacacgaacacactagagaagataaactccaagggaggtgaggcagatgtgtacatttcttttgtgtcttctgtcatactcatagttaa

SEQ ID NO: 46007 - DNA, 2292 bp, Homo sapiens
atcacatgacaatctgtttatagagttaattttttttgagggtaattttgaaagtaactatctcttctggctcaatgaattggttaaaatatatgtcataatatagtttaaatattctcaatttcatgaccacacttgaatcttaaagtcatagcagccctctaacaaaggctctcagctacagttgattggttgctggctgcaaaaattctatcatctctacttgaaaatcaactcccaaaaaatgcatgcatactctgcgttagtcaccgatatttatattcagaatagaccattttttaggttattatattttacatttattaatattttattttaaatttattttttgaggcagggtctatgttgtccagactggtctcaaattcctgggctcaagagatccttctgtcttggcctcccaaagtgctgggattacaggcggaggccaccacacctggcgcatttactaaccttttcatacattcttttttctttcctgctcagtggtcaaagttctcaacattcaagcttataaataaatgcatatcttggcaggtatgattgtatctgtatattatcattacaagagagttcagtatagagaatgatgtcgaggtgactttagggtaactcatagtaaaagtggcttgttaaagtgaattctctttgtagagaattactcacaagaaatactttcttaatcactggttttataacaatgattcacgataacagaaactcctgtgttccctggtgggaggggaaggttgagctgaactgtggactatgaacattgtcctgccaaaaagctgtaattcattttgaatttctctgtccaccaccatttcaaatatctaaaaattaacttagctaaattcctaaaccacctacaaaaactgaaccacatacaaggatccaggaaatgtaaaagggaaggctgttttttctccccccattggctccaaactgattttttaatttcaaaactcaatccagaaagacttcatacctgtttctgttgtttcttactgtttgagaatattatttccaattatatacccatcactaatagaaaaataaggaatttctgtgtatttcctgaaaatggagttttaaaactcacatcctgttaaatcacccaaagaattcatcattaaggcaagataattctgttaatgtttatctgctcataccatttcatctcaaccgcttttccgcaaagaggaaaaaataccctcagtccactcttgcctttaaggaaagtatctaaatgcttctttaatagcctgaagaggaaaaaaaaaaaggttttaggacaattgtatggtaggtgaacacttttcattcattatctcacttaatattcccaacaaccttaataagcagttactattaattattataatctccagcttacatatgaagaaacaggtaacttgctcagacacacacccagtcagtggtaaatctgacttacacccagggctttcctgattagtaattaaaaataatttttttttcttggggatgttttgaaaattctttattaattctctaaatatgtactattttgggggtgatggagcctctggagccatggatttttcaacattaatttcatggtacgttctctaaacgtgtactcaagcctcggaagtaaacctgagaagtgtaactcctgtagtttcttgtaattccctctgtggagatgtggctcttctaaggccatccacatgacagaaataacccagtgtttctggtatgatgatgatgatgatgatgatgtcatctcctggggagatgggcgtggctgcccagaacaaggaatgtctctaacaaccactttactcagcactggtcccatgatttattgctgctatgaagactactactacattgcacaacatcctaactcactttataatttctcgcaacttcttttctcccaccatagagataattctttaacatctgaacacatcctattggaaagcaaagtcagacaccactgattttcagtatgaagaattgtaagcataaacattgcttgagcacctgttgtaggtataaatattcagggccaatacataggtgccgtagggatcaaagaacatattttataaatctaagatgtcatcatttgtaagccacaccattatttacacactgtgggaagaaaagactctgccaattaaactacatcatgccacagatgcactgtgactcgggagacacaaaaatgtgaagaattaaatgtgcatcctaaaagttagtcaaataatgtgtact

SEQ ID NO: 46008 - DNA, 1478 bp, Homo sapiens
cttgtccatttgcctttccaaaattttactaattttgtctctcctgtcctggctatcctagtactttatgccttaaaaaaaaattctgttattttcaggagacagcaaaaacagattaaagtagatactgaaccatagttcaatatcctatctctactccacacatttgtattttcaaataattttctacagcttctttttttgcatgggaaatgcacactaaggaaactgaaaaaagacatgtacaatgtaaactaacaataaaattcaaagcctctcaactgactgaaggcacactttctttccttttctttctttcttttttttttttttgagatggagtttcgctcttgttgcccaggctggagtgcagtggtgcgatcttggctcactacacactttcttggctaacgggaccccagagtaaccttgaaaactgagttctgggccaagagtagatagagcgtcagatacaactctatacctcctctcttgctaaccacaattaggctttgttctataaggacttaagggaaaccagccctttcaaaagattctaccactgatatcaaccaaccccctgatgctgcccctccttttgtgcctgataagagatcacagaccacagaatggttctggccagtctactgagaatgcacagtaagggtttttctgtcctctgcttcaccttttgatataagagggccaaaaactccatcctgtgattgtggtaacaccgccattttttgtgcatggtacccatgaagctcaattactcatgggtactttcctcctttcataaatattcatgagtcatcctacagcttactgaatatgtatatttggccaccttcctcagcataaattcctgttccctttgcccctccctggaagtgtcagtttctggcttctggcctgcggctacacttctcagccagtcagaatggctgctctacagtctgaaaccattcatgagaaagagttctcctttctaaattatgaacttctcattcttcagctgacagaccataactgcagatccatctgaatgtatgaggaaaatgcctttcctttcaatgtcaactctgcaatattaaggacaatataacaccattattctaacattccctttaaatcattagtgaaactagtttggattatactagcatgctattattggtggttctaatttaatgattaatctgtgaaatagcaaacattgcataaaagcatgtatttcaggcaaatttccccttttgttgccaaatttggcctcagtatgcttaggatatagggaggaggcatttctctcattacctgggaacatgaattcacttcttagcaaatatttgttgacaaatggcttctgcaagaccctgatggtatcaggaggtgactctgagttttctgagaggtcagtagaaagtatctgatttatattgggtacagaaaagcaaaagaatgttgcagttttctca

SEQ ID NO: 46009 - DNA, 2529 bp, Homo sapiens
tgtaatgacacttccgtctccaacactggggctcaagcgatcctctcacttcaacctcctgagtacctgggactataagggtgcaccaccatgcctggctaatttttaaatattttgtagagacagggtcttgctatgttacccaggctggtctcaaactcctgggctcaacgtcttagctgttctaacagtttctcagcatggactccacttgtatacatcatttctagagaaataaagtttatttctataatacaaaaaaagtgcacattacaagaattaaggaagggaaatttcacaaaaatttctgcccacaaacaaagtcctcaagttgttctagtctccattctcaccttttcaaaagcttctgctatagttttgtttttaaatttcataaaattgagaagaaactttcctaaggtgcacacatcttaaaagagtatgactcggtgaattttttacatatacatacacctgtgtaaccaccgcagagcaagacagaatatttacagcaccccagtttcccacatcaccagggatcactcactatttggcagtacttattttttcccaaaaatcactaatacaccaggctggggaaaaaaccgagagtccgtttctataaaaaaaaatttgaaaaattagccaagcgtggtgcagcgagcctgtagtcccagttaccgaggaggctggggcgggaagatcacttgagcccaggagttccaggttacagtgagctatgattgtgccactgcacgctagcatgggcgacagagggagaccctgtctctaaaagaaaaaagaaaaaaaaataattaaaacacaccagtgctttggaagcactttaaatcctggacattggattcaggtcatttactgtccgacctcgttattcccagtttccgcttctgccctgaaccccacttcacagggctgattgctaggctgtctacgcttgtaagaattcctgggagccctagcacgggcgcatacactcctagcaaatcgttccctttctcacccgcaccctccgcgcccgagtgagcctacctcgcttacagctggttgccggccattgcctccgccaccaatgacgtccccaggggcgggtacgcctccgcttccacctccgccacttctccgcgccccgcctccgcccgcgccccgcctccgcccgcgccccgcctccgcccgcgccccgcctctttcccgcgccccgcctctttcccgcgccccgcctcagttcccgccccctctcccggcgccccgtctccactcccgccccgtacctcgttgcacagactccacccacttccccaagcgccggggtttgcgcagcggcggaaatgggcagggcggagcgagcgctgcggctaaagcgaaggcggggaccctacccatccctagtcctgtcggctcctcccaccccgggtcacgccgtgacaggggcggaagcggcggcggcggcggcggccgagaagaggctggggctcgcggcgcggctgcagccgtcctgtgcgcgcggcgcgcggctccggagaggcgcccgcagtccagggcggcgcgcaccgcctcgctggcgctcagaggtgggaggctccccactccgggggcgtgcgtgggggccgtggcggatttcgggtgacagcgttgcacaaagcagcttggttggggtgcaagccctccctttccccctgtgcagcgcccctcgccgtggtgggaggtgggcgggtgccccagggacggatacctcctgccccggattaaaagagggtgcggggtgggtatctgtctgaagaagggggaattcccgggctagggtgttggggcgtggggtcgccgggttcgtcgcgatgttgccggtcggctaacccccctacaatgtttcctttctgtacagcggtgccttttccccgagactcccggcacctcttcagcgcaaaggtgagccccggggcagttgcttctccgacttcgaaaagcttccgaaagcttctcggaaagcgaggcggctgcagctggcaccgggagtttggggctccctcctggggactgtcagagccgcgggagaaccccacggtcctggagtaggaactccctcgcttgttcttcccggccgatagggtgcggccaggagcccgcacagccttgcaggtgttgtagtaattctctggcacagccaccacgcgttgagacttgatgagcattgccaggttgctggggtaactcctctgggattggagacctggaggaggggtggcccgattagggtagctgttagtcaacggccgggcagctgacaggtgaaagaggaaggaagaggccgacccagctgtagaaagttggggttcagtgatgtggaaaccagccacatagaagtccagtcttcccttgggtaagcctgcaggactccccagtccactccagttggggaatcccccacaccacgtatacacacataactcaaggctttgaccagttttgttttgtgtttttaaatctattttagtggcagaaaggcgagtggga

SEQ ID NO: 46010 - DNA, 2737 bp, Homo sapiens
aaacaaacaaaaggcacaccttgtaatcttaacccagattgtgaccacaggctggttgaggcttaaaaaaaatccgggtttaggaagagcgcttcaacctcttcccaagtgtggctgagtcgtaaacatatacgaaataaccgcagactaagctaatatcaaagaatgctaagagatgcgactcggatttttaaatgtttggaaacatgtcaagaagcgggtacacctgaaacagacactgcatgcatcctggataaactgccgcagcacactcctctattcagtcaagtttccgtttcacacctccagtcaaatcagggctcatatcgccctcccttaaaacagacacaggttcgaaaccgagacagtgctgggctcacatttaactttctttcagagttcactttcttcatttttaactactttctcaagtagcaacagctttcaccgctgtttgccagggagggaaactttttggtaaatgtaaaaatattcgaaagtattcaaatacttccgggtctagccttataacttcagtcttaacgggctgcaccaagaccttacaataacttcaaaaggcaaaagatgtgtaatgaaaaggacaaaattagaacatccacttagcaacttcaaaggtgcacacacacaggtaaaaaaaaaaatcaaatccaagacctacaaacttcccgtcaaatgatgaaatgttaacgaacgtttagagcggacgagaagtcggctgcactccaatacatctctaccacgctaacaaatactttaaaaaccggaatacacaaagtcaattctacgccatcgctcaaaacaaaagcagataaattgtgcacacattctcgctgaaaatcactccgacttcacgcctctaaacaccaaaagagcaagaaaactgtttcctgggtgaaaaatacaaaaaaacttcggtctgaaaaattcatcagttgggatgcgactccccccacctttttcctcctcctcctcctcctcgtcgtcctcgtcctcttcctcctcgctctcctctctgggaccgggcatttcgggttctttctcggacgcgggctgggtgggggttccctccccctccgcagcaggggccgaggcggacatgctgtgaacctgcatgcgggaagaaagccggacgtctcggtcctcctactcccgcaggcaggaccgggcggccaccctgaatgatgctacccttcccgcgggacacctgccctgaaagttgcctcctcccatagccgggaccgcagcgctcagtccccaggggcggcttccctcccgctccgccgccgccgtccagggattcccgaggcgggaaaccgcgcccgctgccccgcgtgcgcgcgcgcccgcccggcctgcgctgttcccggcccggcccgagctgccggccctccacgtcccctcccccgccccaggccgccgtccaaatggccgcgtccctcccccgtcggccgcggcaggggcgaccgggcctccggcgtcccgaagcagcccttaccgcggatttcggccgccgcgggcctggcacgcgagggcacgaggaggttctgggaggcggcggcggccgacgccgaggagaaggcgcgcgggccgctgtctggcgtgacgctcgcgccgcgcgctcggctccccagaatcaacaagattttcaaaatggcggttcgggaaggagagcgggaatgcggcgaccaatcagggccgcgagctgggagttggcgggcgcggggcgggggaggcggggcggccgggtgcctccgcgggaagctcgggcgggcgggaccgcgaggggtcgcctcggccgcgggcggagggatgcgcgcgcggggctctccccggctgcgcctggagtgtggtcggcgctcgggccccggagtgcgggcgggctgtgtcccgcggggcgggcgggagcgggaggcgaggcggcctggcagcgcggaacggaaggacgctagggggcctgcgtgtttattgtttccacggtcgcttcctggaaaagatgatgagcagtcccgggccgcggaggggcgcggcgggcgcggtaaagaagtttagagatctccgaagtcgctatcgacagtgttactctgaggcggaggagaattaatcagcggtctcatcaatgctccagaaatcatgctgggtgatagataactcccaaatctgtatttctgaggaccgcatcgcttgtaaggtgcaccgaaaggaaaaagatcctacctgccacgttaaaggttcacatagccagccacatagatttacacccctgtaaatataaggggagaggctccctcccaccccattccttctcctctcctctctcacacacactctctgttttataatagaggaaatatgttatttggccgggtccagacccttctcccagagttctaggtcatctatgcagatgctttttacacattcaacactgcagacactcaaagcagtatcttccctgctcaatgctgccttcttttgtatgtgatttcctttattttctcccaactcttcaaccactagctcacctgaaggatccttgtactcagtggacttaatagaaatgtgatcagtgaaatttgcctggactctgggttgcaggacaaaaattagacatttcctttgaatcttcccttttccttttgttccccttccaaaacatacgcgaatagtgtcatttctaccctcaaacggtatgccattttccacactatttatccca

SEQ ID NO: 46011 - DNA, 4129 bp, Homo sapiens
ctcaaatatcctaccgtgggttcttttatcatcttattgcccctgtcctttttctcttcctccctgactggtgagctggtcctcctacctgccctagcatggcacatgtagatacactgtgttattcagcactttgctttgacctagaggttttcttcaacttggagggctgagaagcaatgtttgcttgtgtcgtttggaatggtgcctgttggcgtgcacagatcctttccacaaagggcctgtgagtcccttccttttaggaagcacattcctgacagtggttgcaaaagtagagagggattgcagagtgaacacagattcttgtgtcagagcgacattcctaaatggcaatgttcagcagacttaggtgattgtgatctatgggggatatggggaatgagtaggtatgcgattcattatgaatgtcacacaaatgaagtgtccaagggtttggagcaaggaagcacttcataatacctcacagcttctggattattttgttacatttttgtttaattgagggtacaaccagttaagttacaaagcacttcaagtgaaatcattgtttcatcaagaagtgtctgtattttatgaggtaaactaagattattcccgatttgattcacaggtattctaatttcatcattagatgcaaaaggacaagtgaggtacaagctgttttttgatgagatgtgcatgggaagtgtttctataaaacagttgtctgccacgtgggaaggcaggtctgggctgttagaagtagaagaaagagatttaaagagctgggaaggagggagaaaataaagaaaggtggcctgtgaggatatgtacagacagagaggtagcaggcgcttaaggccaagaggtgagctgtccctgtctgggcagaagaagtgcgctaggggcagctgcctgcaccccctgctctgaattcctgcaacagcggtcccaggagaacaagagacaggtcctgacaagcagtagagtcggtgcagcgcgcccgggttcggatagggttaaggccaacacctgcagctgaagtacgacccacatgggaagtaggaagtgcggcgcctgagcttcctgtataaataaacgcgctgctaccgctgctggcgagctgtgccccacgctcccgctgcaacagtcccgggcatcgcagctgccagtcaaggctaggaggcggtcggggactccgcctcctcccgacccgtaggtctgggagcgcaagtcctgttgcagtcttgcaaagtgtaaagctgtcagccgcagagcacggaggaaagacggagagaatggaagagctcctgtccggtgtgccagcagcccggactggcggtgagcgcgagggaggctactgagaagcccggcgacggaggaacgcaggtctgctgccaggtaggtttagcgagctttttaaaggctacaggcgttgcaagaccggaatggtgttgctggactaaggaaaaaggacaggaaactcactgtgacaccacaatttttcgattttctgtctctagtgctcaaaccatacagaactgaattcattctgaatgccttaaacacctgttaacttagaagaaaaatgcctttgttaaaggaaagtagtttcatttctaataaaacagtttctataatagaatgtattgtagaatccgagattagaccagacctctccctaggtcttaaggggagaccaaaagttggcataatctcggattatgcattatagtgcttattttatcaggtaattgctaatgaaacagtgaaactctgatactacgagagccattctcaaatttaagttaaaatcgaactgattgtcgtttgtgcagggaaaaggtaggtatcttttgcttattctttctaaaacaccttttgtttttctcatgagtttcaaggatcctgctgtaagtctactcctcatgcatatacactattcacataaagatttcccagaaattaattcccttctctgggaaatgttcttttttcatgttctcataacagactgtcagtttcatattgctttctgccacatgtatcttatcaaaacattagctctgaggttcttaacaggactatctctgctcttccgatttggcatttctggacgtttatttgaacattgagaggtataaattaaatggcaatgtatctaacatttctgaggaagcagattagggggtgtctgtgcccagaagcaaaataaatgaactttgggatgactcagtttttagggtgtgggtaagaggcaaaaggaacctagccagtcctaactgagttgctggctaattagagtatctgtctgccgcagctttcactgaaatgagcctcttggtccctttcacatcaaatccctctgtgagtccctccttctccttagtttatctttccttcacaacctgggtccttttcatggacagcagtgccttaaatacttctaaaactatcctgagggggagaaaaacctatagcagatccacaaagccacttgtagataattgtattatgaaatccaaggtcatggtttcacacaactcctgctctgcccttgcacacctttgactggcatttttttttttatttttgtcgtgggcataaacttagaaaagtgggaaagggaaaaacctcagtttcaaaagtagtctctgactaattaattatcttgattaaaaaaaggtaaacatatatagtgaacgtgaaaaagatgttgagtagtagaattgggttgcttggctttttatttaaaacaaacaaaactcaaccaaaaaaaccccccaaaaccccaaacaatcaccctagataactttctcctacactactgtgctggaagtcgggcttgagtgtggtcaaatcctgcccatttacccagagttttacaaatatttacagtcatctatgccaaatatctttgtgctgagtcccaaagaacattctcagcattcaaaaggcccattctcatgaatggtttcagttcattggcaatttaaaggcattcaggcttccaaactaggtcagcttaagacatgtctttttaaaataatcagtttttgggtctcagattatgaaccaggtttttggagccaaactctacagcagagagaagagtatgctctctctggaaagaaaaagcttattttatctacctggtatgaccatttaacttcctgaaaaacgtctttctcctcagtagtatgaatatttttcatctgaggaggtgcacttaaaatttccttcttgaaaagtcatttcaatattttagacgtttagaaacatttatatgtatgtcagaatcctttctccgaagtgtttctgctaatcctggcttctttgtttcccctggccttgactttatgacattactttcttggagagtgaagtttttagtgtttgaaatctccagtttgagatagaggtcaggaatcatgctgaacccagatgttactgaaggaacaaagtctgagcagttttgggactaagcctactttgtacaactgattattttggatgtgggaaaagggccaagctgccagacaagtcatgcttttcacttggactttggggaataggtatctgtagccattgctcctaagtactgaaacatttctttcaggggtgcctaccttaatttatagaagctccttacctgaaacaaatggtcaatattttcagcttgtgaatttctggaagtgaatacagatgagaaccaggcctttaatattttctctcctccaagtacaatcagaaaagttatccactctactactgagtgactgatttgctaggtgctaggttagatgctgggatataaagatggctaagatgtggtctctgtccggaagaaattctcataaggtcagaagtgacttgggtctagagtggtagttctgaattcacattgctttgccagattataaaaagtacttcgatgtttgtcacctcgatcatcttaattttcttggtagtgttaccttgaccatttgaccattaagaggtatatgacacctaagttaatttatgtaaatattttaattcataatttttacctttaggtgtatgtgggaggtcttggactaaagttttagttttattaactttggcatttgctatttacccagtcggt

SEQ ID NO: 46012 - DNA, 1087 bp, Homo sapiens
ggtggttagcagtaaatcagtgaatttgtctttgtttgtgaaataacttcaatatactcactgcttatatccattaagagatttaatgacaatactatggtgacttttgtatttattggtcaagtcacaggtttacaatgccgattttattggcactatatttttccactgacaacggagccactgcagggtcagatggcatctgtggaaaaagagcaaacagtaacagcatgagaaatggattagagatgactcaaggaggagctggcttcctggacctatgatctcatccatgcctaatgcttaccacttacttattcaaggaaagtagtaaaatgtggcaagagaggaaagaacagcagaagaaaaccatactattaaggccctaatgtctttgtcatagcatcatagtcctagaattgtaagtgaccttagatcttctagttcccccaccctcctaatgaaagaagtcattttctgggatgccagtatggtttggcatttaagagaatgggtctcaagtttggtagcttaggctttatttattcaacaaatatttgctgtgtcttgcatagttctgatggtttgaatatagtggtgaacgatcagattaagccctggttttcaaataactcaacttttcgtatgagacatagatgctaacaagtaaatacagaagtcaggtgatggtttgtgctatggaaaaatagggtgaggggggtcaggagtgctgtggggaagagggacttctactttattagatgatcagggaagtctcagtgataaggtgttatttgagcagagacctgaaggaaatggggaacaagccatacagatatctgggagaagagggttgtaggcagagggaagcagtatggaggtcttaagttgggagtgtgcttggtgtatcctgttacagcaaaggaggctggtgtggctggaaaagtgtgtgtgtgtgtgtgtgtgtgtgtgtgtgtgtgtgtgtgtgtagggggagtagtaggagatgaaggctaagtcccatgatcttctctctgcaagctggagacccaggagaaccagtggtgtatttccagtccaagtctga

SEQ ID NO: 46013 - DNA, 1502 bp, Homo sapiens
ctctgagtgcttccttgtgcaggtctagcttacagagttggctgtgctccatgtacctgccttcttgatttttccaaattggctcagctgtgattatgcctcctaaattttatctatgaagagtagcctccttagtgacgcacttaatgcccagttcaagtacaattgaacctcagtgtccatgggttctgcatttggggattcaactgcccatggagaatactcagaaaaaatatttttactgaacacgtgcagactttccttgtcattattccctaaacaatatagtataatgagttacctagcatttgcattgtattaggtattataagtaatctaaaaatgatttgaactatacaggagagaggatgtgcataagttatattttagtactaccccattttatatcagagacttaagcatctgaagattttggtatctgcgggaggtcctggaaccagtgcccttcagatactgagggatgactctactgttcccttgtataggaaatggtagaaaacggcagcttccctttcagtgtcatggaagctggtgagagacagtgactcaggaggacttgtggctagaggtgaacacactaggagccagggaaaagtaaaactttcctctattgcatcatctggtacttttagcttttgctctgcagagcttttccaatgtacttgatcttgtaatcatgtccaacatgaaattatgagaggcaggacacagattgtttattccaatagcattacttcaggcgaagcccttgcttgaagttagtagccctgttaaaaaaggtgatgtctaatttaagcagttcccatgtagtgttattgaagtagcatccatcacttcctgggaaagtttgaaccatttgtctggcctgtgcgaattttgagtggtgagtgcatattcctatttgaatagtacctgccattacatggcctgagagttttaacttcttccaattgctaggtgtcagtggagggcagggaagagcttctcactcactaatcttctttctaagccctggagcactgaaatgaccagcctgccttttactgctagtgccgcagtgtgcaccagagaaagggtgggtgcagctgaatggaggcttcagaatttctgtaagaagggagttagggcagggcattctggagacctggggtggaggtatggtggaggagggatcgagtactggggaatttgaagctatgtttgcaaaataaatacagtttttactcagattgcatatttagttgggtggctttgggaaagttggctacagtgatagggaatccaggtgttcttcccaaatcctctgcctccacttgccatctcttaacattcttccttcccattatcatggtgggaagctagggcaaaggaagggtgagaatgcccaggcaagaggccatattcctgttactgtggtgtaaggatctgaatgggaagggatgagtgtgtctgtaataacctttggctgcaatacgtgttgg

SEQ ID NO: 46014 - DNA, 508 bp, Homo sapiens
ggatgctatggcaagaatctttttgtgtttggagtgtagtccatttgcaatagaaataaaaaaatccgtcaccaaattgtaacctggatgttatagcccagcatctagaaatcctatgaaacgtattagcacaatatcttgccattgtcccatctaggaaattttttcttgttgtgaggtagggaagtgaggaggaaagccatgccgaagcaaatgttagaatcttaggcatcctatttgttcatgccatgggtatttgctttggacttggagtctgtactttgaaagaggcctttgaaaaacaaataattctgtgtgaattttcttgtagcgtgcttcatgaaaatatctacttatccaggtttgcaaatgtacatgttcatttgaatgtaaatcaccatttcttggaaccccacgttttttcttaaaaattattctgaattaaatgtatatttctttagccttccctacacagtactaataaaagacttttctttctgttcatgaa

SEQ ID NO: 46015 - DNA, 617 bp, Homo sapiens
tttgccctcagttttgcttttttttagctgttaaatcaggaattcgggctttcgatgagaaggaaattaagttgagtgttggtcgttttatcttgtagttccttaaggacctgacatgattcaagaagatatatttccttttgtggggagtggaggggtggttaacatcaatagtactgaacacattcagataaaatgaacatgaaggtatttttgaggtaagttatgggacttctgattattgatcagcctcgacttatgttttgaagacaagccaattcattttaaaacaagttcagaaatccacataccaccctgtgtggtgtgtcctgaattccagcctggccctgggactttggcaccacaagggcatgtgaacagggtgctgggagagggctggcaaacgtggtgccaccctggccacagaacaagtgtgcagcgtcctctgtcctcccggccctctgccaatccaggtggtgtggggttggaggcagacgcccagctggcaataagatggcttcagttctaggcctggctgtgctcttgactggtggtatggtctggggccagccctttattgtatagcgtcatttcatccctatctcaggtcaggctta

SEQ ID NO: 46016 - DNA, 801 bp, Homo sapiens
tctcagtagctcttttcaattcctctccatcccaggttacctctacggcattgaaattctcagtgacagagaagttctgggctcttcatccctgttttggggcagggaatctctcttttggccttgggctgtccctagtaaggaaggagctctaacaaggcttttgtgtgtgtgtcagaagacggcccgcccggcaggagcacagcagctctgttgtgggcccaagaggaagctctgtaagaacagtctaaggggaggaacaggggttggtggacgtgctgctaagtcacattaggggattccagtaaacacaggaaaagaatgtggtggttccccttcttgcacaacagcctagaatgcactttccatacagtgcatcctcaggaaggattaagaaataaggaattaaggacatggttttaggccctcatttctttgcttcttagagctcttctttcctcccttatcttggggtttttcaaggtattcaaagtccaaggttgaagctgggatttaggaaggtcactctgggttttgttcagctcaaggtacaccttgtcttaggtattcaagggagttcaagagagggcagtggcaatgggctgagagaacatctaccttcatcctcattcccctgttgccagcagcgagatgaccaatgctggctgtagatatggttacctttggtccccatggaaggtctgcaggcctggaggtgcaggtgtgggacatcagggcacccccctggcactaccattttgttcttcagggctccttttccacagcttctggaaagctctt

SEQ ID NO: 46017 - DNA, 1002 bp, Homo sapiens
ttgaagtgagtgtcagaggtttggctttgtctttgcaaaaaaatgggagagggtgagtgccaatcagagataaggaagaggataaggtggaacggccgagtgacattagaaaggatgggtgggctgggactccatttacattgtttgctagtctccagtgatccagagttactccctctctgcaatcccagagcattgcttatatttctggctaatcaggggtgtccctccccctaaactgtgggcattttgagagcaaggtccttgttttatgcattttttaaatagcctgattttcctcattttccagcttaaagatcactttctttaactgtagacatttgtccctcacttccctgggacacagtgagagccatttcccaaacctggactgcaaatgccaggcctctctcacttcatgttgagtccacccaggcttgtgtcaccctttgagggctggtgactaatgtggtgactgttagccagtcagagaagctgaagtcatgtagcaattacggctctacacacacacacacacccccactgttttatctgtccccctttatctccccccatcttcctgtcattggaacaaaaaaattttctgacttcacatggccagcacagctgtccaactgactgaacacacagaagcaaatgaagtcagtggaagaatgagtcaccacacagcagtgtcttttacactcgcctccaccctcccccacctgctcctgacttgggattgactgctccggaactagcacttcaccccctctccaagggcaatgtgcacggaagagcccttttgagagaggaagtaactcacttggcaaatttgttgttcattcctggtccacctagttcagtaacatcattaagatccaatgaggagatagtggggcttaaggggcatagacaattgagcagcctagtggtgtttaaatattttctagaaaaaagacaaacagtatacaatttaagaaccacatccatacatttagt

SEQ ID NO: 46018 - DNA, 697 bp, Homo sapiens
ctgaatactaataatagagttgctgtctgtgtttggtgagactacaaattcaattaattccaatgctggttccaataagctctttatgagtctaaagggattattaacactgtgaagtctgaaagattgaatcacaataacaatttcttgcaagatttttgaagctttgagcaggcttgctttcatggaaataataatctgttaacctaatgcagtagacggagcaagcaggagagagggagcaaaggaatgagggataaaaggtggagaggggaatcacatgtctcattctgattcatctgccaagtcaaagtctgagctcagtgccaatgtcaggtttgtttgtttggttttttttttttttttttttttttggctgaccccaaaaggatgagtttcgtttaggatccattttgtaagactgggatatttgacaaagactgaataaggctgggatctttttgaagtccacgtgtgcaactgtaaataaactgacttggtctctatctaggcacctagactgggcaatgtgtctaattggcagacatggtgctggtggtggtggcactagtggtggcagggaagcgtcattccataatctggtagtagaaaaaaaataacaaattatttgagaatgcccttcaaaagaagtaggagctaagtctctactggtttgttaagtgattaatttaggtct

SEQ ID NO: 46019 - DNA, 817 bp, Homo sapiens
ttgactcacccatggtttcaaagttttcacaatttactcttgagtcatagatatgttttgagaataaataaaatcatacctgtaaaagtattctgagccttgatggagaggagttatatgaattcaaggtggcattgttaaccaaagaagccattactctccacataggagtacaggcagagcataggaagatccctgggagggtgtcatctttcaaaacctgtagttcattttacaaataacaaagtgaatgagcactgtctgaattgtagggtagatgcctgcagatacgagagacatcttgtgtgtgatgccttatttgacagaagggaacaatatagaaatgcatctctaactctgagattctttccaagaagataaaataggatttggtctactagagtggacatctagttaggctatgatcatgatttaaactttgaagctgcccaggacttgtgaattcagagattagcccctggattgctcatcagttatgagtcataggactgtgacctttctcatgttgtcacgaccaagaggtcacaagaaccagaaaaatctaactggaggttagtcttagccaaatggagactgacaaactcataaggggaattgagatcaatatttctcttcatgtgtttagttctaagagcttcagagaaaaaaggtttattaaaatctcagagcataattggtcttacgaaagctatcagtacactgaaaatcaaattgtggaagagaagttaattcatttcccaaagttagcattctctcttgcttaacctaagtcagtagaaaagtgtgacattggatt

SEQ ID NO: 46020 - DNA, 1409 bp, Homo sapiens
ccagaatgtctgccgagcctagcatgggatgctgcccagcaaaacagcacccagggagagggcgactgaggaagacagcctgcaagcgcgcttcagaaaggactgggaccagagccctagaaaactacagcgagtggattccctggcaggggaaacccgcgagagcctgggaaaaaaaaaaaaacgagagggagagaaaaaaactcacccgggcgccctgaagcccagcgcaagcaagcgagtgagcgcgcaggctggctgggctgctccagctggaagtcattgtgcgggctggcgtctgcgttgtcagggcgaccgcccggccggcgccagcggagcgggggaggcgggctccgtgaatgggtgacgtcacgcagccggcgccaggcagtctgggcggccgagccaatgaatcagctgtccgggggaggcagcgcagcgcggcgcgcgggagctgggtgcaggaatgcgcctggagccgcgcggcccgggagggcgcgagacgtctccgcccgcctggtcgccccgcggcggccagaggtcccagcgtcccaggctcggccattccggtgccccccacgcccagtctgcggctgtgcccgcgtccctagttttccgccggttacccccacgggcgcgcgctctgcggggaggcccacgagctgggggggccgctggggtggtgtcaggatgttttcacttactgcgactgtggcacttatttaaaaggaaacatacaataaaacttgtccttgtagataaaatagactttgaaagtattgatgaattcactgccaccttactgtgctctccgcattgtgctgggtgttgggtatcacaaacaatgaaaggaccaggactcggaagttcccaaaattgaactgggtagaaaaaagtgtaaggaactcatgattcagacttacagccgactgctcttccaatattctatagtgtgggactatagggcgcctttaaggttctagaaggcaaatggctccaaagatttccaattttttggtgtttttgtgttttgcattacctctgtcctgctttgctctccattacagtgtcctgtaggtggccaagtactgggttaaggtcatttcagtatgcccagcatttgacgctctccctgactcctggtaaggactggacattgttgatgggtaatccacaatgcaagagcaaataattttaaggctagagtaaaaggagtacttctgaattcctaaacatctttttgggtgcttacttgttggtttctggtggtttttcaagagtagtgatgcatcattactgaaactggaaaaccagagtgtggcccagactcacattatagtagatgtcgttaaatcagcccttcctgctgaagtctgtgcccccctttttaaatctggaagatgagatct

SEQ ID NO: 46021 - DNA, 925 bp, Homo sapiens
aattgttacaaggaccagctatgacactcatgaaattgagaaggtaacttaagtattccaaaaaagagggtttcactctgtgaaaataaagtaaataaattgaaaagtcttcagtctttgctttttcttcagaatctgtaaataagcaaacacaaatgttatctctgtagattcgatacatgacatgacctttccttgttttgtttctacaaagtcagccgaggagaaatcttgtggaaaggaaaggttaaagaagcagggggctcacagcaggcacagagctccatgctgccctctgctggccagacacagccgtaggcactcagagctgggcgagggcaagtgcaactcaggctgggaaatgtccttatctcatcaacctttcctgtctacaggacaaaacgaaggtaataaacataaagcagggcggaacctgacctaatgttagcggatcgagatgcttccaaatgggaaaactccctcccgattgccaacataaatacaaaacaaatgatgggtggaaccagtttccactgaaagaggccacgcagaagaaccgcagtagcagcctgttgtctgctttggcaaccaggcctgagttcctgagtaacagaccaaggtagtggagggaaaaaagtctgtagagaactgttctgtgtggtgctttaatggcattttggaaggcctgttctagcaagatagaataaagactccctgaaatgtcattgctaaccagtcgccggaattatcccctatagcagggattcccaacccctggggctcagactggtattggtctgtggcctgttaggaactgggccaacagcagcaggtgagcggcatgtgagcaaacaaagcttcatctgtatttacagcctctccccatcacttacattaccgcctgagcgccacctaatgtcagatc

SEQ ID NO: 46022 - DNA, 2224 bp, Homo sapiens
aaatgtaatcttaattgtgggaaaattacaaagaaattatcagagttttcttctttttatcattcgtccgaatcagaaaaactcccaaccaagtcacatccatgctttctgtgaaatgtacacactaacttagagtcaaagaagctgaagtattatcttaaaagcaatatgtcaactctaaaactgtatattcagctaaggctgagtagggtcatcaaccatgaaggcaattcaaaatcatgcctaagaggaggcagaatatttctggaatttactcgttcctcccacacaccaggaaaaaaaaaaaaggcgagtaaacattttgctgcatttaagggatgttccaggaaatatggtaaactgagaatgctttaaaaagtaaatttaggcaacgaagctgcttaaaaagaaaaaagaagcagtgtttttaaaaactcatttttataagatctcatcaaatagtaatcgctggcaatcctagaaattaaactgattttggctattgatttcagttgctaatgtctataaccactaccaaggggactttccagctacaaatagagtaactaactcaccctgctttgctccggactctctgattttggcactgaaagtcacatcttgtgaaaccttttagtactgggcaaaccaggacagttgtttaccctagaaagactccatccttggtataaaactacctggttctctacagaatgactaaatcaccaagtatgaactagggatacactgggtcaaatgaaattaaatcagttcacaagctttaaggaaaaataaggaaactagctgtcagagataaatttcaacctctcaacatttaaaaaaaagtcagtcaaaaagtgcttgttagagcagtacaaatccacagaatatacttttactaattgcacctggcctctccaaagcccatattgaaatcttccgcccagctgaaataatcttcctccttttcttggaacccagtttgaacaatgtaaatcacactttctggccatttttaggcagtgcctgagtgaagaaaatgttcagttttatacaaacagaagattcttccttttcccagctttgttgttgttgttgttgttgttgttatggagtctcgctctgtcacccaggctggagtgcagtggcgcgatctcggctcactgcaacctctgcctcccgggttcaagcgattctcctgcctcagcctcctaagttgctgggattacaggcatgtgccaccacgcctagctaatttttgtatttttagtagagacgggggtttcatcatgttggtcaggctgatctcgaactactgacctcgtgatctgcccacctcggcctcccaaagtgctgggattacaggtgtgagccaccgtgcctggcccctttcccagctttttatagggaattatcattagataattttccaagccaaaaaaaaaaacaaacaaaaaccaacctagcatttaaaaatgattaaccagccaatactatttaatctttcattagcttgtgagcttctcagagattaaaccaaagctaaaaggatgtcatttctttttaacagatttgaaaacaaagggcagagagtgtcacaaattaacttaaatttaaaacattgtaaagataaacagaaaacacagagttctcagtacaaatacgtcagcaaatttagactgccgattctgcaggaaaatggtgaatcatggctggaaaagtgaaaggctatgattgccgaggcctggaaattttgaacaagataaagcaagatctgccagcatttgtctaaactttggactgtgtacatagtataaaaagaagagctctgcatgtcaggctcactctgagaaccaaaaggagggctgctgttcttaccatcatgaacctggaatgccaaggttgtgatcttctgagtgacaatcatcagaggcctggaaggaagacagaaaataatcaagattggcaagaaggccattgatgtggtctggctgtgcccccacccaaatctcatcttgaattgtagttcccataatccccacatgtcgtgggagggaccaaatgggaggtaattgaatcatgggggcagttacctccatgctgttctcgtgatagtgagtgagttctcacaagacctgatggttttataaggggcttccccctctcccttcactctgcagttctccttgctgctgccatgtgaagaaagccatgtttgcttctc

SEQ ID NO: 46023 - DNA, 1019 bp, Homo sapiens
ggagagaaagaagaagagaggagaggaggggaggagagagaagggaaggaaaaggaagggagggagggaggaaggaagggagggaggggagaggaggggaagggaagggaagggaaaaggggggaggggaggggaggaaggaagaggagaggacaggagaggagaggggagtgtatttggttgtttcatatcactaaggaggcagtaagtacaaatatcatcggggttttcccaatgggtaaaataaagaggttaaacaaggtcatttaaagagagagaagaaaacgatggaacagattcccaagtaacatcttttcccaacaacctatgttgtctcctaaacaacaacaacaaaaactgtcttgaacagttattttcctggtggacttaggtaaaaactttatcagtccaaagtgataaaaacgttatcaccccatagccatatacgctctcctgtataccaataatactacttgctatttaagatgctgccatgagtaagatctctggggacaatggaaaatgcagaaccagggctatattttcttatgcaacaccccagggtgtggccaattatctcagagtgggttgtgaagttctcaaaagtctcaaaacaaaattaattttaatttggtttaatttgaaaataaaacacaatgccatttagcttttccaaaacagagatcttatggggcaggctgggatacagcacaattgtcacaactccaagagtgcagggacccaaagtttggtgaccattgtgcaatgtgggactgacgaaataggaatatctgtgattctgcctggtccctaggaactgaactattttgagcttctattatgtaatcaccttctccaaaatatgtgtgtatattaaaaaggaaactctgatgtggaccaagagtcaaagtaactacaattctccgttaaaaaaaaaaagaaaagtaaagaaaaagaaaaaaccttatcccacccaacagcaaactagacaacagttttcaaaaccgggaaacaagtta

SEQ ID NO: 46024 - DNA, 409 bp, Homo sapiens
gaaatgaccaggaaccagtttgatttagcctaagctgagtttaatgagacatataattaaaatagaaatactagcaaatgattaccttgagccaatcagtttcaggcagtgctaatagcaggttaaaaatagaaacaggatgatttcatcttgcctacttctcagctgccaaagtacttgcctgttgagggcatttcccatcttgtggctgcagtggggagagatgaattatgaatgacaatctggccacaacttcgactgttatggtgactccccgctccccaggttccacactaagatgaggaagcccaggccacctctggatggccagagcatctcaggaaggataaagccaccacaggtggaggaggaaacgccacaccctggcccatttcacctgcccagggtg

SEQ ID NO: 46025 - DNA, 2875 bp, Homo sapiens
ttatccctaaggcacaagagatgagggaatagttaatgtcccttacgtccatgtcccaagttacttctctccatttaaggggacactagaaacaaaccccaagtcttcggcctcccccagctcattgctcttcccctcatgggtcccactgtaagtagcactccggagtgtccatattcctggggaatgtgagcagagcagacagtgtcaccatggaaggacccctctccaaccctctcactcccccaataccataactttcagcatttgctaaaggagaaagtgtagggtgaccggtcccccaccaggttatttaagggtgtatgtccgctgcttgaaccttgaagggtgggcagtcagccaaggtcatggtgctcagccaaggagcaggtgttcctgagaacctaaacatcccggagagtatctgcgaacatatctacaaaaaaatacacagttgcatcactcaaacacaggaggcaaagagccagaaagtcatctcaaaagcagtttagacacaagaggtgatgaggatctctagagctgtcctgctgccacccaggagtgtcccatatgtaagtcctaataaattcacctactcgccaagttggacttatctgagttattctttggtctctcagctccttcccagtttgtggaggagttataactccagatttttctcataacacaaagccatggctggaagaacagaaacaaagccttcagaaaaggcagaaaggaagttcaaaagtcaccagagctctgtatatacagacatgaatcaatccctaagagacactgttaagttgaaaggaagaaaggaagaaaagaagggagggagggagggaaccatacgctatcacttatgtcagaaaataagacaaaaagattctgggcatatgtagacacagactatctctgaaatcatgcaactaaaccatggaaatctggccagctggaaacaagggaagcaggggtgagagagatggacctttccttatattccattttctgcttatgacttcgatagtaagtgcctgtactatctaatcagataagtgatttttttttttttttgagatggagtctcatactgtcgtccaggctggagtgcagtggcgtgatctcagctcagtgcaacctccgcctcctgggttcaagcaattctcctgcctcagcctcccgagtagctgggactacaggcatgcatcaccacacccggctaatttttgtatttttagtagagatgggggtttcaccatgttggccaagctggtctcaaactcctgacctcaagtgatccacccaccgtggcctctccaagtgctaggattacagagctgagccaccctgcccggctggaaaagtgatttttgttaactgtatctatataaaataaaagctttaaaaaaatcaataaaaaataaaaatttaaaagaatgtaatagataaataaaataaaaacagagagcaaaaaataatactggggcagggggtgggggagtcttaggaacaaagaagtctcaatctagtgacactcacagttaaaccacttcatgtaatttcatgaaatgacttttgagtttagcaacttcctgtaagccttagcaaccttttgctgtgtacctttgctgactcatctgtttcaagtcagccacagaatgatgaatgaaacaaacttaaaaaataaataaacaaatgaataacagaatattttaaatttttaattccttgtttgaaataagagtttaggacaacttgaacacaaacttttcaaatgtacccttgctcttctccaaattacattagaacctgagttccctggttttcgttttgttttgtaaataaacctgagaatggaatatttataataaaatgatagtttgctggaaatccccagcaatatcagcccagaaaccttcattcaactttaaactgttcaaggtgattgtggactttcaaaaccatctctcaaattagtcagttttactaaaccataaaagaagattaaccactggtaactttaaaaaattaaaaacagagctccactaatacaaggaagttggtaaatgatttatcaagggctttttttttttttggataactaaaaatcacattgcaaataggttaatgaattaatctttttgcagatagttacatttcttaagcccaaagaaatagttatcttttaataaagcacatttttaaccagtacaaactatttggagctacttttcccactgacgactctctatccttgtgtttgcctggcaaaactactagaaattgacattaatgagactgcaataagttatccctttatcttgtttactaaaagagctgacttaaaatagaaagcctttgaaaagcacacagccactgttactaagtgacataaactgaattctttatacaagtcactggtacaaaagatatttccagattttatctctttagatataatcttttcatgaaattttcctttataaatgtaattcctggctgggtgtggtggcttccgcctgtaatcccagcactttgggaggccaaggcaggaggatcacttaagcccaggagttcaagaccagcctgggcaacacagtgagaccctgtctcaataaaaaataaaaataaaataataaatgtaattccaaggccaagctacagaatacttgagagtatttgactatatggcatctttcgtatgtatgacttgattttagactgctaaaggaaatttctacatgttcacagaaatctgaaacaactgggccaaaaaaaaaaagatactaatagctgcatttataactggaggtgatgagtatatcaactgcacacaatgaaaatgggaatagagtatgtcatctttaaataa

SEQ ID NO: 46026 - DNA, 1764 bp, Homo sapiens
caaacttaaagaaaaaaaagttcagtagaacttgccgcgcaggctgtaccaatattttttcacacttacaaggagaaaaacactaacaccaactcaagaagggaaaacacacacacacacacacacacacacacacacacaaaaaccaactgtctagtgtgtggctgtaaaatacgccatggaggcggagggacggtggctaacactttcgcccgccccgtgcacgcgatcgctggggagctggggtcgctgcgctcccggcctgcagttacctggtccagcgggatgcccaggagctcgctgagcgggtgcaggtaggtggagcccgtggtgcggtaggaaaggctggacggctgcggctctgctgccatcctgcatcttcgggaggtggctgcccctgtcccagcccgcaacaccccctgctcggcgtcctcccgcccgggtgctcttgggtggttgccccgagaggcgcacggccgcctggttcgcgggggagcgaacgggaggccggggaatgcgaaccggcgcaaactctcgaggcgcaaactctcgaggcgcaaacttggctttggcgctggcgctgcagccacgggcgccgtaggagggccgggcccaaggcgccccgcttcccgctcccttcctctccgcgcccattggcccggccgctcgggacggccccgagaggagggaaggagggaggaaaagtggggactccgagcccggcccccaagcgccgcccggcccgcccagcctggcctgcaccgaggccgaccgggagagggaaagcgacgccagcgggcgccgccgcctggccctgcagctggaggcgggacgcgcctttcctcctcccgggctgaccgtcctagccccccgccagacaaaacgacctcacccagcgggcgccttccactagagagcaccacccaccccgccccaccctgttttggtttcgccgccgcagtcgaagcggctgagtggctgcgtttccctttcaagccgtagagggttcctctgccggtggctggaagctggagcgccgcagccaccagactccctacttcctttaccctcctctgcgctaggcatagtttcctacaccctgatctgacatgttcggtgtcacacaagcaaatacaggggactgctagcttcgggtcacttccgtctctgtggagtgagagttatttcacctctgtaagaaacggtgtttactgtcatactatgtgcattctgataagtcatttgcatgccacgggtcctcaaaaagggtgccttgctccttaacttgtctgcccccgaacacccacacatcaatgttacttggaaaacttttccaagttattgctaggttctgagaaacataaaaatcttgaagatccttttcaggaatcgctagctgatgaaaaagggtttcaggaaggtaatattctgggctgctgggtagaaaaccaaagaaagtgagctcacgtggcccccagcctccgctgggtaaaccggcattcgatcagacaggcaatgactttcggggccgactttatcaatgtggcctccagcttcaaattaaaccgaaggcctgtcaggcactggcaacaacttactctccaagactcaggcctcactcttgccttcttcaggagttttatcaccatcaaactgcactgagcattaaattgccaggccagagtttctcaacctatgtcccctgtggaggaggaaaaaaaaaagtctgtaccaccactcccacaagctaaccgaatggagatg

SEQ ID NO: 46027 - DNA, 4439 bp, Homo sapiens
ctgagtaagagttttgggaaattaataatagtaataaaaatcttgtgaaagggctcaaggtgttgcaatcctcatcacctatgagcaccaattctgcagctgttttgcacgtaactataaattatgatctagtctctacatacataacttcccccacattcctgcaggggtctcttttcctgctcaatctcaggagcaagctttaattttaagacccatgaatacttgaacaaattcaggagtcagtttgacacatcattttatatttttctgatgacaatttctagtttactttttaaaaaaagacactattttaaaaatactttgggataggtttgagtcgttgtgtttgcttccagtcagagaacttcctacaaaactgaagatataaagtgctgatgcctgggcgtgcctgcgttcgttgggggcacgacgtcatcgtgggaagcgtgtactttttcggattactgcttggcggattagaaacccgtagatcagttctaggttagccctgattaactgccctgggtgtttctgggccagagggaatgtctgctggattcaaaccaatatccgttgtaagacaaaagagttaatttgtactttacccctatccaggctaataatgaaggtaccgggaatgatctggaatgttaactggtgcccgcaatcgcgtctgctgaaccttctgcccccacgattctgtctgcccacatgcttctgtctatcagccccggcctcgggatcagctctcgccgcgtcattggttggatttcaggaagggagaagcccacgatttaaagggctccttttgcacctgccagacatcgtccgcatggtccaacttgcctttggcacgtatctggaaaaatctcctgcgctgttcgtttattgcactgactggtcaaaggaaagagtgttcccttagtcaccttgacaatttccaaaagcgaaacttgggctctagactagatctacactgagtctgcggggcgcggagtccctgcccaggtcagtagcgccggcccggcgggcgggcggggacaggggcggagcctaggccaggcgtggtcttccgtgggagagaaggaaattctttgccccaccccctaaaaactgctcttctgccagccaatcaaggaggcctatgcaaatagggtccctgtcgccccggtaaccatgatgcacggcagccaatggaaaccagcaagtcgcggccctgctccatgattgggactgaagtaaggaggtagcggcccaatgggctgtgggaacggtcctcggcgggttgaggggcggggatatgcaaatatggtttgaaaagccggcgggaaatccgagtttcgcgggaggaccttggcgcgtaaaccgtatcccttcattcattgtcagcagcagcttcctggagccatttttcagctgccggccgcagcacccgggctgccgccgccgcctcgcaatccgttgcatcggccgcccccgacgcctccatccccgcttggggcccgatatccgtgcggccgggaccctcctctctccagagccccgattatttttggcccccggggcctgtgcggtgcggaaaaataaaaagaaaagagagagagggggctcggaagcgccgggcggggaggagagaaggaggagagacttggaaactccgactgcaaataataaagaaattgaaaacaatacattaatataccataacactaaaaagagcaggagcgagagatgagaaagggaatccagcccgctctggagcagtacctggtgaccgccgggggtggggagggggcggctgtcgtcgccgccgccgctgcagcctccatggacaaaagggcactgctagccagccccggcttcgccgccgccgccgccgctgccgccgccccgggcgcgtacatccagatcctcaccacgaacacttccaccacctcctgttcctcctccctccaaagcggcgccgtagccgccggccccctcctccccagtgcccccggcgcggagcagaccgccggcagcctcctctacaccacgccgcacggaccctccagcagagccgggctgctgcagcagccaccagcgctgggacgcggcggcagcggcggcggcggcggccctccggtaataccctccctccccaccgtccccagccccggcgggaggtgggctcgcaccgcgcggggtcgtgggcgcgctgcgggccgctcggggagagcactgggccgagcatcgtgggcctcgggggctgcccctccaacgagggttcattgttagacctgagtgctcttcccggcgccaggagggtcggggggctcggccaggcgcgcggggcggcggggattgccttggcgcgaaccacatcaaacactccaaaacttttcgcggcccccccttcttttcctgcacttttccctacccccactctcccttcccctccaactcgaagcttcctctttctcgggcgtaggaaggggtcacgccccggatggagaagggggtgggggagggagtagtgaactggggtgtggggggctctgaggggttgaaaccgggggactgttggggtgctagcccccagtcggccttggaggctcgttggcggccgggggtccctgcggcgtgctcggagcgcaggggatcggcggggctgcgcttgacacattttaggatctgtaactcccggcaacaaaggggctgggggaggtggaggggagtcgggcgtgggggaggtggggctggaagccgggtgcggactggggcgtgggctgtctggggtgaggggctcgcgggctggcgctctggcctgggcgcatcctggcagtggcagcggcggcgcccgcgtggcccaagcgcccaggccttcctcgccgggccccgggcctgcccttgacccgcctctccccttgccccttccttccccgccctgtccccctctccgccccccggcgacggagggcgggggcagctgggttcccgtcccgccgcctgggtctgtccctctctccgggacccgccggtgacgtttcgcacacgtgcgcgcaggacgcgcctgtgactggggaggaggcggcggcgggagggggcgctggagggggagaggggggcacccacttcctcctgctcgccggctccctggcctgggacggtcccggcgccctcgcacccgcccccggcaccgccaccctccctctcctctccccacccccccaccggcgcccgccctcgccctgcgccgccggtctgttcggccctccgggccccctctccagccggccccccacctccccccggagccaggctggtttcggaaatgcccttacagcagcaggttagtgaccgggacggctcgggggccgccgacgccgcgggggcaccggattctgttgggggctgaagcggtgagggtaggcggttgagcggggttttggagtgggaacggggggttgggtgctcgagggaaatgagtaagcaagaaaaatctaactaagtaaatgccccggcctccggttctaggaacctcggggcgggagtgtctgccccagggggtgggtatggtgtttacgtggattttttttctagggggcggatggatgggcgatagaaaaccggagggggcttctcgccaatggccgagttgagctctgttttctgtcttccttcccttgtgctggagggggaggggggtgggtcagagggtagggtgtctgtaggattcccaggccacccgccaccccctccctttgtccctgtaatttataaagcgcctttgagagatgatttaggtcagtatgcggcttctctttttgttggtactagaaagaagtgtggcccggaggtctcccctttctccttttctctccttcattcccttcctccatgcctccgggtcttcaccctcgtggtgaggcttggcctccacggggctagaaccgaaccagactcagttagatccatggtagcctgattataccaggcgtggacctcaccttgtctcagctccaaatgggtttaatttttggagaatcaagattttgcgggagtctttaagaaagtcagcacataggcagcactttgggaaatgggatgggtttgggaataatgaggcgttttttatttctttcctgttcccagtttctccccgggttcggtcttaactgctttccagccccagagatacttgctgggcatgtgtgatgtagtcttagtcaaagaagctcatcgttttttagtgactagggtctgccagcaggggggaaacggagcacagtacctgcttagacatagcagtatccggtgtgctgggttttcagtcgcaagaatattccatgcttttattagcttcagatactcttactgacttgacctaagcatgtttggacatattttaagcatatttgacccctgcacagttctgttactatttcataaaccta

SEQ ID NO: 46028 - DNA, 563 bp, Homo sapiens
gatatgatttgctatagataaggaaaatctgcttcctgttacatacttttttttttcattaaaattacagtttttatgttcatgcttacttgcatttttacaaattgagcttcttctcccccatccactgtgagtttagggttataagaaaaaaaactctctgcacttattagatagtctactgcactgggaatagcagtaagctgtttacattttttctttcatctgatacaacaaaccttgagagttggtgccaatatcctcatctgtagatgaggaaagtgaggctcagtgatgaagcagtttgtccaaggctgcatttctggacattggcagaaccagggttccagaccaagtccaggaaatttcgaaacctctcttaaccattatgcaacccagacacgtggggttttctcacatgacgagggcaggccattgtctagggcgggttatcaggtgtttctccatgtcctgcagggcggtcagtggcttttacagagtagagtgtttattgcatgaagggaagacctagcaagatctctctaaaggatttatccattggg

SEQ ID NO: 46029 - DNA, 834 bp, Homo sapiens
acatgtcagatattatttcaccaattatctcagtaacttctgtgctttttattcctgaaagcaaagttgagaatgatgcaggtttccacaacatgcggtgtttcgtgcatttttatccttacgtagttacaagaaacaaagcaaaatttagaattatttgaagtacttttaacaccctcaatttgatatgttgtgtgtatatttatatctggacacaattcttttcattgaacagtatagacaaagcatttagaggacagttaagtttctccaataatcatgtttaaacatatctcaggccgggtgaggtggctcatgcctgtaatcccagcactttgggaggccgaggcagattggatcacctgaggtcaggagttggagatcagcctggaaaacatggtgaaaccccgtctctactaaaaatagaaaaattggccgggcatggtggcaggcacctgtaatcccagctgtgcaggagactgaggcaggagaatcacttgaacctaggaggcagaggttgcagtgagccaagattgcgccattgcactccagcctgggcgacaagagcaaactgtctcaaaaaaaaaaaaatctcaaatctattttttaaatttaacctttgaaacatttgtgtaacgcaggtggctcatgggcaccaccatcttcttttggcagatgaggaaacaaacctgtctgtcaacacagaaagctgggtctgctcaagaattgctgtggggtacagtggcaatagcagggacaagagggatgcaggggtcctgtcttcgtgtctgtggaccagcccttctcaaagtccacggctgcccctcttggctc

SEQ ID NO: 46030 - DNA, 712 bp, Homo sapiens
ctactctcagcaatcttttttttttttaaacagtgatttgcactgatctagcctctaaggggtaagggccgagatgaagcagagaatttatttttatattatgtcgtctggtgcagagactgctacaaaatcaggagtcaaaaatctaagggaataggctgtgaagtcattttgtccatgagttgtgttacaacacattcattcattgtaaacaatcaccaacagtcattgccataatttattcttggcagtaaattgggttttctagtgacagagtaagccatcagaattaagcaaccaggagctccagttcatgtgtgctggaaaagatgtttgcgagacttcaggtaccactacctcatattaaaggtgagcaagtggaggcccagagagggcaggtgacttgcccaaggtcacacagtgggttagagccatatcaaggactagaacattggtaatccatcacatcgtccttaaacctttctgccccacttcctgttgacacaataggcaggatattaaactccagtttcattcctggggattgatatgaaaggttttttacttgtccaatcccattttccttgtccaggcagatgacaggtagtaatttcagaaactgagcaagggatggtgaaagctagattgtagtgggctctttttggtttggttgttatgagcgctctcaatgcaaagcttagaaacctctcca

SEQ ID NO: 46031 - DNA, 625 bp, Homo sapiens
tgttgtatttcttgtctgatctgaggaattttatattcctgaagtctataattaggtgcttgtgttgattgtttattgaaacaaagctgaaggtgggggtgaggggagtgccacatagtggaaaacactctatggcaaacatctgagctttacttaaaagcatgggctgcaaagaaatgtaaattcattggcttaattggaagagagtatttatagaaattgaatgatccagtaaaactaaaagcctggcttctttcatcttcagagacctgccttagtaaatgctgttctggaaatcccttgcctgcaaagtggactttgccatccaatttctggcctcctggcagtcagtcactttgacctaaccctattgcttgactcgtatttactacgtactttccttttttggcttagggttgtactgaaaatgtacatgtaaagaaaaaaatgtccatgtacactgaagttttctgattttttatatagctccataatttgatttcaataactattacaaagaaacttttataagaagatacaatttgaaaatcttgctgtgcagcctcttcccatctactctgcctgcctactacgccttttatagttcaccatatccattaggttc

SEQ ID NO: 46032 - DNA, 1497 bp, Homo sapiens
ataacatatgtagagaaagcgggtgagaatccgtactccataaaagtattttctttccataggtgtctgctaaactgccatctaagttttccaaaacaaaaaacaaaaacacttgtgtggtgctcaatgatgtatattaagtgaaacctaccaactgacctttatcctttccttcctgtttttttaatattaaagaagagacctcttttcacaaatgattgaggaggctagtaaaatgcagtgaaaagagcaagttctttgggagtcagacagcatcggatccagcccagagcgcagcacgactagtagagtaacttagattaagtccttaaacttccagtgtcctcttttgtaaactgggaataataataataataaataaatagtgaataatatttatgcaaagtacttagcacagtgtctaacacataaaagcttaggagaagttggctattaagcatttctaggaacccgaggactcagggttgttattttagttcttggaatcaaaggaacttgaagcgtagtcattcctaaactaagttaaaccagaactagcgctttcagcaatgatgtaatttgatctcttcgggccaccgtcgctgagcatgcgcaaataaacgtggcgggacgtatgtgtcatggcgctctccatctaaagtctgtgcagcttccggagagtggcgggttgattttctcactttggactggtttttacttcccgacttctgggtaagggtggccgatgggtccatgtggggcagagtgtggccacagctccttttatggccaagccttgtttctccagtttcagtttttcttgggctgtttgcaaatttgtttcgcagttaaaaggggatttgccagctgggatgggggaattgggaggcagatggggcttccaggagcgaggatagggtcgttggcctcaggtgccgctctccagttaggagtattttaggcacctcgttccttattgtcaggtttaacttcatttgttctcccactttataccttagtgaatttgtagatgtgacaaggctttcgcagttatatagctttcccagatcagtatgttaagaatttaagcagaagttattgagaaaagcaggtgtcttgctttttcacttttcgttcttctttgctcataaaacctttttctgaatctcgggacgacagttatctttcggatggaacgtgatctggatgtctatctaccttattgacttaatcctgttttgtagtggttggttactcgcactatgcagacgtgttgcggtgctgaatacaacatttattactaaagccagacactggatcaccgtcacggcagatgtcagcacacctgttgtaatcagtaagaagttacaagtagtatggagcatcattaatcctgctgtataaagcagtcttttatggagtctgattccttttaagtaaagaatccttacagtggttttgtgaactttttgggtgcttacttttcctaatcaattt

SEQ ID NO: 46033 - DNA, 680 bp, Homo sapiens
aggatgcaaaacatttccatcatcacaaggattcctcatgttgctcttttatagtcatacccattctcctctcaccctgttctttctttaatccctggcaactactattctgttctccatttccataattttctcatttcaagcatgttatataaaagtgatcatacagaatgtaaccttttgggattgaatttcttcattcagcataattctcaggagagtcatccaggttgatgcatatgtcattagtacatttctttttattgctcaatagtgttccatggtatggatgtaccacactttgtttaaccattcaccttttgaatggcatccaggtggtttccagatttgggctattacaaagaaagctgctgtgaacattcatgtacaggtctttgtctgaatacaagtctttatttctcttggataattgcccaggagtacaattgctgggttgcatcacagtcatatgatttgtttaagaaaacaccaaactgtttactggagtggctataccatttttcattccctccaggactgtatgaatgatgcagtttctttgcatccttgccggtgtttggtggtttcactgttgtctgttttatccattctgaaaggtgtatactgatacctcattgtggttttagtttccatttctgtgcttatttgccctctgtata

SEQ ID NO: 46034 - DNA, 417 bp, Homo sapiens
tgggaaaatgctatgcaaatgtggttatttagttctaatttattacctagtcaaaattgaaatgtataggaaattaagtcaagcattttaattgcacttgtgatttgtaggcaaattccctctgagtcataaggcagataaaaggtcggcatggttttgtttttgctgccacttttaagtccattgtgttgtcactattactcaaccaggtaaacactcctcttttgaagttctgcccacctgttacgcctctgtgacatactgccaccttctagatgatttttacctctggtgtacaactgtcctccctaccccagtgcctgttttctgtcatctttggtgacatcagcttcattggccttaacatgagttctttcatgcatctacaatagcttgtggcacagttctgcttgcata

SEQ ID NO: 46035 - DNA, 532 bp, Homo sapiens
tttttagtagagatggggtttcaccgtgttagccaggatggtcttgatcttctgacctcatgatctgcccgcctcggcctcccaaagtgctgggattacaggcttgagctgctgcacctggcccatttattcattttttaaaaaactttttttgcttgaattttctgccacccttctgccctctgccctctgcccccatcatcgtgttggattgcttcactaggaatatttccagcaggctgacccagagctagggttcagacaagtcttttcagtgtgtacttaataaaaccaaatttgtgcaaggtgagaccagtcatcaagagataaaaaataaaaccaacaagccttggcatgagtcctctctggtggtagtggaggtggatggtcacatattaagaaaacagtgaatggcctttaaaattagatggagtgaatgaagtattgaagaaaagttgggctgtttatagagcctttagaaaaaagtaaagggaaaaaataaacaataggagtccaagttgccagatcattg

SEQ ID NO: 46036 - DNA, 2249 bp, Homo sapiens
tggttctgccacatatacttccattaatttgagacttgggatccatgaagatactttaggtctccagcgtacccatcacagtaacttgattgcctaaaatctatgtgcccctcatgccacaggcttgcattaaatgaactgtgaagtttaatttgaaaactatttgcaaaccaattcctataaaaatggatttatagctggaaaccgagtacttcagaagtgctgagtaaatgtagttgtgtgcctgattttaattttaggcaattgtatttgtgatctgctcttgttttgctttactttttgagaaccagtgccccaaagaaagaaaaaataaacctacttttgtttctagtttatttgcaaaccaggtcagacgcccttgattagctctcagttggaggataatttgaaccttgacagattgaacccaaacagcagggtttctctagtctggccaacagatagaaaaaataaagtaaaagctaatgccagttcacaagctgtacaacaggactgaataaatgtgcaactgttaatgaatagctatttcaaatatttacaaaaggcccaagaaaaaagaaaagattagcatcttaggcagctgttctaagggaaacctattagaaataaacatgataaatgatgctcaagagctaatatatctgtcaaatatcaaatacactcagaaaaaaaactgtttcagacacaaaaactattaagacccatttgggcataagagccatcttgctttgtggtttacaccagaaatttattcttatactttttaaaatttatcttttctaactcctcaaatattcacacagatattattttacagattttaaggccaggagttagtggatagaatcattagagttgtgtccatcgtgattaaattggttagaaatttaaaaattcacccatgtgtctttgtatgaagatacaccataacttgttattttacggggttcctgactacataatagtttgactgtgacagtaacaccattttagcatcaggacggttttgctaggaaatgctacataaaaatggaaattattcctgaagcagcgagggattggttcccaatgcagattacaggtacagttactattgcctaaacatgcttggacatgtttctacaaacccatccttgtctttttatataaaatattccttttgcactaagctaaaattaaagcaagctgtatgtgacatttattggtgacttatacagtagacccttaacattcaggaccaagcattctgtttttaactatttcttcataccgtgaaagtctgtggagagaagcaatttgaatttcctgaggcttcaatttgtgtttgaatagcttgtactcttaggctcaaatggaggatcaagtcatttatttgatgagggagcttagccagcatctcggcatttgtatctcagtgtaatatagagtaaatctcttacaattttttagttgtaaattaccagatctttgtttctgtatggaagattgtcaccgaaaggaaagctaattattaatggcatgacctttgtgaatttggagatttatagacaataaggatctactgtgttaatatttgaacagttgtcaaataacggttattttgatttttggtcattttctaacatgtaaaaagtgtgattcacaccagcatgagtcattttgtgaatgttcaaaaaacacgatttatgtttgaagtgtatcgtgttcagtttagatgactgaactgctttatagttgcagcccagacatcactaatctaacagatttcagacgactgtcagattaggtgtgttgtattattagagacacagtatgttttcaggccaatttcagaaccagtggaggagtttggtcattcttagccccttctgacaggataagtgttgtcacagagaccatggtgaaggctgacacagaatcatgggacttcatggtctggtcctaacctgtttctctgattttacatttcattcctctccaaggatgcacttatttcagcagtatctttgttgaataatttcccctatccctaacccaaactagcactatcaaaagcttcataattacctgtcacctggaatcgcctttaatcaccattaattcattgttgctcactaatgtagaggttaggaaatgggaggtaaatggccaaagtacgtattccatatatagtacatctatatggatgtatagagggggcatgaataggtattaagggaatgaggaag

SEQ ID NO: 46037 - DNA, 3524 bp, Homo sapiens
cccttttgataagtaggtggcaagacatgcttccaagtaagcactgagcatttgaagagatggttacatatgacttgatcattctgtatctttgtagacctttgaattgataaaagaaaaaaaatagtgcttcccactcttataaaatgtttcagtatgtacagttataatatttcatgttcaccattgtctctgagatgtggggaggggggttggaagattgattccaggagagggcagcagcgctgtaagcatttaatttgggtatatcctttctctgttcccttggcttttaaaaattaagtaataatgtgttctctgtctctattaccttcactaatgaaaaaaaatagggtctgtaaagctatttaataatcttacaatttattaatttattagtttcacattactaaacatggcaattgtggaaaatacaaagctactgaaaattatcctcatatataatagatctatttgaaacattttggtatgatttagacccagttttgtcctgactctgtgtgtgatttgtataataagaaattgaaaaaaaggcttactagcttaaatagctttaaaaatataaactgtgggaacataggactaattgggcttgttgaaagaatttttaacagataaacattaatttttattaagcacagaccgaattgaaaaaggctaaacttacatgttaaaataatttggcaatctaactgcagattcaaaatttctgaaaatgtaaataaattaaaatgtaggcagtgttttaccatctgtaatgaattagcattccatttttaccagctgctgctggggtttttgaagctgactcaggatctgagcaccctggtgggtttctgctgataaatataagaacctgtagtttaaaactggcagagctggactggggattagaaaagtcactgcaactttaagcagcagattctttcacttggggcaggatgtaagggtgtactttctctaaagatgccgtcagtacaaatgcggaggatagattactactgcttgctgctaacatgacaggacattcagggtgccactactgttgagtgtggagtcagccttggaggaaaaaatccccaaaaccttctttggcaattgtctcttatgtagtggacatattttaggcaaaatgacagcatttgtgcattgatgggattaatgcttcattctaaggattaaattcgttaatattttttctttgtgtacttttttattcctaaaacttttattttgagcatgcaggagacagggatttcttggaaagaatatgaattttgaagtcaggcagacctagatatgaatgcaaattctgttgcttcttagccacttgtaacaggcaggcgtagaattcagtgtgtaatcattaaacattttgttttctttcctcacattggtgaggatagttttcttttgagtatttgctttagtgcctttaattaatgaaaaacaactagttaaaaggttggctaattcctttatgatatacacacacacacgtacacacagagctacctatctcctctcttactttttattgtcagtctttttattacaaattagtcttctacatattataaatttaaatgctaactagaaccagctaaaaagtcaatacacttgttcaatcaacacttttatttaacacatagtatgtgctgtgtattggaaggtctggtgatgatggttccaattctggccttctgaagcttatattctaaatggaggatgctgtagactgctgtgaatacggtggaatcaataagcatttacattgtgatgggaaagacttttgtggttagggaagcattcctgcaggcagtgttgtaaaatgtggagcactttacaaaaaatatgttcataatagcaattacgactgagggatatgaaaacacctcaactgttaaataagcatggtgattctgacctggacagatttgtgaacgtcatctacaagtctttgccatctaatatctgatgagatttagggatttttagcctaatatcttgaaagtatccttggagttttcagatcctcactttgtccaaacttgctgtcctgttcctgttttcacagaaacttcaggtgtcctcacaggctgactaggaccaaggtatacctatctgaccattatgcgggccagtctgaggtcactgccctggggctgagacctgtgtcactgatttactagtgactcactgtgtattaccgcagctggcccttgactctgcttcctcagctgtagttcagtatgaactcagaaaacttgtttgtgacccgaaattagttctgtgttcatttcttactcttactcatgcacacatgactcatgacttagtccttgttttaaacttgtgcattagggtagctctgaattatgtcctccttctcctagaagcagaacctcttatcctgttttgacttggcccttgactgcttaaaatgtctgtagttggctttgtatggttataatcctagccccttaggctgggaattttggccatctgtggtctctatttctagccttagccctaaccaccccacttcctgctgctcctgtcaaatgcacttacttatacttttccgtatgtgtctcaagctttcctacaaagatgatgggtctttgctgaccctatttctttcgttcaggatgagctcaaaattaccacattagttttgaaacttgctctaatttctcctaccaggaggaatttcttccttcttggcaatactgtggtatttaatggtattttactgttttgcactttgtattatacttatttgtgttatgtcttgtcgcccctactagactgtaagatgattttatctgtataccattaagtgtctcatacatacagattctcagtaaaattttgctggtggaatggagtggagacccaggctttagatagtaactgggaacaacaagatcgaatttcttatctgttcgtacctaataagctcctctctcccctcgcccataggctttgcttacctgtcacagaacctaccctgccttttttcctacatgcggtattattgtcctgaactccttcaagtgttaagtaaatcagtaaatctttaaagccaaccttagcggccaggtgcagtggctcacgcctgtaatcccagcactttgaggggcggaggccggcggatcacttgagatcaggagttcaagaccagcctggccaacatggtgaaaccccgtgtctaccaaaaacataaaaaattagccgggtgtggtgatgcatgcctgtaatcccagctattcaggaggctgaggcgcttgaactcggggagtgggcggaggttgcagtgagctgagatcatgccactgcactccagcctgggtgacagagcaagactctgtctcataaataaataaatagctaaccatagcaactctatcagattttaaagaaatatcccccttcggcagggcatggtggctcacgcctgtaatcccagcactttgcgaggccaacgtgggcggatcacc

SEQ ID NO: 46038 - DNA, 519 bp, Homo sapiens
agaaatgaagctttttaggcaagcacttctgtccgtaagtctagccaattaagtgtgcagatataagcatgtgtcccaatgtgtgtccatgagtgactactgaagccctcaggtgctctggtgacttcatatgcaagcgtggcctggcaggaactgcctgtgctatgactaatcaggagactttccagggaaaaggatgtcaggcatggggattccacatttagcgtcacttttagtatgtaatgacttccatatcctatttgaaggatccattctcattaggattcttcatgcttgaaatacacccttacaaaagctgaactttctcacgttgactaagaacaagatcatctttgacagatttttgaattgaattggcaaagcaaaattctcctcaagtccaagggtttcattttgctcatgctctttcgttccattgtgttttaaaccaggttgctattatatagagtattttagcagccttgatcttggaaacatcaagaccattgttcctattgt

SEQ ID NO: 46039 - DNA, 1403 bp, Homo sapiens
gttaaaccttaactcattccactgtttggttataaataaataaacataacatttgtcccaagttgttctacaggttcacgcctagccatagagttaactttgagcattatttgcagtgcagggggtaaattatcttcaaaacgctcatggattggctgctgcccagagtcctgagagatgtaatcagtttcagttaattctaaacaatagattgtggcaggaactcagctaagtggcgggttgactgcacccaaactgttgatttaagttgtcaagagagcttgactcatgcttagacttgacaacagtttgggtcagctggcttagctgtaaaccattaccagtaaactctgctccttttgtgtgtgaggagggaagggggatggcccttctggtcacggtctccctccctgagctcactgcagactccacggcctggctgggaggctctttgtgacttttactgtgctcagacttcagtctcttcatccctgtcatgcgcatcagtgggtttctagccacaggcctgaggaactgccaatatagtatgtgctttgtgtactttctattcatttctaacttttgttggtgatgtttaacaggaagtgcgttactattcactgtaccgtaatccatatctgtacagcacttaatgctgttcacagagaactcatattgtccaatatattttaggctagggcagggcaggaattacattgcatcagcattaatcatccttgttaccttttgatgagatcattcaggttaaatactggttggaagagtgatctaaagttgaaggcatgaggataaatgtaggaaaaacattagcagtttgcttaatgtaagttttttttttaagtttgaagataaatgtttctcaattgataattttttttttttaccattagcctttgaacattagtagtaacaatttatttttatttaaagtttgtccacacatgcaaatggaaacatgttaccccttggatactagcttaaatttatttactccgaggtgatttaaagtccacatataggtatgcttgtttcagcaggtcagatttaaggataccttaatttagtgatgaggtactctgaaggtctgaacttgagaaggtgatccaaggtgactataaccttacacttcctgttagtacctggctcagagtctcaggagactttgagggcagtgttttgatatgaattgcctttgtgttctttctgtaaattagtttttggtatggaaagccagaaagctcaagtcctttaagtacataagtcaagcggctttttttttccatacccctgtcaaacattgtacacttatcgctttccttttataattttgaaagtctccaaatcattaaatgatatgcttctcagttgtggatggttccatt

SEQ ID NO: 46040 - DNA, 3178 bp, Homo sapiens
ttttatggctctgaaagttattcatcatccctattttagtggcattacatgcctttgcattttgctatctcagagtcatttccttgttactttctgtcgtattcggtttatttatgttaacatcttttaaaagtatcgtcatggaattaaaagcaattcttattcaaggctacctggagaatgtgactttgtctttaggagaaaatcactttgtacaggaagcgtattgtcacagtgtatacagcactgtgtcttggacctttagctgtgatgagatatagtcattagttgtgttttgccaccccagttttcttcatttgcttttctgatcagaaattgattttgttaaatctgtttgctaaaggaaatgtttgctgtaattggagctacatacatagattgaagtggaatataaattctattgatgtcacactttgtttcagttaatttaagcacattctacattaggagggcaatctgtgatcctgttataccatgttgtacccaaaaacctctgtagttgttcctttcatcttttctttttcctccctgtgttattctttgattttatcttctctaaggcccataattctctttactcctcgacatctcctcatcccacccttctctcttgtattgagcctggcacagttggtcacattactgtttacctccactggtggctagaaatcctgtttagccctctattacactctgattctgctttcttgcctcttacttgtaagtattcagttatcattgatgggattgaatcaaattgtctttaactcaagccttcattctaatagactttaccactctgatacctggctggctgatagcatcacacacatttatacacttgcttcttacattggtggtcacagacaaaactttctcctttaccaggttctctaagttcatagcccaaaaccctttcacagatgccaaaattgttattaataatgacattattgttaatttttataaatgctaactttatgttgacatagtataatcattagtatttatagttaataaattattcatgattcttctaaatattcagttgagctggtttgaaaggcagtagttttcaagtcctggtttctctgtgcaaacacttcacttttctaaacctctgtaagctagacatatcccccttccttctcagaaggttgttttgatgtctccgtgtcttaatccgtttgtgctgctgtaaccaaatacctgagactgggcaatttataaactatagaaatttatttctcacagttctagaggctgggaagtctatgatcaaggcaccagcaggttcagtgtcaggagaaggctcattcctcacagatggcactgcccggcttcttcaaatggcagaagggagggagggacaagatagagtgctcccttcagccttgcccttttataaggctctgccttcatgatgtcatcacttcccaaagaccacacctctattaatactatagcattgcggattcagtttcaacatagattttgaatgggacaccatcattcaaaccatagcacttggcgaaatagcacagaaaaaggactatagcatgtgaccttctttgggtttttatggtcattagctagatcggaatgatatagcaggcaggaatactttggtttgccaggaatactcctggcagtgactgttcaggacttggtatcaagcaccgctatagttatctaaataatcctcagattcttttgccaaaaatgatgtaatcagtgctactttctagaccttgcatagtttgggacatgagcatgaggtaaagtgttaaaaattaacaagatgtgtttgttttctccctgactctgagtcaggggctagttgtacctattaacatttctactcccgtgggcacctgtctccctttcccttatttagaggcaccactgaaaatgtgcgtgatgaaatctgaacttgcatgaatatctccttgttggctgctagcacagatgtgttatctggtgaggatttttcctagatttctttcccctggctaaaacagtaaatgcataagtaaagcactaggagtcagagatcctaatcccaggccttttctactgtaaactagctctgtgtccatggacaagtgaccttatcctcagtgcccttgttttttaatatgagagtagcaatctaatgatggaggggtgctgagaaaataacttcatgtgggtatttttatttagcagttgtgtgggtcatccgatggcgtctcaagtcactattcaatgacacctgatagtcattgtttctgagaaagggggccttttggaacaaatgcatctggcactatttaacattcactgccctccatcagtgggaggcagcttattatttcagatcacagacaggaaggattcagatcctgactctgctgcttattgttgtgtgacattgggcagcttacatgacctttctctgtgtccactgccatgtctgtaaactgaggaaaatattgcatatctcactgattactctgaggattaaatgagttgatatatgaaaagagtgccttccacattcttggttcagagaggctggtgttagaagatgccacactattaacctgatagttagctaattcacatgtgactaatgttatttccttccctccgtgactttggggatggttgcagtgtcttgatattctgtaatatagcggctttgttcttaagttttaaagtgtttcttggcatagggtcagctaccaccagcattcaagccatacccagcattccagcactgctgcctgggtatgtaagaagaagggggcagtgggtagtgggctcccttggagccgctgttgtggcaagaaaggactttggtcactcacagtcaggaagagtctaggagtgctttgcaggtcagtgaagcctgtcccaggcagtgctcatggctgtggggagctgtgaagcagccgcagctgacaggccagccaggcgtggcgtgagacacaacggagctgctccttttgaggcagagattttggccaaatgtgtatccaagaggcagtgtcataaaaagtgacagggccttcacataaaagctacaacgtctaacaaacagacacatttcatgtgagtttcacagggaaagggctcttggccacctgccacctccctgccacagcagccccca

SEQ ID NO: 46041 - DNA, 1039 bp, Homo sapiens
aagagtcaaattattttcaagaatgtaagtaggatcatttgcgtatataaaattaatgtatagatccgcctcatctcacattaaagtgcagtctctacttaaaaaacattttataagcaatcagtttgtattcttatatactttgaaaccattcaactgcttttacttttcaatattgactagtataagttgctattcacagtggcctgcctcctcccttgctatcaggcaactttttgtttaccttgccaaatatatccatgcattgaaaatccctttccctaacatttactatgacttctttaaaggtttctcttttgtcactatgacccttaaggccaaagtaagcaggtgttgcataacagtgggttcaaccataatgtatcaagaaggatagagggaaaatcagtaaggtactttcctgtgggaataccccataatctagtgccaaatttattctaattcatagctgaggacaataacctttgtttttacagtatttcccatgcagtttctaagatttatttttaaaaattttctaggagagatggactattctctattatgatctgctgtgatccataacttttatttttagctgtagaccttttgataagaattattgaaaaggcaagtataaaactagctagctggaaagctattctacatgctttagtctacaaaaatggtctttttatttatagcttacatgtaaaatcatatgatatttgtgatttttcaaatgtaattttgataattacctttaaagaaaaaaatatgtttatatcacaataaaaagtttaaatttttcttcaaatgtactgttttattcttctgtgtggatattgtctctttttctatttatcatcatggagaaaagttccagtccttggaatttatcttactaactaaagttcagcccagtaactagctaggtgagaccaagaataaattaggaacaaaatattttaaaaaatagatttgtcatgcttctttcacactgggtgttaagtagtgtgtgaagaaaatatggaaagct

SEQ ID NO: 46042 - DNA, 1005 bp, Homo sapiens
tcattttttaaacccacggcagcccgcaaaaaatgcaggacgcagcatgtaattacttttaaatatcctctcatctctgtggcctgtactttgggattaatgatgaaggtaacttgaaggtaccttgtacaatttggggaaaaatatttgccatactcactgtactctggccacccttgttacaagtccatcacacaacttgtttaacatgtttactttttaaatgcttggagagctaacaggtggttgcatgactgagatgtttgttttaacaggctaaaaactgggaggtaatttagacatacactatgatgcaataggaaaatacctaattattccatttttggctcagcttttcgtttcagttaaaactgttgatagcaaggctcgacaggttttgtagagtagttctcttaacattgcctacataggagaaactggctcactagtaataatggccgtgttttagttacttgtataagaaacttacttggctttagtgctagaacttagtaaaggatttcttctcagagcttctgtcatcagcagttacagtgtgaatacagacggctctgaaagccccatatctatttcagcatgctctagaaagccacttggaatattttttgcctgtacatagaagcactgaggaaatatcctgaaaacaagacagctaattgttattatgcttggtacgttcatcccaatgtttcagtatataggttatgattggctcttggaactgtccattgagcaaatagaaggagccaggaattttgcaggatagttagttgttcatgtggtttggagttaagggactactgccggaagtagacatagtcagggatagagtttctagatcggggtggttacctttctctataaagggccagatagtaaatactttaggatttgtggctgtatttcagtaaaactttatttaaaaaaaaaaaacaacaggcagtgggtcagattggctatggggccatagtttgccaacccctg

SEQ ID NO: 46043 - DNA, 984 bp, Homo sapiens
tttatgcttcatgtgaccatggtgatatgtaatactaaaacttatatcattccaagttacatttttcaagctaaatcagtcacattgcagaatgcagcaatttgtttgaaagagattgagagagccaatagggtctgacaatgcagacagaaggagcaggctgataagtaatacaacagcaaaaggaatgagattggccagatttctgaaggtagtgttgcatttttttttagatgaagccacttaatgaacataagtgcagcagtggctaaagttaacatttaacaacaacaacaaaaaaggcgatggcaaatcagaggttttgcctggcttgtctaaatttcgcccacttgtaacatttttaaattcgcagttaagggaaattccattcttcttttattagaactcttaatggaacctagccatttgcagcttctaccggcttcctcctcatatcctttgtggcattgtatcaaagtcacctcagattattttggcttcccttcattcctctacaacttagtcatcaggcagtgaggaattgaatctaaatgcttgatggagttccttttgatctttaagattggtaataaattattgtaaatagctagactgcttgatgagtgccttttgaagctcctaagttttggtctgttgccattctgttttattctggatgtacagtagtgaaggaaaatggaaaagttttattccaggcagctcccggcctccttagtagcctttacctacttttctaagttccatccaggcaaatctatccatgttacttttaatattgtctctcactgattggaatgtccacaaagactagaaccatagggataaagtaacatgcactattttcccaatctgagaatgttgctatttttccccgcatgaattaatagagggttgtgtttaaagttattttgtcatttgaattacccacttatattcaagcaaattggttttctaggcagatag

SEQ ID NO: 46044 - DNA, 1278 bp, Homo sapiens
ggtttgctttaatgcaggctggtgtattggcttatgccggtaatcccagcactctgggagtctgaagctggaggatcacttgagcgcaggagtttgagaccagcctgagcaacattgtgaaactctgtctctatttaaaaaaaataaaaattaaaaattagccaggcatggtattgcacacctgtagtcctagctaccggggacaggtttaggcaggaggatcacttgagccccggatttcaagttactgtgagctatgactgcaccattttacttcagcctgggcaacagagcaagaccccgtctctaaaagaacatttttttttaaaataatttcaaagagcagagtggatagggtacaataaaataagattgcccatgtgttggtgattatcaaaactaaatgatgtttggggggtgttcattattttattctgcatttttctatatgattgaaatgtttcataatagaaagatacaaaaagtaaaataaactatggtctgctcctgggagtgaatgttgtgacggtttgcctctctagctatattcattttaatgttcattttccccttgacgtaagtttatgccaaaaaaagaatagtcagcattttagtggattcatcatgctgagtaaactcagaaatgcaactcctattctaaacttggcaaaatttccttcgggtttcatcccaaattatagtgggtcacttaaatgacagctttgcctactagaaactgttaaaacagttgtaattacaaagggtagttagtgcaaccattttgttctcagtgagtcagttgtatttgctcttctttccttcccccaaccaagattgctcctgcctgaccccagacacaggaaagtcaccaggttaaacaaacgtgttgtttgagtgagcccaggtgcatttcttaatcataccccaaagccattgtttaggttgtaaatggtcagttggttttctcttaaatgctgttgcaaaaagcaaataaagctaggagcaaaatgtgtacccagaataaggcttagaaaatactttatttcttgcactaagaaatgttgcttgagactagaagaatttcatttttgtttgttgcctctggttgcatgtccatttcttaaattgttttcaggaattcttataataaataaagactcatacaaaagggcttgacaaaagttaactcccatttatctgtccttctaaaagagaacattagtaaaggtaatccaaagtagcagataatctggttatattttatgcattatgttgttt

SEQ ID NO: 46045 - DNA, 1650 bp, Homo sapiens
gtgctcaaagacagtttgcccttgttccttttagtctcctttcagttgtattcttgctgttttattcattttcccccttttccctttcacattaacaaagtaattcactttcatatgtatttctagagttgtatttttgtttcaaatgatgattacatccctcaaccccaaaatgtctgggtaaatagtttatggccatctgtattctgtcatgcaaaagaagatggttcttccaaataaattcaatgactcagccataataacccacatttgtgtgtgtgtatgtgtgtgtctgtgtgtgtgtgtgtgtgtatgctgtatgtgtgtggggggaactatcattttataatttcaaccacagacaaccataacccagagctttttaaatgcccatcctttcacaaacataattttatttctaacatttttgtaatccaaatgtgctaaaacatctaggcagcatgctgtatatcagaaagagtaagtgctttgcagccaagtgaacctggcttggaaaatgctttctctcattgactagctgtgaaactttgggcacgtttcctaatctatctgaccctcacatttgtcatctgtgaaacagggaaaatagtatctattctgtgagaaatacaactctgaaaacaactgattcatagtcagtactcataaaatctcttgcctatttcctttccctttcttctaaataatttcttggataatatgttcagtagtctagacacttggaaatgctgaattattaaatattttcatgtttcatttctcacatctttcaatggcaattgaaaaaaaaatacattaccataagacttaagcacccggacataagcatggatgagctcagtcaggcccatctgtatacatgaggtcaaagtcaggtcccaccccggagaacactgtaaagtccagtttgtctcctccggcagcaagcttctcctttctccttctgtgtgcccttcttgctgcttatggactcggcgacctcgcactgtctccagtcatgcacagtcaagcctgctttcaagagagaatgtgagaggcacgtccattacaagatatacattattgaaaagggtcaataggagagtctccctggctattttcattttagcagaagagttgggatttaagccaaagtattagctactaattgttgattctcatgtgttagtgaacctttctgttttccagcagactttctggaacatgtcaattatgatgtccctgaatattatttttaattggctctttcacctttaagtggctacttttgatgacttctgacccacaaagagatccacaaatcactggaaactgttcccttctggcagaaacccatttcacttgtgaccaagtcatccagtaaaatgcacaatgtcatcaaggaagggaattgggaacagaacagaggatgttacttacagcagaactactagctacagttattcctggtcatcaacatgtcccaggaaagacttaaagagcaagaaaaggtagagaaaaataacttctacctttagtgcaaaatcagttttactgtgcctttcctttcttgcctttttttccccttgaaacagggtctctgtctctcaggctggagtgcagtagtgtgaacgtggctcagtgcagcct

SEQ ID NO: 46046 - DNA, 3237 bp, Homo sapiens
cactatcacgagaatagcacgggaaagaccagcacgggacccatcacctccccctgggtccctcccacaacacatgggaattctgggagttacaattcaagttgagatttgaatggggacacagccaaaccatatcactacacaagccttatatttcaccactccccccttgcacgctatatttaatccttactgagctacttcgttctggatcatgccaagctctgtctacttctacatctttgcagattttatttcttaggctcctgacctactttctcttctagcaaatgttttttaatccttcaggactcactcagcccaggcacctccacgaagcctttgcttcttacaaacccagcctggaatatgtggcatctttacgtgccttcaaagcactctgtgcttccctctgccaggacatttgtcccagtgaattatggttatttactttcatgtcctcccactagactaaaacctacttaagaataaggtgtatgtccccgcgattcactcagtgcctgacacatagtgggtacttaataatttttgaatgaatgactcaatccatgacattgtcaggcaggaattagttcatttggcagatattcactgtgtattcctcataactttatgccaaggaagagtcttggcatgaagcaacactggcattatggatggggaagaaaccttaggagtgaagtaggaagaaggggtagagaaattatccacataaaagggttagctcaggctttattcgctcagtagcccttaagactgtgaatgggatatgtagtaggagggacccagccaacactgttcaaagtttggagcttggacccagccagtccacaaacatattgacccaaaatgaggtaactacagaagttggagtaagcatttaggaatttgacagaataattttgtgtctcttaaatcttatactgaaaacattggtgcttgtctttaatgccattttttctagtcattaatctttatcatatcttataaatcaattggttcctggtggatccaaaatttttttttccaaaaaaaagaaggaaggaaaaacatttaaatagctggtcctcagtagtgtgcaccagactggtctaggtgttcccagcaatgactgtgttttgtaccagattccaagttagatgccaaagaatcagaaatttgctgccagttccttccttccttttctcccctcttggcaagagaatggcttacttgagatagaggcaagcaggtagaacagggtcctctctgagtacctagtgttctaggtaaggcaatagtacttagccagagctgccatatgaaaaaaaaaaaaaaaaatctgctcatctggatcaagccagtctggcaggagactgggacaccatagaatctggggtgcccagtttttacccaaacagtagagtttatggtaacataactaaggctagcacctacctcctggtggactggtggccaccaatgtaccctccattctgatgatgatgagctcaagaactaaatgagactggctggattcataggataaggaccctcattggcagcaactcagcaggttatgggaggcagtggccaacatgcctaggataagaggagcatagtgccaggtattatgaagattcagacatgagcagtgttgttgacaatttgaaccaaaagcatggaccaaagtacgaatagaatgctttaggagaaaaagagaagtacaaaatgtaatactgcagccttaaagagtaaatatgaactagtttgtgtgcaaattcaagcaaggcaacgttacttttacaacattattggaagaagttgaagatggtaatggtagtggtacatttattgactgttaagtaagaagcagtatgaccctcataaagattgtttatgtgtagcagggttgaagtgccatgtgataaaactcataagctttacttacaagagttctaactagtgtagaaaaaaatcctgccagacagcgtgtctgctttgtttggaatagaagcataaatatctaatttgccttgttacagagaaaaatgcatgatctatgcagcatgtagccaaataatcattctatcaggctcaaaatgtagggaacgtagttaatttgcttctttgccctaatccttctctctgaatttgtacttcatttagtcatatttcacctcttagaagctaaaaacacaattttgccagaagatcaaaaataaaagcagcaatagcataagtcagtataccctaaattaggaaagttagaaacacacacagtaacaaatctctcaaagtttgtttttctctcaacgtttctctagtctgtaggttttttttcttttccatgtaagtgttgtgtcatgaaagcaagtgtatctcaggagtgtaaggtaggaccctataaacctttaatattagcatttcatcacaaaagttcctttgttaatttttctgttgaagaaaaatgagggtgactagcagccttagacaaaagcttagtttttgttttcaaacaaaattgacttgatgtggtttgggttagaaattgatattttattttcttaatttgtcaggcttttattttttaggtggtgccttgcctgtgttagatgtttcagtttcctagtgtgtttgtaacacccaaaagcaaatgaatttttatgaaaccataaaaatgatcaactataccctcttatatagcatgttcatgtgcagcataattgtttaatgctgttttctttccacattaagtcaacctgaaagattattgattgtcacaaactctgtttcttcatgccagaattctccagacctgtgtctcaagggaccctagtcgggagggtaattgttgctgctctctgttgaatacccggtgacagcctgtctggatcgactcaggttctggaatggtgcatctcacgatactgagtagcctgccattctgctgtaaagtgggagtagcccctcatttatggctaagggaagagagagttggatggtaaaaaaaaaacagcacaattttagtaggtatgttatattcagaaaagactgagataccattccatgtgaagttttaaattttgccttatttatagatatgtgcccaaatcatcatgttagttactttcatttgtgtagtactttctacaaagtactttacctatgaatcatctcaccacctagccaaataactctcaaacaagttatttgacttctttggtcctcagtttt

SEQ ID NO: 46047 - DNA, 729 bp, Homo sapiens
tcaaactcctgacttcaagtaatttgcccgcctcggcctcccaaagtgctgggattacaggcatgaaccaccacgcctggccccaaaaaacattcttaaatgatgatttatgtaataaaagtacttcagtgatagacaatggaaatagtacttatctggttgcaatgatttgtaggtagtggtcttgcaacatttgctggtgatacatcctaaagcctcacgattcctcacattcccaaaaagccttggaatgtatcactgcatccttaagttatgctaataaaagtaattgaacgtttggagtgatgctggcaggcctttctgaaagtgactgcgttcactgagagacagtaaagaagccacacatagatgcaaacactgggaagttggctaaggtgactcattaagtgagtccatcgtatctatcaatcttgagtaattcgggaattccaaaatgtgcagcagccaaataacaaatgaatgtcccgaacatttatttatttatttattttgagatagagtcttgctctggcacccaggctggagtgcagtggcgctgtctcggctcagtgcaagctccgcctcctgggttcacgccattctcctgcctcagcctcccaagtagctgggactacaggcgcccaccaccacacccggctaattttttgtatttttagtagagatggggtttcaccattgttagccaggttggtctcgatctcctgacct

SEQ ID NO: 46048 - DNA, 351 bp, Homo sapiens
aggtatttttaaaaaacgttttcaggttagatattcattgaggaagatcaagacattttctattcccctttgtctcttggctggttttttcaatgctggacatagctgaactttattctggtgtcagcacagccctcacactgcagtaagtggtattactggcaaacagtgtttcaaagtgtattgcgtaattgggtaattggtacagatgctgatgcaatgtatttaattctaacagtaagttttcttgcagaatatttatcacctactcccaatattttatgtttcactgttggcttttataaatgaccttttgcaattttgtaggagaatatatttagtggaccatag

SEQ ID NO: 46049 - DNA, 3449 bp, Homo sapiens
ccctcctttcatggcaaatttgcatatgcattattgtcagaattttgaacttattttacaaccatatacacagaattcttttctagcttgctgcttaactgaacagatggtgcagtttcccagcccagcagctggaggggaccgaggatgcgctcggcacacagtaggagcaccataaacgttgattgactgagttcattgaggcggttgacgccaggccatccactcccacgcggtactcttatctttctccaggcccacacccctggcccgagaggcggtagctgggagcagatggcgagtcccgggtgccaggtgtactgcactccaggcgcggtctggggcactgggttctacggtccctgccccacccctcccatccctatgagttcccccaaagctgtctgcgccaagtgtgacgtctgactacggcgggaacatgggaggggaagggctggaagaaaggagatcggttgcctggcgagggggcccgtgcgtcctacagtcgctacccgccacgcacgcgtccctctcctcctgacccgcgtcacttagcagccaatgcggtctccgtgccttcccacttccccgcaatcaagcgcctttcttcctccgcctcccctctttctgttatctgacattttgctctgcttccctctgcccactccccagcgggattccctccctggcagacgcgcgcgccccagcccgccctcgcacaacctccaatagcaggtcaactggcttgtaacgctggcttagggttgctcttgaagtgtttttccaaaagcgaaatcacccgctttcccccacggggctaaaactgtaattgcaacaacgggctgttgcgttgggggtgggaagcccgtcgggcgtgccccacctagaccgcctgctggggccactggggtggttttgccgccccctcaacccctgccaccccgggtcgagtaggcagctccacccggacgcttgcgccagggcctgactgccgcggctgccagcggaaaggcagagaccagctgatccaaggaggacaaagcgagccgagaccttccgcagagcttggcttcctcgtaactgcgcccagggcgcagcctctccctgttaactacctgccatatgttcccttctctcagacccgaaaccgcctcctacaggtgctggggactgaatctggagcttcgggcgcggcccttgacaagggcgcctggcaccctggggcgcctccgtggccctcgcaaactcagagagcccccaccgtccagtctttcctgcacgagcgagggatcgagggaaggcgccaatgcacgtctgtccctccgtgatccgcgcagaagggacgcttgaagactggggtgcaatgaattgtcgacttccctcagctctcagcccttttcctccccccgcgcgccgtgcacgcgcagcctgctctgcccttctgaaagagacgctgcagctgcgctctcaatggggcctcagcctgcggggtccggggaggggatgaagtgggtggttgcccagccggtgtacgaaggtcgtgtgcctgccgaagagtgggtcccacacgcacagcgcgcgccgtaccaaccaagcaaggctcacagagagcatttagtcgtccagagcaaaggatgctgggcactcaagagagcagggggccaagtggctgtcagttctggtcagtgacggaactggacagcatctccaagggccaggggatggggtaggaggacggaggagccaagctcctgggaaacgacccccccaacctatccgcgaccggttgcaaattcaaaggagggctgggagcccgcgagggtgcgggaggtgtcctcgcttgggctgcgtctgcgcccgcgtttgtgtgtgtgtgcgcgcgcgtgtcttcagctccttccccggtcgtaaaacctaaacggaagacgggtgttaaaatgctgctgacaggatcgcctgaaacatgtttacagtaggaaggactttcctccagaaagcacagtctgagtcgattccaatttatttcctccctgtaactgtaagcgaaaggagaggttcggctgccgcggcggagcgaggctgagcaccattaatccttggcgagcttaagccagggagagcgccgtgcctgcgagaccgagtcgctgcgctccggaaggcgttctgcctgaaggaaacctctttttttttttttttttttttttttttttttgagtagggagtggcctttgcactggagtccttaagtaaggcgcgtcgtttctctgcagccgctctcggaagccggagaaactgcattcactttagcaagaagacagggaaactgaaattgataatcccccgagttgggttacctgatccagacaggaagctggtctaggcttcccccgtcacccggagctcctgacaagtgagcaggaggcggcgggtggttgccctaaactttgatttatgaaaaaaaatcagaattcatcgacataccctgttactcgttgagcgtttaagcctctaactaaagaaggtacagtggtagggagtggtaggggggtcgggagaggaggaagggggagaagaaagaagactgactatccccacgatttcctacctcgcctcgcgggcgcagggaggctcagcgatgccacctggcggctgcttctccccagattgggagccggctggctgcagacaaacccaggctctccccgggtgccgtgcctctgcctctagaatagaagcagaagcctgtattcatgcttgcaatccaagtggccctgcaaacattcgtcttctgcttgttttcttgagaaaatcgaaggaaaggaataatgagttggcattggcatgaacagcttaagcctactgtgtgctagtcactggttatgagaggaaaatggtacaattgttagaaatgcaggtttcttaactcttagcttattctagtgataaaaataaatgctaggtttcatttaccccagaatcctattttgatattttgcaaatatgagttatttccatatattatttttcaatgcacgcacccccacccccattacgcgctgagcccagttacaatgcaatgtcatcagcccaaaaggatgaagtgcaagttatgtttgtctacttgactgagaagtaaatcagcctcacatggaggcttcttttccataaagtgtggaaccaaaaaaactggcgcctttcagttgacaaaggccaatgacatcagatttcccagggcttcttccttgtcaggtaaagtaacaactacacagtttttcctcctctttattttatttgaactgaatacttgtcaggtctgactagcgcctacaatcatagtttctataaccaaggcaaggcaaaatcttgcaaatcagtgcaaatccagatttgttaaactaatttccattcaggtccctccctccatgccaaaggaatatattaagcagtgg

SEQ ID NO: 46050 - DNA, 4052 bp, Homo sapiens
ttccaagccccttgttatctaacataatggttagaatacatttccgtctctccccttaataatttcatgcattaacatcctcttcacacactatacacacacgcacgcgcgcacacacacgcgcgcgcacacacacagcaaaaggaaaaaagaggcagcagaaatctcagctgtacttctagcccttttaaaaagtttgctctgtaaattggaatgaggtcagatttggagcttctcattgcacgcggagattattattgcatcgggttccaagccaatgggaagcccgggggaggggtttggcatgaggaagcgttggttacagcagctgattggctgcagccaagactgtgaaaggataaagaggcgcgaggcggaattggggtctgctctaagctgcagcaagagaaactgtgtgtgaggggaagaggcctgtttcgctgtcgggtctctagttcttgcacgctctttaagagtctgcactggaggaactcctgccattaccagctcccttcttgcagaagggagggggaaacatacatttattcatgccagtctgttgcatgcaggctttttggcttcctaccttgcaacaaaataattgcaccaactccttagtgccgattccgcccacagagagtcctggagccacagtcttttttgctttgcattgtaggagagggactaagtgctagagactatgtcgctttcctgagctaccgagagcgctcgtgaactggaatcaactgcttcagggaaaaagaaaaaaaaaaaaaaaagacttgcctgggaggccgcgagaaacttgcattggaagcttcagcaaccagcattcgagaaactcctctctactttagcacggtctccagactcagccgagagacagcaaactgcagcgcggtgagagagcgagagagagggagagagagactctccagcctgggaactataactcctctgcgagaggcggagaactccttccccaaatcttttggggacttttctctctttacccacctccgcccctgcgaggagttgaggggccagttcggccgccgcgcgcgtcttcccgttcggcgtgtgcttggcccggggaaccgggagggcccggcgatcgcgcggcggccgccgcgagggtgtgagcgcgcgtgggcgcccgccgagccgaggccatggtgcagcaaaccaacaatgccgagaacacggaagcgctgctggccggcgagagctcggactcgggcgccggcctcgagctgggaatcgcctcctcccccacgcccggctccaccgcctccacgggcggcaaggccgacgacccgagctggtgcaagaccccgagtgggcacatcaagcgacccatgaacgccttcatggtgtggtcgcagatcgagcggcgcaagatcatggagcagtcgcccgacatgcacaacgccgagatctccaagcggctgggcaaacgctggaagctgctcaaagacagcgacaagatccctttcattcgagaggcggagcggctgcgcctcaagcacatggctgactaccccgactacaagtaccggcccaggaagaaggtgaagtccggcaacgccaactccagctcctcggccgccgcctcctccaagccgggggagaagggagacaaggtcggtggcagtggcgggggcggccatgggggcggcggcggcggcgggagcagcaacgcggggggaggaggcggcggtgcgagtggcggcggcgccaactccaaaccggcgcagaaaaagagctgcggctccaaagtggcgggcggcgcgggcggtggggttagcaaaccgcacgccaagctcatcctggcaggcggcggcggcggcgggaaagcagcggctgccgccgccgcctccttcgccgccgaacaggcgggggccgccgccctgctgcccctgggcgccgccgccgaccaccactcgctgtacaaggcgcggactcccagcgcctcggcctccgcctcctcggcagcctcggcctccgcagcgctcgcggccccgggcaagcacctggcggagaagaaggtgaagcgcgtctacctgttcggcggcctgggcacgtcgtcgtcgcccgtgggcggcgtgggcgcgggagccgaccccagcgaccccctgggcctgtacgaggaggagggcgcgggctgctcgcccgacgcgcccagcctgagcggccgcagcagcgccgcctcgtcccccgccgccggccgctcgcccgccgaccaccgcggctacgccagcctgcgcgccgcctcgcccgccccgtccagcgcgccctcgcacgcgtcctcctcggcctcgtcccactcctcctcttcctcctcctcgggctcctcgtcctccgacgacgagttcgaagacgacctgctcgacctgaaccccagctcaaactttgagagcatgtccctgggcagcttcagttcgtcgtcggcgctcgaccgggacctggattttaacttcgagcccggctccggctcgcacttcgagttcccggactactgcacgcccgaggtgagcgagatgatctcgggagactggctcgagtccagcatctccaacctggttttcacctactgaagggcgcgcaggcagggagaagggccggggggggtaggagaggagaaaaaaaaagtgaaaaaaagaaacgaaaaggacagacgaagagtttaaagagaaaagggaaaaaagaaagaaaaagtaagcagggctggcttcgcccgcgttctcgtcgtcggatcaaggagcgcggcggcgttttggacccgcgctcccatcccccaccttcccgggccggggacccactctgcccagccggagggacgcggaggaggaagagggtagacaggggcgacctgtgattgttgttattgatgttgttgttgatggcaaaaaaaaaaaagcgacttcgagtttgctcccctttgcttgaagagaccccctcccccttccaacgagcttccggacttgtctgcacccccagcaagaaggcgagttagttttctagagacttgaaggagtctcccccttcctgcatcaccaccttggttttgttttattttgcttcttggtcaagaaaggaggggagaacccagcgcacccctccccccctttttttaaacgcgtgatgaagacagaaggctccggggtgacgaatttggccgatggcagatgttttgggggaacgccgggactgagagactccacgcaggcgaattcccgtttggggcttttttttcctccctcttttccccttgccccctctgcagccggaggaggagatgttgaggggaggaggccagccagtgtgaccggcgctaggaaatgacccgagaaccccgttggaagcgcagcagcgggagctaggggcgggggcggaggaggacacgaactggaagggggttcacggtcaaactgaaatggatttgcacgttggggagctggcggcggcggctgctgggcctccgccttcttttctacgtgaaatcagtgaggtgagacttcccagaccccggaggcgtggaggagaggagactgtttgatgtggtacaggggcagtcagtggagggcgagtggtttcggaaaaaaaaaaagaaaaaaagaaaaaaaaagaaaaaaaaaagatttttttcttctcttaatcggaatcgtgatggtgttggattatttcaatggtggggttaatatagcatgttatcctgtctatcttttaaagatttctgtataagactgttgagcagtttttaaaatagtgtaggataatataaaaagcagatagatggcgctatgtttgattcctacaacgaaattatcaccagctttttttcattcttaactctttaaaggattcaaacgcaactcaaatctgtgctggactttaaaaaaacaattcaggaccaaattttttctcagtgtgtgtgtttattccttataggtgtaaatgagaagacgtgtttttttccttcaccgatgctccatcctcgtatttctttttccttgtaaatgtaatcagatgccattttatatgtggacgta

SEQ ID NO: 46051 - DNA, 845 bp, Homo sapiens
ccagcgggtgggtggtaacagagctgagactgctgggagctccttttcagtgatgcttaaccatgtctcccttctgctgcctgtagctgtttctgtgtctggacttgtaatcataggtggattcatatgacacctctctaactgcaccaagaacaggaatgtccaccctccttgaaggatatgagttctaatgtggattcttggtcttctttgggggctcttcttatgtttaatgcacttgttgcagcatatactgagagtctgtgaaatgttttcagatgtaaactattgaatcatttcaagtatttgtattcattagtactcatagcacaaatgccattcctgtcccttaaagtgtgcaaagcatgggtgtttgagggcttggcaaccaacgtgtgggcacctctattttgaaatcggttttgtttgcaattaacaaaggttaacaaaaaagtccttttgggaagtttggccgaggtcctagaatttgtacatacctttgcaatgtgctcatactctgtggcacatctaggatcctcagccccttgttcttcgctttttcagttgaccaagttaaatattaaaggaagaggatttctttcttgctaccaggggattttatcatggtaaaaggcttttaaataattttttaaagttgtgataaaatacacataacataaaatttgccattcgaaccatttttaagcatacggttcagtggtgttaagtatattcacatcattgtgcaaccatcaccaccatccatctccagaacccttttcatcttgcaagactgcaactgggcgtggcaaaatattttgtatgtacaaataaatctttaaagc

SEQ ID NO: 46052 - DNA, 877 bp, Homo sapiens
tgcctcaaaaaaaaaaaaaagaaaataaaagaaaaaaaagtatcagtagagagtggtaggcaatgagtgccaatgagactggagtggtgacattccaagcatagaaaagagactgtgcagagcacagaggaagatgtggagatccctgagtagtgtgcctggagtatgagatacaagggccaggggacaactggagatgaggatggacaagggctgggtggagactctgtgggggctcttaaccttctgtagattagttttttttttttgtaggtaccggtgtttttgagagtgaaagcaggtcctgactactggtttgttttatagtaaatatctcaatccagatctcaggtctagctgaggcaggagccttgggcaaatagtaaacagggactggaattggtcacaggagctgtgtcatcacccttgctcttcaaattataaaggaagcctaaacacacaaactccagtgtgggccgggctgactgccagatgtgcacaggatcattgtacaaagtggcaagattctcttggatattggtttatctatttgcttagaatgaagagaaataagggtgaacttgaagtttttcttgttatcgtattttgacttgcaaatctgagtaaaactgatggtgcaatctcctttctatgtggggctgacctcagaagagtagtggcttgtagtgtaaataaaataggagcaacagcaaacaattaaaatactgaatccaggtcacctagcactcggtggggtaaggactactcagacccagcacttgtataacccgtataactggatttacatgttctggccccctattcaatgtctgacaagcagttttaataaaaaaaaaaaaaactttacatttttata

SEQ ID NO: 46053 - DNA, 2000 bp, Homo sapiens
cttctcttgtctgccaccatgtgagatgtgcctttcaacttccaccatgattgtgaggtctcccaaggcacgtaactgtaagtccaataaacctctttcttttgtaaattgcccagtatcagatatgtctttatcagcagcatgaaaatggactaatatgcattgttttaaattaaatttgtatgaatagcatggcatttgcttggcatagagtagaaaaccacataaaagaatatagcatgttttatgggatatcagcatatggggcatgccaagttgaatttcagaccggagttaagtcaagaggaagatggcagtgtaactgtctcagactgttatatgccagagactacactcctgagtttcatagtcagttgttgcagcacaactgctatggtttaaatgtcccctccaaaactcatgttggaatttaatccccaatgtggcagtattgagaagtggagtccttaagagatgattgggtcatgagggcaggattaatccattcatagattaataagctaatggattagtgggttatcatgggaatgggactggtggctttgtaagagaggaagagaaatctgacctagcacactcagcctcctcatcatgtgatgccctgaatcaacttgggaatctgcagagagtccccaccagcaagaaggccctcatcaaatgtagtcccttaaccttggacttctcagcctccataatttaagaaataaattccctttctttataaattacctagtttcaagtattctgttataagcaacagaaaacggactgagataactacttaagaaacatcctcattaaattgcatgaagggagtttgcaagtggtggcttggagcactgctagctgacaggcacagaagtcatgcttattgtaacacaattctgctgggcaggaaggaggacaacccaagccatctgctgcacatcacgatgaggggaatgaccaaacgctagttgaacagatgaaataactgagaggcagccaagctgtctggtggtacaagactggtgagtaacaagagcaaacaaatcttcctagacatggaatagacaagaagaggagtgatgactcactgaaatagaggctgtggtttgattctccatacttgggaaagatcaggctgtgctaacctgctttcagattcagagaggtgcagcaaacttgcatggggtagggctgagagtcctggtgaggagcgtactgacataagggacctgaacacttcctgaaaagtggcacattccaagggactgagagaatccaggatttggaaacatagggttttctctgcatttgccattacctggtgataatgacccgagggtgggttttcacatcaagtcagatgagtggtgtcttttggaaaaagaacagccaagatctggaggagctagagcttccaaagaggcacaagggggaacggtgccaagagtgtgagtctgagatttctcacacagattctggggccacctattttcttaacaccgtctgttttgtttatgttcctctactgctttccactgatgcttctttcttacagaggaaaaatgcaaaatcctgtgtcagtgtattttacttaaatgataagtgattcagatgggctgtgtgatgttactcatttcaatattaatggcatcagagtgattcaatagataatattttcctaacttatctgaaatagttatttggaattgttcgcacagttattttatcaagattttctatttatggcgtaaaacataaggcaagtaagataaatcatttcatattgatgaggaaaataagaaaaaggctctgtagttttattttcttcccttggactttaacactttcaatgaaaagacctcaaggcatatgcttctttgagataaaatacattttgcatcactgtctttcctctcacatcatgggtctctgccttcaccctctcagatggtggctcagaggcatgtcttatctcttccaaacatgcatca

SEQ ID NO: 46054 - DNA, 2463 bp, Homo sapiens
atgtggctattgctgctgaggaattgagttttaaattttttaaaattttaattaatttacatgtaaatggctacatgtgactagtggtaaccacagaggacagagcagagagcacaggatgtatagaaggtgagagagattattcaggagtattgagggtagtttttgtttttgttgtttttaagatagtaaagactggtacaattctaaatgctgatgagccctaggcagcaaagaggagcatttgacttcgcaggacagaagcagagaagtaattaataaagccagtgtctgagagtgagggatggtttgggattctgttaggtgtgtaggctggtggcaggaagttgagtgggtttttagcggatggattccatttcctctggaggatgggaattgaggtcatctactgtgagggaggggaagcatagtaagttagagatttcaagagagttgggaagatttaaaacagctttatggagaagacagggtgctgactggggaaatatataaaatctgttgagtaattcttattttttagatgggcagtctgagacagaggatggttgtgcaagttgctcaatattactcaagatcagagaaaaattgggtcttgttctttctgattccataactacagctcttaaaatcgccaatacattggcccaccgacacttacttcctggcacctttctgtgcctcttttgacacttcccacttctctatcttatatatatttagttatggaaaggttttctttctcttagtcaattgatcctggtgtgcaggatcaatattctaattcatccttgtgtctctgtagtgcctaccacaattctgtgcacacagagaaggctcagtaattatttgttgagtgaatgagtggacgaataaagaaagggaagatgcatgaggtggaggaaaagcgccttttccttatacaggcttaccttcctcattcatatgtatgattggctccatttctacttcatatttctggctttagacatagctagagactctccctattataatcatagtttggaaagaaataatttaaaatcaagtgaagcaatgcagcgtggaaaagatgggctgctatttttgagaatttctttctttttaaaattttatttttctatttcttggagtccagacacagccgaaaagctgacgcttgggagattctcttttcaccaatataactgacatcacagagttcgtgcccttatctttcattctcaaggaaataaacaaacattgggattggccagagccctgaccttatggatgactaaggccccctggagttaaattctaactaagattttcctctgggactcaaattctatcattttgtgctatatttaccaatgatgttacactttatctttatcttagcaaatatttaatttgttgagagaaaacatgtcatgaatgcattactcataagtttccatatttcccaaggattctggcaagtgggagaaagggaattttctggggttctattcatacagctgaaacaaagccaagtatcaaactttagtgaattcaaaagggaagagatgtgtgaggtacggaaacgaaaagacaaatactaaatgatttcctatggctagttgaccagctggtcggttatcagccctttcttgcaatggttctgcttagctttgaaatcaaatggcttataaaaatagtatctgagaatcaagaaaatgtaccttatccactgaaaatacagaaagctcacctctttttgttctcagtttccttctcttttattcaattaagtatgtagctgacgatggagaaatctaatgatggggtgagatttttgcatcatcatgatgaatttctgtgctaatgtctaagcttctgaactgaaactcctttgagaaaataaaatacttcttgacattgatggttctgagactacaacaatacacagtattctagagaaccgaaataggctatttaaataagagtttttattgataagcacccttaaaaactcattatttgtactgcaagctgaaatctgaccatagaagcaattctcttgatttcccaagtggcctcgtaaagggtttgggctaagtctaattccaaaatccaaagaaaataaattttatccagatgttgggcttggagattcgagttgcattacaaacaaaactgaatatttgtttttggaaaatcttactactgtatataatttaaagtaaatgttatatgtgtttcttcattcttgtcacagcttcccgtgtttagcctccgaatgccactttcccgcttctgagtctccagcatttctatgtttgtcgacaatgcgcatgattaaaatgatattttcatatttcagtgtagttggagctccttaaagcagagggttgtaagtgcaaaaaagagatatgcagttccctaatggcttattaccatcacatttgcaattcagatcag

SEQ ID NO: 46055 - DNA, 1891 bp, Homo sapiens
tagatttttgtcagttacatcaaaaaaaaaatatctgctttatagggagtgttctacctttgaaaggacggagtgacacagtttccctattaaaaaaacccacaacaccacgtatctgtatatatggatctacatcggtttcactaggaatcacccctccctcttccccctcatccccttcaaaaatcctaattgtaaagtaaaacacccttggggcagtggtaggcccaagttgcttagcaaccctcagcaggtagcaaggattcagctgcagctgtcctgattctttcctaagaaccttcttattactgtttgtgctaatctttaaccaggcttttaaaccacagtctttctctggggtctcttgttgttagattgcaggggcctactcaaatgttgtcccagaggtaatggtattaagggtggctattgaatgtttgaagagtgataagtgctggaagggattagaattgcatgttccaactaaccttattttacattcttgaaaaatatcatgaaaattgtcccccagtaggaacaatggttggtgttgacacacagctctaaacctgcttttgctcccagcttgtaaattgggtgaggcggactctctccccataattgtttcttttaaaagacttacattctcctgcaaagactacttaaggaattcattaagaattagtagatagcctgatttcattctctcatttaattatgagaaagctaggtgtggattggtagagagggctaaagagagatgtaataggggattgagaaaatttctttccatggagaagtgtttctgcctacattggcaatccaaaaactctgaggttggacttgaagttggccaattattacagaataaaacagtggcaaaaaatggcacatttattattaatagcatggagatttctgctttgtttcctgggttgcgaggtttggataaatttcagaggctgcccacagctgttattaaccaatgagggtaagctcataaaatattttaaagtaagtctacttctaccttcccatcacacaatacaaggcaaaatgaagaagacacagctaccctgaggttttttttcactcaatccctttctctcagcagattaaaaaaaaaaattatgaatgattcactcctcgaaacttcattctgtcatttaaaaggaatttaggcctttttctatcataacattttgttacagacctggtcctattatgcaacataatatgtactgaatatgtgctgattaactgacttggaaattggagaaaggtcaaagccatctgaaggagataacatttttataggctctgaaccttattgaagttcatctatatagatataatcttcaaaattcggtttaaaatcacacacacaaataagactcatgagtctcctgatttttaaatttcactacattctccttttcgttacaggttgtataaaaattgtttgatcttaagtaaaaaacaaaaaggatagtgtcctccaataggttgattgttgagagtgtctgccatcatacacatggaatagttcacgtttattcttctgatcccaccaaatatcaagtacagggaaatataccttatatttctgatgggaaaactgagacaggaaacttgttattcagttttagattgccatattgggatgccctgaaagtcccacgatgtcatataaatctcccccacagtgaaatgatactcaggtgtctactaatattagtgttgtatttagaggactagctaatttttctttccaagaaatcttggccgcaccacttcaaaatgataaactctctaattttgatttgttttctatttaaactccaacctctgtcttttatctttcccttgccccaagatccattattttgtt

SEQ ID NO: 46056 - DNA, 730 bp, Homo sapiens
tggtgatttgggccaatgcgctcttgaacagttatgtattttgagatataccaagcttttttctgcatttcctaatattatttttatgttcattatgttactattaaacattttttcattacgttattattttcttatgtattaatagtagttaataatacatttaccaagaattaaatttgtttaaaatttcgcagttggggcagagtttaccaaatgtggagtgagcctatctgttgtgaaatagaactcactaacctcttaacacaggaaaatcagtgatttcatcagattagaattacatagagaagctattctctgggtgcaaagattgaaattgcttcttgtgaaagacacagtttcacaatttcttgtgaaattgtttcttgtatctagtttaaaacagacacaagagaaacttcatatgtagtgctgacacgtaaagagttggagaatgagttgtccctttgcgcctcaacttctccctcaatgtcatggtgggcaaaattattttgccttaggctttagctgtaaaatgggttgctagcacttgaccacaaatggaataattacaatgaggtttggaagcctacagcatttgtattgaggacatttcccccttgtgcatctgttaactgttattacagatttgagataccattaatcagtagcatctttaacaaatgtagagtagatttttgcatactgaggttcagccaggcacccccat

SEQ ID NO: 46057 - DNA, 626 bp, Homo sapiens
tcggagcccaaaaggctcagttaaattgagcttgaaaccgaaaacccatgacgctctagtgagcactgagtgcaaagaagaatatttgctatgcttcacccccagtggattcctctgacttttctatttctattttctctttgccttccaaactagaagatagaaaaattataaatgtgtgcaactaagccttctaagatatgaaattcttataaactagaacttttaataattgactcagtgattccgattaaaccattgttgactgtgagcaaatttattgacctagttgcaatgaaataccctggcatattatgtcagcttccaactggccaacacacagatgccatgcttgctgctgacggctatcagacgtgtgccagttggcagcttcagccacaagccatagatcaaatggagatggagaaaacattgctctccattttgcctgctaagccagtcctgttctcaattcaagactggaacagcccagtgcaaatccttgataaattcagtgaaactcatattaaaggcacctctttatgaacttcagtagcattgattactaatacacctgtcaactccctgcaataattttgttttcattaatgtttctctactataac

SEQ ID NO: 46058 - DNA, 2669 bp, Homo sapiens
atctttaatgggccttcctccttcaaccctacattcccaacattcataattttttcctctgctttagtaatttttcaacaagtcatttcctacttatctgtaaagatctggatcaaatatcacctcctctgtgaagttttatcaaattctgttaggcaaagttagtcattgctgcacctgtgttttcacagtactttccacattcccgaattataactatttgcttatgaaactcccatccatcaaactagaaggacttgtgggttcttgaatctccagcatctagcagtttctggcacacagtgggctctcaataaatgtttattaagtgaatgaatcgatgcagcaattacttcctctatgatgttttaaaacaacaagacactcccaaaatcctgtgtctgtcctcaatcttttgaagggaactttccctttataagcaactattagctttcttgctctccatccatacttctcttgaggcaggctcattctagaacacttactattctataactcatatatttttcataagaagtgactcaatcctgcttatagctagggttcattagcaaatgaggctttcacactgcaaatatcactcctagagtgagtttacacttagagaagacatacagaaaaattaattgaagagcttcagaaattactataatttggatttattcacaggagttagcctactttactgttcaacgtagaaagatatgttagttataccatgaaacatcaaactgatttgaagaaaagtataaattataatacagaattttttaaaggcctaaataagcctatagcatatcagagcagcaagtgaaacgactcagatatcctaagtctcagcaatgctctttatcactttggaatccaaatttccagtttcactattgtgatttcagagggtagctacataactaaaactcatatgcagcacatgtagctacagggcttctgctgtcttcttgtttcaaagaggcatgagctgttggctcaccagatttttaaatatctattgagggaaacagagaaacaaagcaaagggattttttttaactgcatgtatatgtgtgtctgtctgtttctctactgtgtgggtgtgtgtatgtatgcaaaattatatgacattatatacaagtatatatccacaataatatatatgtatgtgtatgtatatgtgtatatgtatataagtctgaaagtgtttttttttattttttcctccaacccttcataaggtgaagtttcatcaaatcacatcatgtgactctccaggaacctcactgaacgggtctgactcatcgtctgggaattttaaataggcatgtgcttccatgagagttaatacttaaaaatacacgtacacacaaactggcagtgaaagagagaaaaaaaaaaacaaaacaagtgaaacttttgcttggcacaaacgctcaggtcagacactggccactcaatatttcacagttaattaccaggtggagttacctttagagtgaaggtggtggctccgtgctcagggggcagaggcagtaaatctatatttatatcattaagtcagccaggttggattaagcagtgaaagggactgcccctgaaatcgctgaccctgattcccctctgtgatataaaattttcctgagaaccgagggctgtgtctgcccactagtggtcaggtggcagagctggtgggacccagacattccctagaggattttatgccaagttctatctggatcagttgggaattggccctggccacccagtctgctttttaaaaagcatttcgagatctatcaactcagccccatgagataagtcagtaagaataacacaggctatgtcaatcttgagggaaggtttctgtttgcgatagttaccttaaactcttattaatgacgagtaactgcactaggaactaacatttctaatctattaccaaaagatcacctgagtcagtaacactcagtaaagactaatcacttttttctttctcttcccagaccttcatagaataccacaacgacgtttttctatttgaaaactacgaaatgttcttccattgttaaaagaattaatttggaaaactttaagttagaattaaaagtcttttactcaattggccccaaactataatttcctctttatctttattaagttcctaaatgaaatctgtattctagctaaactcaaacactattgttagctgacttttcagtttttcctccatgctttactcatgactgcctacttgaagcactcaccatgttctaatacctacccacctacctacttacctatacaaatattacccttgattcaaagccaaatcctacatcatcaaactctgaaatgcctgagattagcatgtactaagtatatgaaacttcctatagcctcctttcattgccatatttgtatctcaagcaataacttagatatatgtcatctctacaggaattatgtcatatactccttttaacccttataatgtccggtaaagttttttgttgttgttgttgtttttatttgtttctggtttttaccttggaaaagggtgtccacaaatatttgttgaaagtaaaacacagagataaatctgtgattaaatttatcagtcaagactcaaatccaacacagttttattgtggtcc

SEQ ID NO: 46059 - DNA, 1178 bp, Homo sapiens
tatgttgcataacttttaactggaaactgctagttttatgacagtagaaacaagctaacaaaggaaaaattaaaactaccacaaaaacttaatacccgtccctaattttataaacatatcaaaataaatgccttggtttcctttttgattactcagtaactgagttatgcgtgtacagtaggcctatctcccagaagatatcactggctctgaagggaagcttcagactctcctctcagaaagccagaatgttgtttcatagaatttaatctagtcctagaaatcaaaccctacataatagttttgactaccatggcattctttgatttgttaactgtgctctctctgttttccctttgaaagcttgtagaatattttataattaaaggaacgagcaacctgaaaagatctttttttcagcttgatattccatacatgtatgtttaatctctgcctctgactcactgcctactttctgtgatactgagcagagagaatgccaggactgtagggaatgtaccaaaaccactgaggtcactttataaacagagtgtgtttaaaggaggtttaaagagatcctaggaaatgtgagacccatagaagttctgcccagggaatagatacccccaccccctcacttactaattctctcttgctcaatccatggaaaaagattcaatcagacaagtttctgagtttaaggtcaatttgaaattcttttcctacctcttttcattttttccaagccaaacattttactggctctgaggcaaaagcatagaagtttatccttacttgccctagacaccctgttattttcattttaaataaccagtttctatgcttggagcttttaacccactgagcgagatttctctggattttctctcctccaatttgtctcaatttgtactactttttaaaaacacaggccagtgtgtccgattttgcttacccacacgcaaccagcatcatactccacctgtaagggtttctttccagcgattgccctaattttcacctcgtctttgtagtagaagtcctataaacattgtctataaagacagtctcaatacttttatctcctattttctctttgatctattttgactaggtctttgttcccacaaattaattgatactcaaaaaagtcaccgatgacttctatcttacaaaat

SEQ ID NO: 46060 - DNA, 944 bp, Homo sapiens
aagaaaagtatgttaaaatattaattataaatgaaacttatcatgctgctttataagtttacatttctctcctttaatggaatgtagatagaaatataaaaatatatgtgagtgtatatgtatatgtatatacacatatcttcataaataggtaaacttataaataggtaagggaaccaggttaattaaaataaatcaaggggattgcctctccttgtcccttgagactgagctaaccagtctacaggagctttaaaaagtcaagtgatacttaggtgaggaaaataacattatgtcactgttgtcctttcaggttagcaaacaaaagctggataccgcaaattacataagtttcagccagatatctttgcctgactaaattacaatgttagggaatttccactacagtcctgggatgtgccctgccaataccctgcttcctaattagacctgttacctcacttgacctactcttcctgctactcatataattctatttaaaaaaaaaagaagaaaaagaaaagaaataaatgagagtgattaatgatctcgttggacatgtatttacccttctactttgcaatgtggggaggcaaagattaacagcctcctttaagatttctccagctagatcagtcttgtgctctaggaatttcataattaaaacaatatatttgtggaaagagctgtgactaagaatcagcagagctgtttcacacctgactctgacagttaagtctgtcaggtcctctgggtttcggctgcctcatgtgtaacaatgtttctgttacctcagtttctctgtgtgatttgactttggaaggttgaggacaatatctaagagatgccacagggttttgttctgtttatttgcggtggtgtttgcttgtctgtctttaaagctttaggtttatgtctatgttaaaactggaatttcccaaaca

SEQ ID NO: 46061 - DNA, 729 bp, Homo sapiens
aactcaattcacatgagaacaaggggaactttcacccattactttttttattttggcaagtgtggtttccatgtcctttttttccacccaaatatttatttccccaacactaggaaaattgtatttctcctgtttccaaacaatagtagtcactggttcagcttgttacaattttatatcttcacaatgtgctagtatgcctgaaattcacacaaagtaaataaattctattagcacgaggtagttatttttatcatcccggtcatacatgtaaggaaatgttacaattcacagtgaatgttgctggcatgcagacagagaccacaggaaacagagatatatttaaactgacaggggctttatgccttaagctttatcaggacatacaggggaaagtcccctttttaactagagttcattgccctgacttgtacaaaaaattattttccctgtagctacccctgcaggccagtaaagtaaaaatttagctcaagtaaaaatcatcaccaaggcctccctaggaccttccagtctgtaattttttgttcccactggccaccagcctactgctggataccataccaatcagagcaacagaaggacactggagagggaataaatgcattttctccttttccccttaacgaacaacccctctcttttaacataaggtgaggatattaagctgatagttttcacatttaccaatcatcaaaaaaaattaaaatt

SEQ ID NO: 46062 - DNA, 1370 bp, Homo sapiens
tttggaagaaatcaaacattatccaagcatcgagagagatgaactgtgtcagaataccctttttatgagcttttcaattgaattattgcctttggactgaaaaaatatactttcataatcattgcatcaaccatcacattattttaactagtctttaacaagtaaaaaggtgaaattcagccaaattacttcagattttttattctacaaaaaatatcggaagatactaagtggaagataaattgtaatccccaaggaagtaatttttattgccagcctggcttcatataccagaggactacatatcatctaccaatgaacaatcaaatacttcctaaagaaaacaatgaatccctttgtgacattttggtgtgcctgactataagtggatacaaaataccaagcacttaaaatttcaatctgtagagataaatagtgttacataaaaattaaagttgagaggaaaaggtgccagattttgtactcagagttaatggtaagcttattgcaaaattcagtaaattctggcaaaaggtccaagggtcacatacctggaagacagtttgataaatcatctagtgctgtagccaatagaaatggcttcctttcactctctacctttgcttttcagctgtataaatttcttctctatttttaaagattaaatacaccaggaagaaaatatgatttcacactttgactatccatattatcatcaatctctgaaaactcctccttactatacgtataactcaaatctctcagatagcgtatttttttgcatttcttccagttctagagaatagctagccaccatcatcaattagctaacattgtgtattttttgaagctattatgaaaccactttttaatcacctcactttcaaactaagtaatcccaattcctttaacctgtcctcaaaggtcccattttacaactctttaatcatctctgtggctcttctctgggttctctacaagttccccatatccctaagaggctttggagcccaaaactcagtaataatttgtctttctttcatctgttgtcatgtggtggcagttgtggttttggcttctcctacgacctagattgtagacaatttgaggataaacattatgttctttgcttatgaagcatttctgttgatcgtaatttcctacagaattaggtatatcacggatgcttactcatttgttttttcttctgttttgttttgtttactgtagcagtctcattatcattgagtataaaagaagcacctcatggcttttgtgttacataaacttatttatgtactttgaacccctttcttattttgatctgccatataaaagtcaaatgtccattctgctgaggaggctctcaa

SEQ ID NO: 46063 - DNA, 768 bp, Homo sapiens
agctaatctatctgagatccagataagatctcaggagttgggtgagtgggctcatgcatgtgcactaagaagtaaacgaggtttaaccggtatatgaccttacaggaacactcaactaataagggaagaatatctcaagtgagcatgcttacaacttcagtaaacatgctgtgcatgcagccccagcccctcccaagtgctggcaggccacagtgcataaggacagcccaccccaagggaagaatcaggggagaagggacgcaagagccaggacggatgtcaacatatgaaaccataagtcaaaggtcaaactgtgtacttgatctctccagtcgcccacttggccctcttccaagtgaactttgctttctttcattcctgtcctaaaactttgtaataaactttaactcctgctctcaaacttgcctcggtctctcactctgccttacactccttagtcaaatcctttcttctgaggaggcaagaactgaggttgccgcaaacccacagggatttgctactgctaacatactttggtgccatgtgactcggatacgttctgctgctacatgcgagagtatacaatgaaaacacaacaggaacattagagtaggtgtcccggagacactgggactcctataacagacagctttagctgaatgacaccccagcggccttgttgaatcttctgtaggcagcccagcagtctaagaccctccagtcaaccttctttccttccttcataagtgatcgtgtcagaaccatagc

SEQ ID NO: 46064 - DNA, 700 bp, Homo sapiens
ttaatttcagagttcaagttgtcaaactaagatttgaactaaatgaacacatacctcaagaatgagatttccagtccagaagtgaatatctatataacgcattgccccaggacacttccctttcctgaaatgtctactattcatctttcacaaccacaaattactggaaaagttgccagcttgttctctgcaagatttttggaagaacttgcttggcacattacgtcctatcttgaggtttgcaaagagaaaggacagtttgacaaggccatgtcagggaaatgttgccccaccagcaagccaaaggtcagactgtaatttaagctgcagtttgcttgtgaagggtagaacactccctggtttcatctcacaagcagggagaaaatcaatcctttagtagccttcgaatggaaagtttaattcaggacaagaaaagtaaacttgttttgcttttttttctttattctcattggtcagcagacagctctgtaattgttctgttgacagcataagtttttttaaggttaactctgtccttctttttcctctcccggatctcaaattacacagaaaacggaaaaaattgaatgtatgcttagaccccagaaagttctctagcaatgattacccagatatttaatggatccaaagttcaaactcaatccaaatggttttcatacaaaaacaaataccataattg

SEQ ID NO: 46065 - DNA, 964 bp, Homo sapiens
aaactgtctcactgcagctactcaccatacataactgctaccacaactatccagactatcactgccaccaaaatcacccacataatctccaccaccgccaccactgccacaatcactcttagcatccatatcatcagtcaatgagtctggagatgatctcataaggtttctttgatacaggaaatattgcctaaagcagtgtttcatgaacttatttgaatctgatgcgttagtctgagattctacattttcaatcaggagtgacaggatctgatgatgttggtcaaccacatttcaagtaggcagggtctagagaatatttcagtctcaaagcactctgtttcagaggacaccatgctggaggagatcaaaagcttcacgaagttatagtcatgagcagggacagaaatgaggaggaaagtactttgaaattttaaatggaactcagtcttctaagttaatggaatttctcttatttcaaaattctattgcccaactccagcatgagatcatcgggccattggcaagaaacccagagccaagtttcgttttagtctgtaaacaaacataccttttactcaatggaactatggggttaaaaggaaagcaaaatatgatctctgtctttaacattaaagaagagaagtatctgaccttgtctgagtccaaggaaaaagttctatttccagaactaaagatagaggggtaggccattttcaattaaaaattgtggtccactatctaatgtactgcctccccaactcttactcacttggtatgcactttatcaatagagcatcaagttgttctactcccaaccctttacatttttttacattaattttctcactgctgttgcttccacagttacaaagttaccaatgtcagaatgtactcttctaattgctgcctcaaatctaaccttctctccaagtgttgatgattgaaaaaaattattatacat

SEQ ID NO: 46066 - DNA, 1101 bp, Homo sapiens
gatgacaagagtaagaagcccttttacctataccagcctcagtttcccccatggcaaaatggagttttggagtataaggaattcatcttaatatgtgtataacttgcttcacagtgacattgtgatacttgaataataacgaaatttttttgtcaaaaccgtagaaatcataatatttgatcctgtaaactactgaccataagatgtataagccaaatggtaataaggacaacaaaagatcatttagtcgttggctttcactttcaaatactttcctaattttttcgtcttttccgatagagggtgctatgattctacatggtgtcaccttgtcactagaaaacagccttctgcagatgggtttattcttcaagctcagcgaatttaagataatttatttacatcttccttttgtttttaaggctagaatcacaacttaaaatttttctcaacatgctaatttctgtgactcccgcagcactgaggctataaaaggaatgacttctggtctgtcttgctttgcacaaggcattccccaggctccctgaccaactcagttacgcaccagcaggggtccctgtgtacactatggcagctgctttctctctttctctctcaagctctaccagtccctcatccacactcccttctatatgcaaaagagcaattcctagaaagccatgtagggaaaaataaatttctaaaactctagttctgtgtcccctttgatttgcatcatgaatttagggtgctttccccatggattttgcagtggttcctacagccagaagctaagctctccccacacagtccccttcactcacacccctcctcgcagtgccaggcagctaatgatctataaaatgcatgcattctcctgggaaccaattcattaaaggaaaggagtaaattaatcctgttaaaaatcgagcttgtgactttggatttactggcataggaagttctgtgtggctcaatgccaaacattcacacactgcctaagccgagtttgtgagaacctaccaggcactgggcactgtgccaggggttattctcctctactcaaacgtgacctcctgaaagaggcctttccaaccaccc

SEQ ID NO: 46067 - DNA, 1065 bp, Homo sapiens
gtagctgggactacaggcacgtaccactatgcctggctaatttttgcatttttggtagagatagggtttcatcatgttggccaggctggtctcaaactcctgacctcaaacgatccacctgccttggcctcccaaagtgctgggatgacaggcgtgagccatggaacctggccattatctaaaaatttctaaaagttggcagcccagttacatatggctatgtaatttgaaatagcaaagatggccatagaggttcacagatctttgaaacacaaacatactcactgctagaaagagggaaaaaatacaaagcagcagagattgccatttgagatttcctagagagaacagttccaggttaaacattagacactgcaaatataaaaagtcaatttatttgtctctctcccacgatccttcaccacttaaaagttctacccccagctaagaggtgggctgaaatcaactttatttcaacaaaccaaacatccaaactatgtaatcatgggatgacatctgagtttgatctggctggctgcttataaaggaggctttcacaatgatacatgggaattttcattgttgaccaagctagacactagggcatactgcctgcatatttcctgctgaaatcagccaagtgcaaatagagacctacctttttttaaaaaaaaaaaatgcctccatccatctgttttgaactatactgaaacttattttattttacacataaagataggactattagcctcctactttcgagacatggacctttttagttgttttctgagttcggtcatagatgtaggctgaattacatgtatactttcccacaaaccttaaccagtaccacatttgagaggacagctggttatttagggaacagtctggggccagggacctagtagatctaagagtgggattcaagcccaagtccttggcctcattagcacagtgttctcaccaaactacccttccaagaaaagtccaaagatttattgctgctctagatctttgaaacaaagtttcccaaaatccaaaaatacttccccaacaatcagacat

SEQ ID NO: 46068 - DNA, 2000 bp, Homo sapiens
aggaaggagaaataaaagaaagaaagagataaagaaaaaagaaagaaagaaggagaaagaaaagagagaaagagaaagaaagaaagaaagaagaagaaggaaagaaagaaggaaggaaggaaggaaggaaggaaggaaggaaggaaggaaggaaggaaggcaggcaagctatttaaataaagcaatttctcctccatggtgatttcacagtccagccatggggagaaaaaactttcataaaactgggcaagctaagctcaaaatcctttcaatactccaggcaatttttcatgtccttcacttacaattaaattatttttgtcactctcaatgggagcaagaccctctaagattaggagttaataaaattgttgctcattttcttctgcttgactctacagactccggcaaatacctcaggaatgatatcaggtgctagttactgcatcaaactaagttttgtttttctgtttctcagctctcaattatttatatgcataatcactaagtaaacaggtataaaaatttcatgtacattagtcagaagcaatgtttaaaaaaatcaataaagccaaaatatattaggcagtcaatgccttttttccccctaaagaattgaagtctatgatttggcttgctgcccatacaaattattatcagatttcattaaagcaaaaatttaagtagtgtacatctgagtttgctggttttttgttgttacttttgctaaactgtgctaatccttctgtaatttaaggtttgagcaatagaacaatgaaatgaaactggattcaccctgtttcaaattttccaggggcttctttcgtattttcacactactgacaggctaaatttctcctctgaccttaattctacacaacctcagaacaaagtattcttttctttttttctcttcaaaagactctcactatcctttaataccaacaattgtgtttagatggccaagtgtctgactccatctcatcaaaaggctgctgctggtatagtccagtttggactatcagttttttagtcagtaactttcatggatttttttttagttcatggacagttactgaggtcaaacagtactatctcttactactcagaggtttttgttttattatagggtaaaatgtcttaagtcaccgtgaattataatagcagactcatgaaagaaaactaccccctaggctgggcatggtggctcatgcttgtaatcccagcactttgggaggccgaggcagtgggatcacctgaggtcgggagttggagaccagcctgaccaacatggagaaaccccgtctctactgaaaatacaaaattacctgggcgtggtggcgcatgcctgtaattccagctactcaggaggctaaggcaggagaattgcttgaacctggaaggcagaggttgcggtgagccaagatggcaccattgcactccagcctgggcaacaagagcgaaactctgtctcaaaaaaaaaaaaaaaaaagtaagaaaactaccccctgctgcgaacaactaagagagaagttaaccattacaaagtaacaattgtgcaggaaattatgtcactgatacagaagttactggttaactggagtccagtttctggaattaatggaaagggctactttaatgaactatgatgttctgatgtcaaaggttgaaaattttaattaaaaaattttgtatcagttgataagactgtgagcagcagaggagataatattattaaggatagacatcctaatattttctactcacatatattgggttccagcttactcaaaaactacagaagattcagtaattgcccaatatagcatttttcaacccctcagtttgggaatctttttgatcatttcccagtgacattttcagataatacaatgaaaccatactgcatgtagattttaaaagcacattttgaagcatctttatgaataaaaaagttttaagaacatttaacttaaaaatgcagtaaaatgttactcagc

SEQ ID NO: 46069 - DNA, 649 bp, Homo sapiens
gccaggtgcagtggttcatgcctataaatccagcactttggggaggttgacgtgagaagcttacttgaggtcaagagtttgtggccagcctgagtaacacattgagacccctatctctacaaaacatttaaaaattagccaagcgtgatgctgtgtacctgcagccctagatacttgaaaggctgaggtgaaaggatcaattgagcccaggagttcaaagttacagtgaactatgattgcacaactgcactccagccaggttgacaaagtaaaaccctgtctcttgaaaaaaaaagaatactttcagtaagtataaaatttttgaaaatctatgtcataagaaggcactgtgtcatcatttaatcagaaaattttttctttgttaagggtacattaaaaaatggcacatcttgtaatcacagttaccttagactatagggagtcatcccaggctgtagatcgcaaatctctcctacagaattacatgtacaactggatgctgccaccacttggcctttcctaaaaagtctatgctcagccgggcttagtgctcatgcttgtaatcccagccctttgagaggtcgaggcgggcagatcatttgagggcaggagttcgagaccagcctggctaacatggtgaaactccatc

SEQ ID NO: 46070 - DNA, 1332 bp, Homo sapiens
ttctccacaaactacaaaaccatgacactccaagcgcccaagaacctaggttggacagctcacttagtgcaggtaaacgtgctccacccatctcccagcccgcctgccccctcacttaggtacaggtgcaggtacaggtaggcaagcaaacgtctattggctgtggacttaacaggctcgcccacaggtaccttccgagcatgcgtggggaagtagcacgcaggcgcggcacgccccgcgcatgcctggtgcacagagtctgcaggtcgggcggtagcgacaggtcagagctgcggcctgagcagccagcgtccggcatgaaggtctggggtctggctgctgcctgcttcttgctccagcaccatggaatgcctgcgcagtttaccctgcctcctgccccgcgcgatgagacttccccggcggacgctgtgtgccctggccttggacgtgacctctgtgggtcctcccgttgctgcctgcggccgccgagccaacctgattggaaggagccgagcggcgcagctttgcgggcccgaccggctccgcgtggcaggtactgcccttccccggcaacagccttgggacgctggtcttgcagtgaccttagactgctgccccagccgtccggcgcggcgcgcctgttgctccgcgccctccgcaggcctcggcctcccgcgtgtcctgtgagcttgcacaggcccgcgggccgagctgcgtcccactcgctcagaatgcgaccttgctatgtgcgctgtgccctgccggggtcccagcggccaaccctctgccttctcctccaccgcccttgctgcagattatgtaaccataggaacaacctaggaatcgtttacagaccgtgatcacgttagttaacacccgcttaagtgctcttgtaagaggttttttctgtgttgtttttgagacagggtcttactatgttgcccaggctggactcaaactccttgcctcgagccatcctaacgcattagcctcgcaaagcgctgggattacaggcgtgagccaccacacctggccgagaggtgtttttaaacaaggatttcatctgttcggaagtcataagtataaattaatacttccctgttttctgtttcttcgttatggacacatttatacagttgtccagttgcacggagattggggacgcacctagaagtgaggctaaagactgagttgtttctgagaacgacttactttcaactacagtactctataagtaaacagccagggagatcggattgagaaaaaaaaatcttatttgctgtttattttttcaccaaatgttgaagcatggtgaaaagttaagattttcac

SEQ ID NO: 46071 - DNA, 1943 bp, Homo sapiens
acagagcgagactccgtctcaaaaaaaaaaaaaagaaaactcagaacatcaggtatatctgaaattaatctgaaaattgctgtagaatgttatcacagctaattctattacaaattgactcacgttttccatgcgttaaaacatgttacaaatacacttcatacaagaaccaaatccttttgctaagaaagatcttaagtgttctcagcccatatgcaaaaaacatggtagctatgtggggggggcggatgtgttaattagcttgattgtgctaatcatttcacaaggcatacatatatcaacacatcatgttgtatatcttaaatttatacaatttttgtcaattatacatcaataaagctagaaaaataaaaattttaaataactctttgtggtgccatctccctatatccaggatgactctgcccttgcccctaaggtcggtggcactggcttgctgtacccttctgctctccaactcctgccatcttcctggcaccgtgcatgtggataactaaactcccttactttcttgaccttcctgaagccaagcacttttacagcaatttgactcagggacccactcccatggccacatatggctctttacatatacttggaaatgcctgtccttggacatgtaaaaacaacaaaagtacatttctcactcctgccatattccacccatcttgttcctctcccattctgtcagttctgctgccacgttgcaacctctcgttcactgagcctctcactatttccccacccagagaaacacacaggggtcccatgaccaatggggcatcagctctctttcttatttgccccttaactgaagtcatgctgccaatccctatccctggatgactgcaatcaccggcttctcctccctgctgtcaggccactcagctcagtgcccaggggaaactgtatcaatccacgagcgggattttcagtctcttccttaatgtctttgacagatgtattgtcctctcaacaacataacaagacaccagtacttacctatttctacgtgtgttgaaaggccacacggtgaacctctatggcagagagaacccaacatgatcagcaggccaggccacaacctgaaagcagacatgatctcattgcccaccggcttctctggtgacgtgggaatgctcagagctgcagcagcactgggactccaaaatccaggtgcagacccaccgcttctctctaagcaggtcactgaccgaggaaaccaagcctcatttcaaaataatatcgttttccaatgaagtcaactgtccaactactgtttagcttcaccagaacagcaaacaaactctgtgctcctggggggtggggttgggaggataaactgaaatctgaaaagccttaggccagaagcactgcatcttctgaccgaggttttttctggatttcattttaacatgaaatttgtgtagagatgcaagcaaagttgtctccagatattttttgctttctataaaaaggctcacctgtgcagatagtcaacatattagaccacctcaccttacaagggtggatctctcatgcatcctttctacacatttatcaggctgtcctgcttcctccgcctcccaagccacaagtgctgggaaagttttatggtaatcagctggaactggcttccttttcagtatttggcaacagatactgacacttgtatgggattacacaagagcagccactcctggtctctctacctctggctgttctaatagggcttatccagagcctgttgcaaggtcagattcctgcagctgaagcaaagatgtcaattccacttgggaggtggaaggaagggggcagatttagggccaagaaacagggtttggaaaatgttaagctcacgatatattatcaggtacccacttacacttcatccatgggaaaaattaagctcttcatgaaac

SEQ ID NO: 46072 - DNA, 1656 bp, Homo sapiens
ctattttataagtgactggactaaggttaacctgtcggtcacacagcttgtcggcaacagacttgagtttggatcctagtctgtttatttccaaagcgctgttatttatcgggagcaaccctaggagaatgcctagacacacacccaaaaaagcagccaggcagcagaacgcggggtcacacttcgacccctcagagaacgatcgctcccaatcaatactacgtgctcaggagctacaactgaagaagcgtgatcacggccttggcatttagggcaggcaccagcgcatctatggaccgcgcacaaattccggggatgccgaatttgggggatgctaaggggagagagtgggtctctagcagcgattgggggctcaggagcagttagtgacaaatgagcacccgaaaagtgaaaaggtgacagcagtccgcaggtgcatctactggcgagccttctccatccccgaacccaaccctcccccgggagaaggtcgcgccaggagagaagccgcgcggcgcttagggcaaggtgcagagggcggcgcggcggtgcagcgagaaagacgcggagagagggcgctgctctgtggctctgcaaccttccgccagctcccacgctttccccgcgcgtccccggcgcctcctcgctcctcttgcttccccgcgacccctgcgttcccgtgcgcgcgcgcccgcttgcctgtttcctgtcgccgtcgttgcccgggccatggcgacctgcatttggctgcggagctgtggggcccggcgcctcgggtcgacgtttccaggctgccgcctccgcccccgcgccggcggcctggtccctgcctccgggcctgcgcccggcccggcccagctccgctgctacgctgggcgcctggcgggcctctctgcggcgctgctgcgcaccgacagcttcgtgggcggccgctggctcccggccgccgccaccttccccgtgcaagacccggccagcggcgccgctctgggcatggtagccgactgcggggtgcgagaggcccgcgccgccgtgcgcgctgcctacgaggctttctgccgctggagggaggtctccgccaaggtgagagagcccggatgcagggggccagagctggccggggacacggcggggagcagagggggctttaccccaaagtgacaccagccgcgtcgcctccctcctgtgctcagttccccagggtatacaaagtggaaagtcagagcaacaagggagacgaccgacaaataagtttggagcttccactttgagccgggcactagggacacgacccctgccctcaagcctcatcaagttatgcactgcccagtaggggaggcagaacgtgagcgcctaatacaagcgagctgcttgttatggtcaacaagcctaaccgtggaggggcggggagaaaggggaggggtgtcagggaagtgagagcacgtgtggcccttcagagtagctgaaatatctccgcagctgcagggagcccacgcaggaggctgcttcagcggcccttgagaaggctggtagtgagggcccctggccagaatcatgggatcggaaacggagagaactgtagaaagatttgggttttgtgcaggggaagagagaaatccaggagcgttctccaggttttcaccctaaatggataaa

SEQ ID NO: 46073 - DNA, 1407 bp, Homo sapiens
gtatgtggaaggaataataaatcatctgccattttcaaaaccattgctaatacttactcccatgggcctcaggccaaatccagcccactgcctatgtttgtaaataaagttttattgggacacagccacacccattcatacacctactatctgtggctgttttcacaatacagctgcagagttgagtaattgccatagaaaccatacattctacaaagcctaaaaaatttacgatctggcccttcacagaaaaagttggctgacccctggtctaactaattttttactgtgttaaattctaaaaatatttcctgtcttcaagagcctttatctcagagtccctcaagttggcgggggggtcaggtgttctgagagctcacctgtgcagccaaacgggtttgtcaatcagttgtgcaatgaaatttgttcactgacttcccaacatgccttcctttgcactaaggaggtggtccttcctctcacatacttcctctgctcttctaaccccagtggaatttccccagtgccatgatcacccggaaggtgggggccgccctggcagccggctgtactgtcgtggtgaagcctgccgaagacacgcccttctccgccctggccctggctgaggtgagccgctctccctgtgtttgtacaaagcagacaaagttcaaaaattgatgtttatctgggacagaaagaagcaattttggagcctacttctttgcttacgcctcctgatgcatggtgttgtgtattaatctactggtgattactttaagtcagctgtagctcttttgggaaaaaaatggatgagggatcttctgacatctgcaggccatatgttttcagcctactgtaaaatggtatctatccatcatcttcataaactaggcacttaaacatgggtgtttctcacatttaggaaacttcttatttcccattcccattcccagttcaatctgcattccattagatcttattcttttgtttgaaaacctcaagtggcctcttgtgtcactcactcagagtaaagtccagattccttagtggctttcaaggtcctatgtcacttcccacccccccagtatgtctctgacttcgtccatcacactggaacccctcactcttcattcatctgcttggaccactctggcccctgccgctttccagaccccgccagccttgccctccactcaaactttatactttccctctgtctggagcagtctcccccagatacccctataacttgcttcttcacgtcttcactcaaattcctctctcccagggaggccttccatggccaccctgtctaaaaatcacaatttggctgggcgtggtggctcacacttgtaatctcagaactatgggaggccaaggtgggcaaatcacttgaggtcaggagtt

SEQ ID NO: 46074 - DNA, 3836 bp, Homo sapiens
aattataatacggactaaggtattgtaacaggggtcatgcaggatgctataagagtacctaaaaggggactcttacccagacttaggacatcaggaaaagcttcctagagataaatcatgtctcagcttggggctttaagacaaatattagcaaggaagggaaaagaaaaaaattccaggcacaggtaataaagatctttacgaagtttcaaagacaggagaaaatgacccgttggaaaaaagtaaaagtttgataggcctggaacctggaaaggcaggttctaagttatggagccaaatagtagagggccttgtaaggcagctacactttttaagtgcaggaactggagaggggcactgaaataacaggagtaggtgtgcattaaaaaaaaataacaacaacaacaaacctgttattctggccggtcagcctagggcctagaataaataaacaatacaggaagcaaggagacttccaagttgccatttttcgatagaaggtttagccttcgttcatttgtttcaaacctctcgcttacttatttcctttcatttgagttaaacattacatttccatcttttcctccctggaccccaaatcacgttcgaagcgacagtctggtgcagtgttagatccgctgctggggcgcaactccgcgcagcagcagcaacgcaagccctgctcctctggctacgcagcttggagatctgcctcagcatcgtccgcccagctccacggcaggtcccaggacgcgcagggctacctggtatcaaactgcctccgtgcggactggctcccgctcccctcatcacttactaggtcttgggctcagagatggtttcaggtcggcgttccaaggcgctctcctccaccggaggctcgaagtaggagttcagagccctctgaaaaacaaaggcacaagggatgaggtttgtgcgctccaccgacctaggtaatggagccggaagcgaggacagcgaaagcgtacttccatctcccagtcgttctcggccaggaagcactgagccactgcggcatcgcagcttgcgaccgaggcaaactccacacacagaagtcgccgctttttcacctcaggctcgccctcttcctccgccgcctccctcccgccctccaggcaactccccaactccatcttcctgccgcctctgcaccgcccctttaagcggaacaggaggccaacgcgcggctctgcgcaggcgcctgtgtcatggcgctcccgcatcaaccgcccggcggggaaatgcgctgctctcggaaaactggtgcagctgcgccgcaagggagccgccggggcggtgggtgcgaagcgcgcatgcgcgcttcgtcacaagggtgcgaggaaagtcagtgagcaaatcgcggaccaccggggctgccagctcgcctgactcccggcctcttgcgctcctaggggcggagaagggtgcgggctcttcgccctttgtgtcctccttctttcactaacttctggactttccagctcttccgaagttcgttcttgcgcaaagcccaaaggctggaaaaccgtccacgatgaccagcatgactcagtctctgcgggaggtgataaaggccatgaccaaggctcgcaattttgagagagttttgggaaaggtatgggaaaggtaggggagaagccgtggcttctaatgaaggaaaagaaagcaccgtgcttggtgccgttgtgagctttgaataattatctcttgttaggttgtgttctagtacgcctgtaaattcaccttagtaataatgattattactttaatggagcccctaaatatgctgggtcgaacgcgtaagttctctatctaaacatagataagtatggttatgactcgtggagacagttccaaggctgggagggactttggagtttgatccttcaaccaacaaacgtctgcattgctccagagaagagtaagagaaacctctgcatttaaggcacattacagtctaattctctaggctctagaagattagaagataaataattgcaataaggtacaaaagccaagtgcttggtagagtggtgaacgaagggagaagttgttcctctgtagtggtttgggaaatttctcaaaggcacccaactcctgaagaagtaagttagcccttggaggaagactgagtgcttttctgagaccagcactcacaaagcccgaaggtgtttgtttgtttttgtttttttaggatgaggtttcgcccttgttgcctaggctggagtgcaatggcgcgatctcggctcactgcaacctccacctccctggttcaaacaattctcctgcctcactcagcctcccgagtggctgggattacaggcatgcgccaccatgcccagctaatattgtacttttagtagagacagggtttctccatgttggtcaggctgctctcgaactcccgacctcaggtgaaacgcctgcctccgcctcccaaagtgctgggattactggtgtgagccgccacgccagaccttgaaggtgtttgttgttgttgttgttttgagatggagtcttgctctgttgcccatgcgggagtgcagtgacacgatctcggctcactgcaacctccgcctcctgggttcaagtgattctcatgcctcagccttccaagtagctgggatgattacaggcatgcgccaccaagcctggctaattctttatttttattagagacagggtttcatcatgttggtcaggctggtctcaaactgctgacctcaggtgatccacctgccttggcctcccgaagtgctgggattacaggcatgagccaccatgccccgccaaaagcagggatttactgaaaatgaaaggacactcctgtgtttggggtgtggagcagcagctcaggggccctaataccccattgaagtctcctattggccacttggtactcatctcatgtaaatgaagtggtgacccacaattggctgtgaaaagcaaccaatgaaaggctaaagtgaagttacaaagttgcccttatatgcaaacgaagacgtggcgtgcaatcagatggtgaagttacatagttacactcctatgggaagatctgattggttgcagaaagaataattttttttaagggataacttacttcttagcgtaattttgctttttgcaaccaatcagaggtactttcaatttcccatctgccacacagaaaaggtgggggtttggaaagggagaagcctctggttcttttgttacttggtgtgggaagttagggttttactttcaatttagttctaggaagtcagcgtgaaacagccctaggttccctgcctccagatccgattctcctgcctcgcttgtaagaaaatcatgctccataagaagcatttataactaaaccttgtgaaccccaaaaatttgagacaggtatcagttaatttagaaagtttattttgccaaggttgaggatgcgcacgcagtgacacagcctcaggaggtcctgacaacatgtgcccaaggtggtcagagcacagcttggttttatgcgttttagggacatataagacatcaatcaatatatgtaaaatgaacactggttgggttcggaaaggcgggacaacttgaagcgggaagggggcttccaggtcacgggtaggtgggagacaaatggttgcattcttttgagtttctgatttacctttcctaaggaggcagtcagatacacatttatctcaatgagcagagggatgactttgaatagaatgggaggcaagtttgtcttaagtagttcctagcttgaattttccttttaacttagtgatttgggggcccaagatattttcctttacatttgcccc

SEQ ID NO: 46075 - DNA, 616 bp, Homo sapiens
taaggagtcagttaatgtgtcaagaaaaccttgttaatctgattacaggggcccataagctgatcttgcatcattgtgcctttgacgttaatcattaatttatagagaaactgaacttattttatctttcaaatttggaccttacagtcttacctgcccacctcttcttcgatagtctctgggccttgaggagttgaatgcctttaatttctggccgtgtatctcaggaatgcagtttattttgattggcgtcttctacggggcctgaagatgacagcttcaattgctgtcagtgtttaagatttagtaggacttggtgtcctttttagacccaggagtcaaagccctgtaacctaaggtcacaaggactttaaaagcacatacaggaaaatacccagttgtaatcatgttaattaaaaaatctttttttaatctcagttttttcctaaacataggaattatttcaacaaaatgtaaactctgttaggtcagttaccaaaaagcaaaagaaaagaccttctgcaatgcacagaacatgatgttggaagaaaacacttcctttagacctttaagacagtgtgcctttttaaaggggagagaaagctgaaaaaaaatg

SEQ ID NO: 46076 - DNA, 3979 bp, Homo sapiens
gaagtcaaactggtcagctagagattcttttttctttctaagctgagcacgtagtctgttcagagcttgtttcttccgggagtttgggtcccccattttgaaatacaggtggtactaaagcctttggaaattgtcactaaactatgggcactttttcttaagactcaagtacaacagaaacaagtcattttttttcctgctaatatgattgattagcgaaaatcacgactataacccaaaaactgcaccttctgtcaatattagcagactgtcatattacagggtcaagaaacaaaagctgctgtccagtcatgtttggacaataacgtttggggtcagacgggaaaaagggaggaaagaaaggaaagaaagaggagaaaataactaactttctggaaaacacatttggcttaactgccaaaataaaggctttgcggagaaatgaaaagcctataatcaggatttaggtgtgcaataaaacacagctgacaccagaccaatccctaaaatccatccggattttcccccctttttagaaaagggattaaggaacagggagggggaagtgtgatccttgctttccaaaaaaaaaaaaaaaaaaaactcaccaaaaccaaaaccaaaaccaaacaccaaaacagggtaggtgaatgaaactgaaatatccaattagattttacccagccagctccatggctgtagtacctaattcttagttatttcagatttcactattgctatgtattgtcagtgcttgttattgattacacttggtggtgagcatagagaaaagtgcaaaatcggtagagaaggaaagggagaggtacagggtttccctgcaatcaactacagtgtataccgggggcgggcagctgtggcccaaaggagccatgagaaaaaacagcggagtcattaccaacttccccatcacccacattttcaccctcaggcggctgctaacgctgctgccaaggagaatcatgacggcagaaggaaaaggggtatataatacggtattaattattccggctctgtggttagacctgattaatgcccgggttcccaacacccccagcctgcaactagtcctacattccccaagggagacttccctgtggatctgcccccgttcaaaatggtggggagtgcgatttatcttcttgtgagcattgccgaggcaaaggtggcgggttcttctcccaaatcccaggcggtgcccggagaccacctgccttccacccccgcaggtcccacccccaccccttgccttcagcggcagcgactcactcgcaccacgggagacacaggatcactcaggttttcactcatttcatcgtggaaacaattcccgcccgggtggagtgggcgggagagggtaaatgggaaggttcagtgggggaaaaaaagaaaataattgtgttaatattacttctaaagtaagcccacccaccctccccccaaaaaattaagttcccggattagctctctctcacgttgaacagaccatgtttccagagtttggattgtttagggtggggtcgttagttgtttcccgaggggcagggggtggaattgaggcagctagggcggggtgggtgacggggaaatcccctccctgtccccgcggagcccgggactcacggaccgactctagggcggggtttgggccctctagccgcagcctgcgggcggagcggtggcggcggcggaagaggcggcggcggcgggggcgctgctggtagcacgggcaggagccatgtcaagagaaaaccaccagccaactgagcccctccatccccgctgcagtgcgcaccgtgactggaccgcccgcgctgctgccgccgctcagcccccacctgggacccatagtctggctcggcgccctgggcggcaacggaggggaaggacgcggagacagcggcaacagggagagaaaaagaaaaagaggaaaaacaaagagaaagatggggagttggattggtactggcggcggagggggaagggaaaggaagccctgcgctaagggtcagcaaagtaaccccccaaaataaagttatttcagttcaagcatctgctcttgagtctttcttccccctacagtcggattccggctctcaggaaaggtcgaggagacccggaggggggaaaagccgaagcggttggtgagcgtccgcggcagtactgcctcgttcccccccccgccggtggctgcagaagcggcgaaggcctcgggcgcctcgcgggtccggggcagagtcgcgtttgagaaaagaagcgagaacaaacaacttaaaatggcagcgacggccgctgcgtcacccgcctctcaccggcaccgccccggtgtgactgcgactgcgcgccctgcgggaccccaccatttgcgcagaatcaaagggggagaaaggattggaggtgggaaagttttcaaggttaccgaaaaagaggaaaacagatcaagagtacggaatagggacaggtcttttaaaagtggagcctttgaatttaacctctccatttcagtaatcgcccctcaaaaggggagtttgagagttgagactcctctctcctccagtatggagtatccaaggggcgtggaaaggggggggctccccgccactccttccgccccccttcttcaggaagtcccagtctcctgagttggctcttcgccccgccccgatgtcgtcataaaagcacgccctcaaccatcctcaacaaaacacccggatggagtcgcacttcccgagtctcgtcagcctctcagagtcaggctgggcgcgtgacagagccgaactagcgacctgggcgggccaaaactgcggaagtcggcggagagtgggcgagggtaggggcggagcaaagaaggaaaaggaaagtgtgtgttggagattggaagattcttatttcgattcttataattagttagtcctgggggtcggccccgcggtatcctgcggcaacaaacctagaactcaattcgacacctggaatttaaacggcgtgcgggagcagatgtctcatgttagtgctacttgcctctgtccccaccccgccacgtgcgcaggcagggagggcggtcctcaagcttcgaacaaggtcaaagacgttgttcagacgttgctgctgtggcttaggagaggagcagcccagtctgactcgtggatttttacccactgctgtcagaacacactttctgttagaatcccccaagacctcagacctacagcctgccccttaggtggttcactgtcttcatcgaaacgtttgccgccgagtcgcacgtccttggcaccaaaaagcgttgagtccatttttcaaagctctaatgtgctctttaaaacacagttatgtaagtacttagcaaaggtcaatactccacataagcaatgcttatatactcattggctactctgagattttagaagtccattgggaccccaattactacttttcacttcgtgaagtcaaaacagatcagctgtaataacattatttcagccatgagccaaaagaataactggtacccacccttcaatataaattgtccagaaccaaaggatgagtcctgagatttccaaataacttctaatctcggaagatacagcttgcattttgctagtgctttgctgatttgttttcaaaatcatgtaactatggaaagctcacagagataaaacagaaaatgtcacgtagtttagagcattggtttaaaaaagaaagatttttaaaagtaagccgagcatggtggctcacgcctgtaatgccagcactttgggagaccgaggcaggcggatcacctaaggtcaggagttcgagaccagcctggccaacatggtgaaacctcgtctctactgaaaatactaaaatcagcctggcttggtggcaggcgcctgcagtcccagctactcgagaggctgaggcaggagaatcgcttgaacccgggaggcggagattgcagtgagccgagatcgcacca

SEQ ID NO: 46077 - DNA, 1157 bp, Homo sapiens
tgggccgtttacgaaatccatgtgtgtgaccttaaagaagctctttcccgaatcattttctgttgttgcattgctgtttccagagttctggaattctatgccacaagctgaacattaaggtcattgatatcatctgaagccaggaagagtctctgctaggaagacttttagcacaaaatcaactattctctgctccaagtaaaatgtctaaactgtctgcaaaggcaaatggctaaaagctttgacaggaatacttcgttaagtgagattagtcatgacctcttagtaatataagcctgaagaaagaaatgaaagttggaagtaaagatatgagtcatgctgcaacttggtagctggcattcattcaggagctcaacaatgtcagcagatcttaggctccttccttctgctctgccagtccttattcttgttaactcataaattcaaaatggctgccacagctcccaacatcacagttcaaaggcagaaaacagggtagtcagggtaaaagtctttatccttctggggctactcttatcaggcgaaagattacctttcccagtagccctgtagtagacttcccctcaaatctctttgccatataactgactactcttagatgtaaggaaggctgacagaaggacacagaatggctatgactggcttagctaataatgactcatctgctagggctgggtacattccccagacaaaataaggcagtggggcaggagcagggaaatggctgttgagtaagcaacagtgtctgtcacagtgaatttagcccatatacatataagtttggtcttaattctgtatcaaattttgtatgatattttctgggtttttgttgttgttgttactttttgaacacttctctactggactgtattttctttgtgtttgcatgtgtgtgtttcctaatagtttatagggaaataaatttttgttctagtggttaccttataactacaagtttatataataaacctaatcctctttcttcaagcaaaaccagttgactccatactatgaacactgacaaaattagcacactatcacttccctttttctgctgttcttagtatttatcttcgcttttttttttttttttttttttgtagagacatggtttcaccatgttggccaggctggtc

SEQ ID NO: 46078 - DNA, 1600 bp, Homo sapiens
gtaatttcagtgcctagaacagtagtaattggcacgtataaggcgctcaatgaatagctgcaggattaactgataatcggttgtctcctgaacaattcctaccgcaccacaccatagtcaaaacacaaaaagccaaaatataaaagcccctaatacaactacgagtccgtggagccagggctttacacaaatatatgtcgtgtactacatattaatatatatgcacatacaatattttgttcttctggtgctaacgactaatggaggcaaatctttctccctttcgtaaagggctaaaactttgcattttaaggaagttccaagagcagggtcggaggggagggtcaaagggcacaggcctcccagcccgcagaaaacccccacggtcctcaagtactcgctaccgttgaccgcgcaggcgcaggaaggggcggggccgagggaagaggcgattcgcgggatccagaggccccgcccctcgtctgcgtcagttggtcacgtggttgttcggagcgggcgagcggagttagcagggctttactgcagagcgcgccgggcactccagcgaccgtggggatcagcgtaggtgagctgtggccttttgcgaggtgctgcagccatagctacgtgcgttcgctacgaggattgagcgtctccacccagtaagtgggcaagaggcggcaggaagtgggtacgcaggggcgcaaggcgcacagcctctagacgactcgctttccctccggccaacctctgaagccgcgtcctactttgacagctgcagggccgcggcctgggtaagggcgaaggggttgttgaacggtcgcgggagccggggcggggttgggaggtgagtcgagggactgccccattggctgggtcggttttggcgcgctctcacttccgcgcttcctattggctggctggcgcagttcccgaggcgcgcgccgcggttggtaggctcggacgcgcggggccacactgcccgccccctagcctggcgctgggcctccgggacaagttggctgggtccgggcttggggactgcaacgcgggtaagggactcagcctgggcttgccagctgtggggatgaggcgaagcatccatcctcttggcagttaagtggctggtcctgatctgagggatctgcaaatttggctcatggaaagaggtggctgaattctgcgtctcccattaaacggatactggcgttgttgatacgggtttcgcatggaccctgtcctgtgccagggtttttaatctagctattaaaggaactggagaataacaagtaagggttgcaaggtcgctgacaggcgtgggaaacttgtgaaggattagaatgctaagtggctttcagcttttttcacactaaggtacgttttacgtcgcaacctaggacacagctatctaaccaaatgagacgtgatggaagcaatgtttctcgtctcttcaattccattctgttcagttgcatttttctaagcagtgttgctcatgactcactaatttcgagatcacggcccgcgacccgcagtttgaagaacattgcgtagggtctgtttactggggcccgaacaccattttcttaacatgaaatag

SEQ ID NO: 46079 - DNA, 1186 bp, Homo sapiens
attcttatagtctacaggggaagatagatctcaaacaaataattactactttttctttgaggaataaattgtatttgtcttcaggccttaaagtctcatctgtcttttcaaatctctcttgccacctcacccccacaaattccaatctccctctgcttttgttcattattaaaccttcatcacaattcaagtgaaaggtgtcctggaactctctgttctttttttgaagagttcatcccctgtgtcctccaggcacaggtgagtcactgagctgggaggtggctctgtggagtacggactgtaccaccaagtggccttgcacaagtttttgataacacctaccagagccacgagagttctgagaattctccccacaggaagaggaagcatttggaataggaagtaagactgagctgccaaatatagcacagctatataagaagccaggttgagaaagaggaaacatgcactcttttcagctgccaggcagcactttgctttggggaaaaacaaacaaactgtgccatggctgaaagcctagaggagctggaactcaaatgctgtgtggtgtgcctgctgggaccctgtggctctggaatggaacgctgtgggaatcccagtgccaggctctgggagggtctcttgctcaaccaaaagcagggagagttctccataaccaagggcctgcagcaattatttgattaacttcaccaagtttctgctctgttttctgttttggctatggtgacatggacttttgttattattattattagtcttcttaatactgctggagagaatggccagtatcttaatatcttcaatagataaagaaaagcctattaaaggcaaaataccatgaacagaggctattctgtgtctacacggtaagctggatcttctagtccacctgagtagtggcctgcttctcagaggaggtaacttctctgatattgttggtcttatcctgtgggttgaagaagtgagcacaaaggacctgctgattcattttcacattctcatcactgacactgcctgctccaccacgggcgctcaatactatgacaaatcctcacttggtcaattttgtgaatgtgacatactgaaaaatgttaccataaataaaatgagtgggttttccctatgtacataataagcaagatatgatcaaatgaagtttcacttt

SEQ ID NO: 46080 - DNA, 939 bp, Homo sapiens
caggcatgagccactgagcccagctgagacaggttttataattcacttaataaaatcatatctcaggctgcaggaaaggaatgtcaaatctgatttgtgccaggcaagttcatcgtcattagtccaaaagaggagagaggtctattggaaatgaggagctgctgctttccatctcaccctcggtttttagtttgtctctcttcagtttttgttgctgctttccctcgtgtactcaggattatgttttaaacactcacaacctggacgattttggttttgtttacttattggctgtatgtttacctcaaccaggccaaaggttctatggactctggactggatgcactactgatttacttttttttctgatggtgggggtggggagatggacttttgctcgtctcccaggctggagtgcaatggcataatctcggctcactacaacctctgcctcccttgttcaagcaattctcctgcctcagcctcttgagtagctgtgattataggcaagcaccaccatgcctggctaatttttgtatttttagtagagacgtggtttcaccatgttggccaggcaggtctcaaacttctgacctcaggtgatccaccagcctcggcctcctgaagtgctgggattacaggcgtgagccaccacgcctagcctatttactttttaaaacacttgaatggtcttgtaatgttagctgttctcagtcccgcaaaagtcgggtttctgtcaggcaacgcgtctgcttaatttaggtgtcaaagagagtgtcacgggatgcacggtaggacagctcccaaacccacaggatattccttacttgcaaaatcacaggcccattctgctcacagcacatcaggaatgacttccagttgggtggtgtgagggggagttttatttgaaaatgattccaaaacctgtaagagagataa

SEQ ID NO: 46081 - DNA, 1773 bp, Homo sapiens
gggaactaatagccctcttacttgcctgcccatcgtctgccggttcctctgcctgggtattttgaaagaacagcagttgctcatatcgtttctgttgctcatttgctcccctaaggcattagtcagcctgaaaacaggacgtttaaggtattttcctttaacagttactgatttcctttgacagttttctccctctaccacagctcttttagaagtctaacaccatattcaattctgagaagccactgtgctgtccctcccatctctgctcttgcgcatctggacttcctctgcctggaacgcagttcctctccttcaccacgcagcatcagtcttgggtcaaatagaaacgaatcgtccccttcctggttaagtcttccaagacacaccagaggtccaggctggcattcttggtgtacatccctcttctgtagaacattataacactgtaattggcacactgccctgttgacttacatttaggcacttttgaaagcactctgtatcttccttctccccctaccacttagcccactgcctttcacaggatatgtcttcactagctctctacttaatgaatcacccctcccactgcactcaatttgattaatttacaaaaagctccagccgcaaaccaagcatttgaatcttttttttcttttaaggaaactagccgttacacttctcaaaccccaatttctaaacactctgtttacagtgcaacactgaatcataacagaatatgatttctgccaagaaaggtttcaaaatagcttttgcaaatccatggtaggaaatctgggcacatgttgtttagttttatatttgactccaaacaaaaagtagccaaaattctctttgcatgttaacttaaaactgatttggagcacaagcatatttgtggcactttcagtttcatttttagaagcgctgcaaatttcttaaaggagataaaaataattttaagaacactccagggtagaaaataacagagaaaccacttccaattttaaactgatgaaggcatagctctgtaatattatgatctactttctcaaagcagattctcattgtcacctctgtcccaaattcctagtaattgtgttcccaatggacttgaaattattccaaaaatatgttctaaatgtatttgacaggaagaagccattctaaatttcatgacttctcttttgactttgttcttacgagtacagatatctgacaccaagctaacataagcactgaggcaattcctggaataattagtctaagagtttaaaaggcaaacctctctagatttttgttgttccattgaatgaattcatatagccaaagttctctgttagatttcaacttatatcacaaccatgtagaacaggttcactcaaccacacttttgtcctcagttccacgtgaaagtcacattggagcagaaggcaaaagaaaaaaatatgtgcacctatatacatgcttttctgtgtattgtttaaatgattagcttttccccaaagtatttttaaagatatcaatgaatttgcttctatcaaaatcagaaaaataaaactgtagcaaattcttgttttgctataaaacattaaaactaaaatgaattgccttttttcgaattggttttgggggtagattcgagttacaaaatggccgcccggagcgtgttcggcgcggttcccccagcggtctctggctgaaccggcgctctcgcctccctgctgaacacagcgtgaggaccccccctccatggacatggtgtttgag

SEQ ID NO: 46082 - DNA, 2608 bp, Homo sapiens
ttcttggccctgaagttgaacctctggggatggagctcagggaagtcatagggagtttgggcccaggtaggatcagacctatccgcaggcttacataggctccagtgattaaagctcagcttcctgaatatgccccgaggataaaagagacttttccgagtgaaaggcattttccaaggcgctctcaacgggaatgtctgagatagcgaactgcggctgcagagcaccagctgaacgcacacacacaagtgtcttctcacggtatgattagtgttcacaggtttcgtctagctcatcagaaatgaagaatagcgatgatgaagtgacatgtcaccgggagggttgaaaaagaaaaagtgcgtaagagggtcccaaaaagaaccagcttccgtgtagacgggtctgcagaatctgccgtctcccgtcttctgggtcccctggcccgcccggagtggggacaaggaaatggaaagcccggctcacccggctctcctccctcgcagccagcagatggctcccgggctctctcgcgagcccgctcgccccctctccagacgcagggcttttgcggtttgggagggaggctgcgaggaggggcgcggtgcccgccgccgccaccgcagcaccgcacagcgtctctcctgggggtgcgacctacgccggggacccagcgctcgggcaccggaggccggcctcgcaccggtgcggaggccggctctcgcgaggtgaggaggaaacgcaggaggaagaggagaaggagaaggaggagaaggaggagggccggagctgcccccgcccagccggagcccggcaggagcgcgaggaaaacctactccccccgccccgcgccgctctccccgccctctcccacgccttccgctttcacctagggctgtaggtgcggcgcggaggctgggcgggagctacgccggcccaagccccgccggggaccagcgagccgggaggaggagcaggcgccacagccgccccgcgccccgcgcccgcttgtaatccggtccgctccttattcagccgccgggaactgcgaggaggcgtcatgtagcagcagcagcaaatccgcctcgcatttgcaactcttttttttttttttggtggggcggggggcgcgcggcaaaattctgtctccgcccccccttttcttgcccacttccatttgcaagctgcatctgcctctctaaaaaaattgaggagttcggggaagggcagggggccataaatcagagttggacctgcaataacccccacacctacagggcaaccatgaccgaggagagctctgacgttcccagggagttgataggtaagattcacgcggttgttggttttccaccttcctctgcgtactcctcacctctctctcccttcccacctctgctttcccgcaggtctcgagaagtcttggcgccccttagggcagagtggtgttgggcagggtcactgggggtgccgggaagtttgttcccatccgaccgcctgtagagccaagtgcagagagggaaggcttcggggaggaatcgggagtcctcgggaggtgggtgggaggagggtctcgactgtgagccctgggcacctcctcttgcccggaagcggggatccaggttggcgaaagaagggggcgggccatcttagacttgggagttctgcaagcgaggggagccctttacagctcccagcccactgccccaaactcgggaaagtccgggaaagcctattggaaggacaggtggcgagcgcacagtaggtcgtctccggcacgtgtcaggcgctttcctgaaaatgccccgcgggaggtgatcttctgacacgcagacttgggggagtgggcgctagtctggtaaaatgactgggcttggcaaggtgtggcttggtgtagccagctgggagcgaaagggttacagggctgacgcagactcaggccaggaaatagagggttaatgataaaagccttattttaataatgattaacctaccgattctccctataggggatctcttagggaacccgtgtgtgttacgctgtgcaaggtgacccattgtttgagtaccttgaggtttttttttttttggtggtggtgggggcggggctggttaagtcttggggtttaacttaattatctggagggttaaaatggcagagctgaaataggatgggagagtgttctgaaaacctagcgtttaagcatgtatatgtgtgtagcatgttatactgtaacaaggtatgtgcgtctgtgtacagatgtgttttgagccctagtgacctatattccctcctgtaccattcttggcacactacacagcctacagctcacaaagatgatgtttaatcggcgctgacaacaagaggaagttctgagcacccgttgatctccatgtgtggaatttgcccctctgttgtttcttttagctaataatactttggaggaatttgtgtatgcccttccgttggtgactgttaactcagcaggtaaaacttgatgtagagaggctgttgctaggtttgtatggaagcccctacttctgctgaattacagacaaacctgatcttttaccagaatttacagtatgaaattattcacagacgcacgcg

SEQ ID NO: 46083 - DNA, 640 bp, Homo sapiens
gcaccctcttacaggacacaagagaataatcatgtctgtacaggttggcccctggtaagatgctcatttaaaaatggttgtgtcagtttaatataagtgtgttcttttcttgcctacttaaaatgtatttctaactatgacttttcttttggaaaatgattgactttgggggagctctttcagaggtaaaggaagttaactagcagatctaggtaactgaaccttgtgtactattctagaaatgtttatacttctgccaaattgaagcatgagttcagtgtttgcataaccacctgtgcagttactcatagtagcattccagtatgcatttgctgaactatactcttcaattttgcaataaaagtattttcacatgttggctgctactgtgaaaattggtttctctcaaatgttcggaaagcttgtgctgcagttttgatgtggggggtgtggtttagtgctgcataacatttacttttttggtggaagggggatctgtgatgtaaacttttggtttcaatttctctatttggagctctttttgttagtgctaagaattctgagggtatccctatagatgctggttaaaaaacaaacaaagcaatgttgtcattgacagtttggtcaagtgggatgtaag

SEQ ID NO: 46084 - DNA, 694 bp, Homo sapiens
cttgtgcccctcgccccccttacccctttccatctgccacctctcaccacttcctcacttgctatgtatcgaggtggcaaattcccaagtaaactgctgactttcctcccctgcaggaaggctgggcctttggttcacagtagcctctttcaccagaactctcgtaggctaggaaccaaccctggagtactgctgctctcagaagtgcccacatttgcctctggagcttgctttgtgtgtttgggtgttgaattttccccttgacttggaaacttttgtgaagaaactgaaaggtgctttcagattaagcagctgtggctcccccttccagccacgctctttgtttttaaagctcaaagtcttatttgaagtgaggagagaaggtaggtaggttgcagtccaggtttttctgtttgtgaatgacgttgcttaccttggctgattccttttcctaatgacggtgcttctactcttggccttttgccatgtgtgtaccatccactgggagctgttttcccttgtcctttaaagcgtatccgactctatctccagtgctcttctagcaagctgttacagtaagcataaaaacaagcgcattaaactaggaataaaatgccaagtttctgtctccttgccaacctcattagaaaacagtgataaagtatgtatgcatataattacagtaattaaacat

SEQ ID NO: 46085 - DNA, 2162 bp, Homo sapiens
tcttctttattcttttgcttctaaatcacaaagactaatctgaaggaatcatacgttttgatttatagttgcagcaatggataaaattatcatgaatttgagtattagtcttcatatgttaagatctggaaggtagagagtttgtactacttttctactagattttctactcactggaaaacatttgccatatgctgtcttccctgggttttatgcctgagagcaacatgttgtgccaggctaaagtgttttaggacgttttgttctaggaaggactaaaacagagcatgggttgttctggcaagttctttgccatatgcaagaggtcaactgaaaagatgacagcctgatgggaagaggtgaggactgacagcccctccgagtcaagactacaaaaaaaacagaaacattttctcagccagtgatgggaaaatgataaaggagaatttccatgtaagaagctggagcacaaaagaaaaaaacaaggtccccaaagaggaagaagctagcaggccagcaaggaagccaggggctaaaggttatagtacatttttttctgcctcccagggccgttgtgaagatccagggagataatatttgttaaagagcatggcttagtgcccatcctctggctggcagtccaaaaatgtttattcacctgctcttctttcctattcttagcaactggatgtggcagctgttaattccccaccacaattctctttccaccgtctcctcttttctttgtaacccattagggagaggtctcagtggaaaggaaggctggacaaagatgccttccaccagcctgtgatggagggcaaagaccaggtctcttttgctgactataatatcaccaggggccagaattgtgtttggcacatggtaggtgcttgacagaaagcagtcttttctgggttttatacctgaaagcaacatgttgtggtgggctaaagtgttttaggacatcttgcacctgggttgttctggcaagttcttccttatctcaggatgttgcattaccagcacatgctggggttattcttgagaaatacaagtgagaaaggcagaagaactgagttagcccaaggccacccagagaactgtcctgtacacatgtgcatggatgatgcatccagagagtgtgctgaaggctgagtcacctccacccccaacaccaacagggaggataatgagtcaacaggattacctcttctcagcccttctaacttacagctggagggcttgggacaagagacagcatgatagtattagggagaatgagtttagcataaatttcagcaagtctagaatcttacaattgggcactgtttgggattatctatgcttctcaacccttgcatcagaattcattctttattgttggttacatatgtcacttttactgtagtaaccataaaatccaccaaagaagacaattaaggttctacatagaagggagttgtaacatctttggttaactcggcaattaccttattactttggtctcctctttaattatttctcccttctcattatgtttttttcctcagagaatacaaaagaagattaaaaatgagttacagacacctgggggcccagaagaactggacttttcagttaaaaaatgtaaaatctctgagttattgggaagaaaatctgtaattacaatacagtcttttgtcacaaccaaatacaacactgttcaaatttgttctttcagcaccctagtctctaagcttcttttcatcaatattttagtaactcattaactgtaaattgtacctagtcaagattctgattagtgcttggttgctcaagaaatctccagcattgctctctcttctacaaaagggtaaaatcactttaaatggtcaaggaacctgctttccatgtttgaaaaacataattttcacgctgtatattttgaatatttgccatcctaactatatctttgagattccagtggctttaatgtggctctgtttggtcaattgcaggacacggtcatgaaagcaaatttgcacaaggtgaaacagcagtttatgactacccaagatgcctctaaagatggtcgcattcggatgaaagaggtaactttactgacagtatttttcatggctctactcttcttgactgtttttttctttactttatcgtct

SEQ ID NO: 46086 - DNA, 2209 bp, Homo sapiens
tatgggaaagcaaaataaatgaaatctaatatggctttgggaagtagttaatgatgaagagtttagggcagaggactttatttgcaaactgtgaataagagccatgggctgtttctcataaggaggaaaaatgttcagtgctgagaccacctaagatgacatttgagctgttaatagctctgcccagcaccttaaggaaaagtctcattctacagtggactgataactagcagaggaacagggtgcatatgaatccaaaaagaacagacacaagcagtcttggcaagaaaaactgatgagaaattgatataagaatggctggctccatttctttgctgttttttcctcatttacctggtttcaaaataaatagataaggctgatgactcacacatttatatttctacaaaggcccttctgttcttagctatggactcacagacacaaaacttacctgtcaatcttcccttctgggtctaacaggagtctcaaccccaagtgtccaaaataaagttcttgcttttcctctggaacctgttgccctccctgctcatttcgccaacttctttgagtgcaacactattcactcatttgctcaagccgtaagtctagaagtctctgatgattcttccctttctctcattcccatatacacctcattagcaagtcttagtggcatatctccaaaacaggtcctgaatgtggtctttttcaccacaactagcctagcccatccaccatcaacacttgtacaggtgaagaaacaacttcttgttcagtctcttggttctcaatcttgtcctttacagcccatgtgccacacagtggccatagtagatccagtccccttaccaggcctataggacccaaaatggtctggccattttgggagatcgagaccatcctgcccacccctttgatctcatctcctaccattaacctcctcattcactctgcatcgccatgttggactaccttctgcctagaaaaacgtgacaaacttgctggttcctctgcctggaattgttcttgctcagcgctgtctccttctcagtgttcccgtttcagctcaaatataaccatttcacacaaccacactaggtaagtggttagactaggcagagtgcttgccctcctctcctgatgctaatgacctagttgctgtcaatgctactcttgtttttttcataccatgtggcattcttacttctttcttttcatatgtgcccctcctgggatgtaactttctcgcaggtgtactgtctgtgcctgcatcacgctgtccccacaacagcactgtcctcccttcaccctcggctgtctgttcccactgctctcattaacgccagcaaaaccattatcgcctgttactgaaaaaactggcaattgatttctggttataataagtaaaaggagagggcaatttaatgagaactaagttcttcagtcatgcaggagatggagctatgaaagcacaacattgcattcattgattcaataaatatttactgaatcaatgaatgaacttgcggccagtgaactcttagacattggaacactcgaagagtctgtgtgggtatagcttgtggaaaaaaatgttgccctgaaagctatgtctttagttcttgtgactgatatgattttttcaattcaactaattgccctgaggtgtgaaaataaatgataagcaaattatttttccagcagactattcagtcccctcattttaccaagtttcttttcagaattaccagaaccattccatttgccaatgagtatttgtttggatttcaattcaattttgagtgtgttttcgaattccagtgcagactagagggttccatggtctaacatctgtggttttgaatgacatcattgaggcaacttctctgtcagttgcttacttaccagctttagtggtacgttacataacatttccacttatctttaaacacaatagcaccaaaggatcaggtctattttcttttatattaataagaatagtccttcacagagagcacatggaaaatgatttcatttcaccagcacctactgcttatccctttacattttattcctttacatctgcttggtgctgtaactttatatctgcttggtgctgtaacttctctgatcattgtcagtagtaatagatttattgcttatttgtagtcttcaaataatctcattttttaattaataggtccag

SEQ ID NO: 46087 - DNA, 504 bp, Homo sapiens
actggagaaatgtaaacagaaagataactgccaattaatttttgcctctcaagtcctcacaatgaaaactgtcaatccttcaactaaagacaaacagtaactctctttgtcatctaggcccctgcatatgactggagtcctgaaatccagggaatcatcctcagctccctcaactatggctcattcttggctccaatccccagtggctatgtggctggaatatttggagccaagtatgtggttggtgctggcttgtttatttcctcattcctgaccctcttcattccactggcagctaatgcgggagtggccttgctcattgtcctccggattgtacaaggcatagcccaggtaccaagatgttttccaggtataagtggaatataggttccagaatgacctcagatctccaagaatggaatttttccccccaggttatggtattaactggtcagtattcaatttgggtcaaatgggctcccccactggaaaggagtcaactca

SEQ ID NO: 46088 - DNA, 851 bp, Homo sapiens
atacacaccaaatgcacacacaaaccacccatacgtatgcaccacatacatacatacaacataaacacatggtacaaactccccttatgttctccacacatacactccagacacatagcaaaccaaacatataaatacgttacaatactgcatcctcaaaacggaagtacaaactacaaacaccacacacataaccacacacacacataaatgatgggcacagatgcaccaggcgtacacagtgtgccacacacattacagacacagcacaccacagctatacaagcatcacacactgtacaacacatacttctctttccttgtgtccctgtgaacctcacactgattgctaaaaatatgttcttttttctcttgtgaaaagcctcagaagatagggcatattccacccctccccacattttcccctattgctaagtactttcaataatatctttgccagggaatgcccccttacggccctctggggaatcaactgattgctcatttcatttaatgagccccgtagactaacctgattcgggacaaaaaagtgatttcttcttccgctgtgaagacttttctctcaactttacacaatattgactttctaggattaccaagtttagccccataaatcattcaccaaatcttttgacatcactgtgtcgaagttaaaagcttaatttttaactttactgttaccttttccttaaagcttcagggaaggtgtgtgggtcaaaatcatccagtggaccagaaactgggaatctgccagtaatttcatggcataataagcagacacccttagtctctctccctgcccaggaggtagagcttgcctgccataagtg

SEQ ID NO: 46089 - DNA, 369 bp, Homo sapiens
agaaaagagttttggaggtcttcatctcaataccaagagaagtgacttaccgacttaatgtctgtggaagggcttcaagttgaacccagcgtttcctccaagcttactcccttggactttttggagcagagagatgaggattctttgccaccctagggcttaagttgctaatcattaataaaagtcatcaaactacaaagttgactcagaagggcttcttgccaaataggctttgaagaagcattcggaaatccagcccaatcccctctgcagttctttctgctttttggctgatgtaagcttctccaccttccccttgtgagtgtctcctcaggacctcataggtgtcctctggttcagacacttgca

SEQ ID NO: 46090 - DNA, 2278 bp, Homo sapiens
atgatttctccatttttttctattcttactatttatatgagtattcacaaactatatgtaataatgctttgtattatttctaaatttgcacacatgctatcatgtagcatttatgggccattctgtaaccactttggaaaataagtggcataaatttggcatacctacatgtgcacagtgaaggccaaactctttcagtttcttgtggttaactcttgcgctaacacccaggaagtcaaaagcactgtcactgctttccaagaatgtgtatagttctgcttgtccttgtctcatagatgaggcaaagccttcagactcctagctttctgtagtttatttccagctctctgaatgccttgggttcataatccagactcctttctttatatgagcattagagtcagccatggaaatttacaccttgttctgtgctttaatggctttcctggccttagctcatactcatcactttgactttaaatcccttcttactttatggccctgaggagatctcctttagattctaagtttgactctttatacctatttgaactgtattgtgagaggagagtgagtaaactacctctcaacaccctggctgagaagtgggagcctggcagtatatatcacagatcaagaattcagaaggaggaacccgggtcctggggagtcagagctaccatttactgcgcatttattacatgtcatcctcacaatgctttcaggtaagttttattatattctttataacataaaagaaaaaaaacagatttcttccatctgcactttaagaatttaagtatggaaaatttaagcccgttatcgtgtgggggtagtgtcaatttcacctttctaggtaaaagatttttccctgagtcatttctgaaggactctggaccctgggataaataatgatcaactttgggattcacatatcacaggaaatgtttctgaccctgaattatccaagtcagaaaacgttacttggttttgcaatttaatgtttaactttatttaaagtgctcctgagttctttacatgctacttggtttgacttggtagaaatagacccaaattgtctctgtgtagaaagaataacaattcagcttttcttcacctctatgattaaacacttgaatatgaattgagatatttccttgacttaggttgtaatatccatctcttttaaaaaaagaattttacattttccttttgaataagatttatttttaaactgctttgttttagccatggggatcatcagaaaagatagagtacacatttctcctttaacagttatctttagccaggcgtggtgcttcacgcctgtaatcccagtgctttgggtggccaaggccagaggattacttgaggccaggagtttgagacaagcatgggcaacagtgagacctcctctctacaaattttttttagaaaattggctggagatggaggacgcatttgtagtcctaactactcaggaggctgatgaggaggattccttgagcctaggagttcaaggttacagtgagctatgatcatgccagtgcactccagcctagatgacacagcaagactctctctaaaacaaaacaacaaccaaaaaaaaaaaaaaaaacagctatcttcagacttgtttcataagactgtgaacattgttgttaataatcagtcacatgacagctcagcaggatgcaggctctgattctgggttacatttcagaggactccagtgcacaatcctgttgtgatcataggaaacctgtctctagtcttcctagaggaagcccaggatgggtccagggagaggaagcacctttaagagtcagaccttccctcaaagctcacaatgtcagcagggattctgatgaatcaggggtagctgtcaagcaaacacactgaatgagcctaagtcttaaaacagaagacttgactaaatggcagtggtcattcactggagcttggctggtttttcacacacactctggtctaaacaatgaacccatatgtgatgttatatctgctcagaaccttacatcttcatggttctggcaaatccttttttctccaagttcaagtcagactcctgttttgccttaccatctctatgacaaatggggtcaatctggtcactgtagttatcaggctgacatcatctggtcatgggcttggaagtccatctagaacactagtggaacactccatctctattattttgtcttctatcgctgagcaaaatggtgcattttttgttatctacacaatgcattaacttatg

SEQ ID NO: 46091 - DNA, 776 bp, Homo sapiens
ttactctaggtcagtcatactccaaaagggttaaaattcttctctttactgcacgttttatgtattttatttctattgataatgcctctgattcccagacataatgcttttggttggactttcaaaaaggacggcctagaagataattgttcaaccatgtaattgcttcacttttcattaccctgtgggtttattgggcagctacatctatttctcctctggactccaaagtcaaaggttgtgttttgtacgcatgcttctttctttactctaggtcaaactctattccacagtccagtctgggaactgacgtaagcttctagttgttagacaatggtagccatcaaagaaacttaaggtgatctaaagttaggtttaataaaagtaaattttagactaacatctgccatatgtacagatatttatgaaaccatctaaccatcagattgcgccaaatgttcattcctagcagatgcaacaccattccagagacaggattttgttacccttagagttagtatcaggcaaaaggaaatcaatctaaaccaatgctttggacacaagcttatctagaaatgaagcctagggtatcctccataaaactacaggttacagaccttactgaactctccagatctggactctgcagagtccagctttggcagaaatgtggctgatagaggccattacaggagcgtcctttggcctgtaaccctcttttacatcagcctggctgaccaccctagaatgagacctcttgggaaagctgacagccc

SEQ ID NO: 46092 - DNA, 1394 bp, Homo sapiens
aaccaattggcacatacatacctccctatagtaaaatatctaaaggctaaatacaatcttaaacatgccaaataaaaagcactaaagcatgtcccttaggcttgaagaaattaatcatcagttgacaaattcattataacttgatggcaaataaaacagcccacatgaacaaaactgttttataagtgcttttctggataccacataaaaatctctttcacaaaattattaggttaatgcaaaagtaatcgcggtttttgccattaaaagtaatggcttcccacaaccagatgtcccatgcaaagtagtgccctctaatgccaaaccaaaagcagaggtcataaagactatatcccttacacacacacacacacgcgcgcgcgcgttaaaataatggcaaaaaccgcgattacttttgcaccaacctaatacagcttgcattgaaatccagtgctaaactcagctttcaggaaaccaatgtgacataatattggtaaagaaaacaaagtggagagtatcagggtaatgaatgaaaggaatggagagactttgttgaaatactcttgggcattatctgcctatgcttttacttgaactcgtggctggcttttggttttactttttctttcccctcgaaaagtaggtcatctgctctgctgggctttattatctggggacgttacttgcccttggccttgtggtggctcttggtcttctggggcagaagcacgccctgaatgttgggcaggacaccgccctgcgcgatggtgacttcgcccagcagcttgttaagctcctcgccgttgcgaatggccagctacaggtggcgcaggatgatgcgggtcttcttgtcgcgggccgggttgccagccagctccaggatctcggcggtcaggtgctccagcacggccgccaggtacacctgcgctctggccccgacacgctcggcatagatgcctttgcggagcagacggcgctggagcccggccagggaagaccaagtctgggacttcagcgccagcctcgccaccctgcttcccacaaccagatgtctcctgcgaagtagccccctctaatgccaaaccaaaagcagaggtcataaggactatatcccttacacacacacacacacacacacacacaccctaacggctaacttctctggaaggtgcctcatccaagcaaagcagaactgaagatacttttacatgcctttttccgttattttttatccaatcagactttttcagacttcctttgaatacaagtatctgcaggattttccttgtcacctgtagacactttttctcttttcaaggaagctagaaacagattttgatatgcctaaagttttgaagtgttctacaatctctagaaagggctccaagaaagcc

SEQ ID NO: 46093 - DNA, 1258 bp, Homo sapiens
gcacacaaaattttagttagacaggaggaataagttcggttcaggagatctattgtaaaacatggtgactgtaattaatacaatgtattgtatacttgaaaattgctatgagagtagattttaaacgttctcactacaaaaagaaacgtatgtgaggtaatggataattatcttgatttagctgttctacagtgtatacatatatcaaaacatcatgttgtacaacataaatatatatatatacaagatttatttgtcaatttaaaaaaagaaataaataaaacccatggctgtttagcatgtctttctcatagagcaagtgtgtgtcattatcctctcctacggcacttcctgtctgtgggatcccttgctggaatctcagtgctagtccttgtaatcataccattagctgggaaagttaatgtggcagggaaagacaggatgttggcacattctgtacttccaggtcagcactatggtcctaccatcttgcttgctccctattctaagtatgtaaaattatgctatctttttcccttgcttcttgcagtggattttaaatttatttaaccaaccatgcatatctatcatctttatttggcctgtgagattttctgttccataggtggcctgcctccttatagcaaacttggaagctccattgcatcagaatattttccaacaggatgccagggttaagatcaagaaagacgagagaaatagaagttctgctgctcagagactctaagtgaacaactagtaatcttgtaggatgttgaaacagatacactggcatctgacccaaggccatgtgaatcataaattccttttgcaatggcatcctcgagtggatcactggtaaggcctcccatctggcccattgtaacagatgattgaccatacctccaggcagttcaaaaggccaaatgcttcctactgcctggggtgctggccaagaacactattggccaataccaagtacactagctgccagtgagttccttttatcagacttgaacatcatataccaaagacagtttcagaactaccttggtttttaaaattagagttctagttaatgtttttgctaataatatattggttgtgttagtaattaataattcatggattgtgaatcacccaatcaagtagtacattaacacagcaggaggtgggggagaaattttaaatttctctcaactttaacatgttttcttatgtggtttgctttctttagtggtttgtttttaagattata

SEQ ID NO: 46094 - DNA, 2246 bp, Homo sapiens
cctataagcttaacttatagtgttaatcagtattaatacatcttagtgggaaagaaggaaaaaataaacgatcacacacacacacacacacacacacacacatacatttacgtaacagagcaagtgtgaaaatacctaaaggctttatagctccttttgtcaatggatacatgacagcatttttggcattctttactactcttattctatgctccatttgtcttcagtcagcacctcagctgcccttatgttttacttggtaaggcaaattcctaaatgagcctggtaattagtcatccagcttataggaaggtactatagtttttcattaactttttcactgggcttgagagtagtaaggactcccagagaattccttgtgttccaaaagtacttctccttgacatcttggtataggattaataactgtttacctttgataatcaggaagaatgactccagctagtacagttacgtgatgcctatacattcctttttttctgggaaaaatgtaatgtgaaattaagtgcaaaaaccatgccttgtttatgtatgtatcaaacacttctagagctttcccaatacagttctcttctcagcaaacaagaggactataccctcatccccacccctgcacttaggtgtagccaatgtgttgtaacttaaagaggagagggcactggatgaagggaaatctgtctaacaagcttctttatttcacctagtggaaaaaagccttaatctgcagtggggcagttttcaaggacatagactgaattggctcatgcatttatggaagatgaggagtcccatgatctgtaatctgcaagctggagacccaggaaagctggtggtatgattcagtctgaatctgaaggcctgagaaccagaggaactgatgatgtaaatcccagttcaagagcaggagaccagatgagatgtcccagctcaagcagtgaggcagaaaaaaaggcccaaattcccccttcctctgccttttcttctattcagaccctgaatatcaggtggcataatgccatccacactgggaaagacagtttactttactaggatcacctattcaaaggctaatctcatccagaaacacgctcacaaacacagccagaaataatgtttaaccagatagctggttatcccctgactcagtcaagttgacacaaaaaatgaactatttcaaagcttactgtaatcaacagttttgtcaaaaagatagacacaaatcagtggaatgagataaacagtctagaaataaaccaacaaaaatattgccaactaaggcaaaggtaatcaatggaaaaaagatagtcttagcaacaaatagtactggaacaccacaatgtgttaataaagtgaaactggagacatctctcacaccttatacaaaagtaactaaaaataaatcaaaggactagatgtaatgtatcaaacattacatcttttagaatgtatcaaacattacaagcttttagaataaaatatagaagaaaatttacatgatctaagatttggccccaatgaagttttagctataataacaaaagtattagtcatggaagaaaacaaaattgataagttcaggtgggctaaattaagggaaaaaaatcactttgcagtagagaaacctgaaacattacctaaaccacatgatgaaggttaatatcagtgatgtcatgtggatatcatgttctccctaaaatgatgtgacaagaagggccctttgcccttgtggtattatttcaaaaaatctataactccggtgtaattatgaaaaaaaagcaaatgatcttcaggactgttaaggtcatgaaaagcaagaaaagactgagacattgtcacagacaaaaaaagactagggagatatgacaagaaaatgcagtgtggtattccagattggaccttggaacagaaagaaaacattagtggaaacagtggtgaaatccacataaagtctagggtttggttaatagagtttcatgtatcaatgtgagttgcttatatttgacaaatgtatcataataatgtaaaatcctaacaatgggggaaagctaggtgaaagatatatgggaactctcctgtactgtctttgtactatctttgcaactttcctgaaaatccaaattattctaaaacagaaaagttcatgctattagaagtgaggatagaggttaccttgaagaagctgaggtctagaagagaccatgaagggtctaattagctaacacacg

SEQ ID NO: 46095 - DNA, 522 bp, Homo sapiens
gattgtgccactgcactccagcctgggtgacagaacgagactccgtctcaaaaaaaaaaaaagaaaaaaagcaggagttagcagaaaaccaacaagacatgggaaggagagagagagctgcaacacccaagagaaaaaatagcaatgctgaaatcaaagtataatgaaggagagaggatgctggaagctatgaaattctttctgtgaggcaatggggcaatgaccctagaactgctgagttagcagcagtgacagactcagtgccaaatcatatattagaaaaaaaaatcagatagaggtaaagtccagatccaaagaagagggtttttagcagtaaagcagacagtagaacccacccagctttctagggtgcagggggcctccctttcaggcatcatgaacagtgggggaccataactaggcatgatggcttcagatacagggcttgttcatctcttgttgtggtcaggcactgcctaatgagagcaaccccttccaaatgctactgctgtgtttaactag

SEQ ID NO: 46096 - DNA, 641 bp, Homo sapiens
aaagtaagtcatctcatcattaggtagatgacaataaactatttgagaaaagtgaattaattttcatgactattgttagaaacaatcctttagggatggggaggggagatgaattagaaatgtttcctatcagttcacaattgcatctattctgaagccattaggaatgtgaatggtaactcttcctcaaaccatcacataaggaaagataccctgaaagtctgacacaccgaagtcatctgtcaggaatcaatcagagaagctgctgggaaaacctcagagaagctgctgggaaaacctaggcattctgagtcatcattgttcttatcacccgtggcaactgatgcaattggaagcaactgatgctttcagggtcatggtttcttcaaagcctgagctcattaattttgctgtttgagaacttgcagtttgatccaaaagctgacagcatcgattgacccattgccttccttcctgctctgatactggaagttccaacaaaagaggaggaggaacaggaccaagaagaacatgaaagcagaggaccaggggccgggcgcggtggctcacacctgtaatcccagcactttgggaggctcaggtgggcggatcacgaggtcaggagatcgagaccatcctgg

SEQ ID NO: 46097 - DNA, 5051 bp, Homo sapiens
ttgtccgtactttaaagatattcataatctgtgaccttaggatgaaggattataaagaaaggcatagatgaaaaattgtgtccaaaaatatcctttgtagtattactcatgactgcataatgttagagataaattaacctaataatgagagtctggcaagtcaatttgatagattattgtgatggaagctattttaaaatgttttcgacaatattgaattacattagaaaaatgctagtactctagtgtacaaagcaggatacgctgtgcacatccacatacaggaatagaaactgattcacacaagtgccagtaatgactatttctgggttacaaaacaggatgatcacttcattctttgtgactttctatatttaccaagtgattttgtaaataattagtagatactcattttatattcagaagtagctaaatgtatttaaaagagcaataattggacttcatcagcatggcaagtatagttttctgctttccaaatatctctagaattctgggaatagtatctctccatctaaattttgaattttgggtgtttggagattttattgttgttgttgttgttgttttgtacaatggacccaaatggaggcccaattgctagtaagatcaggtcagcaccaggacagatactggttgttgctctgccttagaaggcctccaagtcttgctaacatctggatatcaggagttcagctcattgctctacactcagatcctagctgaagtcatctgtggtcaaacccagagtttggaccattttctatttgatttcactttttatgcaagatcccgtggcttggctgaaggcaactctttaactgtacatgcagctgcaattacttacactccacttaaagctttcccaccaacttctccaatcttataaacactgaaagctgaaagagactcagagatcctctggcccaactgtttattttattgataagaaaatttgcgtagaaaatttgaaaagttgcctgaaaccacatgatgcacagagccagcaccagatcccctaatgcctagactactgcttgttctacctattacaacttcccctttgttttcgtaatattttaatcacaagcttaaaactcaatggggtagctccattttgaggtattataaaggagaatttgtatattttaaatcaagttttaatcatttattctagaaggaagtttgataatgaaaaatacttttaggttgagctttgaatattaaacataaacacaacaaaactacttctccttgctctttatgttactggaattgtatcacaaacccatcactttagtttttcttcccattctctgttgctgtctaacgagaaaggatgaaaagccctacttaagttttatggtttcaaatgctactttgattttgtatcaataggtaatttcagttcttcgtttcctattttcctttgcatgagacgaatgcagaaatcaggctaacataccaaaccatcctaaactgaggtctttcatggtaatgggaaatgtttttccaaaataagcacagaagctaataaaattatggaggctgaacactggcatggttgatatgtacttagagacactggaataattattaacctatttgcaaacaattgagaacatgtaacagtgtcagaacccttccctttaaggagatatacctctaaaaaaaaattgtgaattctagtgccaaagttgtaagtagacacagaaaaatgaattgaaattaagttaaaggaaaatgttatattaaaaaaaattacttgacacagtataggttgaatttgagaaaaaaataaataatgtaaatattatggtatacgcataagcaaaaaaacaggtttttccctttttttaagtctagaactcatgattttattataatggtcgttagattgctcttagattctcctaatatccagcctgtcttgcttcatctctgttagcccagagtcctagtttactcagagtaaatgttacacctagatcaaagagcatgaacctgcagtgggaggatattcaaggactgaattctgctctgccattcccaaattgagtaaaccaggtaaagtttcaaaaactcttagggctttcactgtttcataggaagaattgggataatgttacttcactgggcagtttggagtgaaaacaaaagtatgagacatgcctcgtaaattgcaaagtgttatatgttgtataatattctagatactagcaacagcaataataataaacagtcacaatattggcagtctagccctctcagatccataaatacaggcctacagcaaatgaaatgtatttctataaaagtgcctttgattggttgttaaattggttttaaatgtttcttttttaaagtggattcttctggcctggaatcctcaagatgagtggggaggagttcaccagaaaacatagaagcaattccttcagtgttagaaaaactgagggccctctcatcatctgcctatctttctgagaaattggtgctgaccacaatgtccctgggtgccttttcttagctgtacaatgagggcaacaagctaggtgatctctacaagcgtacaattttcttgccttcagtcttattcataactttggtcatgttctccttttcttttattattattatttttttgagacagagtcttactctgtcacctaggctggagtgcagtggtatgatctcaactactgcaacctctacgtcctgggttcaagcaattctcctgcctcagccttctgaatagctggcacgcgcactatgcatgcgcataggtgcacgcgccgctacgccctgctaatttttgtatttttagtggagacagggtttcaccatgttggccaggctggtctcaaactcctgacctcaagtgatctgcccgcctcagcctgccaaagtgctgggattacaggcgtgagccaccaggcccggccatgttctccttttcctgagagaccatttcaaattcatatagaagtctgaaaagactcgttagccacagtcccaaacacaaatcttgtcagttctgatcagtatttcattccacagccaatcccagtctgactaatcacagcatcacagttaatactcacagcgtccttggagaaatgaccattgtccacagtgtccattggtaccagtggcttctcaagccttgccctagggtcttcattgaatcagttatctttttcagagagtctcttcattttggaattaggcaatattaccagatggagatccttatgttgctgttaatgtcttttctctgacttctcctaaaactgttccctccccttaatggacctttggtaagttagtaataatccttctacccaaaaagaagaaaagcacttaccttcaccattaaaccagtattttaagccctagactataaggctaacttggaaaaggagggagttttctgtcccttcttccctttcaaatacttttgcagatttttacagggataaatagtgagccacgtggcagtcagacggcaacaggtttggccccactttctcagaaagcctcggcttggttttgccgcttaatttttaacttcattttcaagttctcactgttagagtatctcaaaagatgtcatcgtgtgtttctgctttgaactgtgcatacaaccattcagtcaacaagcctttttttctgaaagcaagggggcatggtgtggaggaaagggcagggctcctgaaatcagtgatggagtcagacccatattcacttcctagtgttttccctgagcttggacaagtcactgaacctctttgaattggcttccgctttagtaaagcaaggattgtgttactgtactcatggggttattgaacaaatgaaatacatattctaattggtagtagctcctcaataaatgaggtgttcattcctcttcaggagttcagttaagtcagctagattttccatatgcatttggtgcccacagcctaatgaatgtgaactgtgactgccctggcaacttcccaggaagctgccttgtacccctccttcctgtttcatatcatccatgtcttccctaatccattttctgcttggctcccgactcttggaattgtgtcctatttgtaatcattaattttgagactgtggttgctattggatcttcctagtgtgacgcaacccttataaaatgaaatgagagccttccctctctggcttatcagcttcagacttccttaattgagttccgccatcctagtgagtctcaccatactcccgaaataacctgctggagtaggcttatcctactcaactcctcagatctctgtatttaattctattttattgctgttgtagtaaattaccacaactgtgatggcttgaaacaacacaaaattatttatttatttacaattctaaaggtcagaagtccaaaatgggtttcactgagccaaaatcaaggtattggcaaggttgtgccccctccagaggctttaggggaaaatccatttctttttcttttcagcttgtagtgaccactgcattttttggctcttggcctttcctccaccttaaagccagcagtgtaacatcttgaagtatttttctcttattctgactcttctgcctgtctcttataaggacccttgtgattacactagggcccatctgcaaaattcaggaaaatctgcccatctcaaaattcttaacttattaaacatgtaaagtcccttttgtcatataaggtaatatatttacaggttctggggattaggacatggatatctttggaggacaacattcagcctacccttttgagggatagaggggtagcaggaagagttgaaacaattccttcctttctttatttaaaaattctggttattgatttattatagttatcatgtgcctgataagccaatgaaaatagttataatggccaggggcagtggctcatgcctgtaatcccaggactttgggaggctgaggcaggagaatcgcataagcccaggaatccaagaccagccttagcaacatagggagatcccgtc

SEQ ID NO: 46098 - DNA, 1007 bp, Homo sapiens
caattctttcagcattgactacaattagcaatttgggtcagcttcaaatcactttcaatagaaatatgagaaactgttttgaagaataagctaaaagcttgacatgaatactaaatcattttaaattggattcatgataccattgttcaaaagataccagaattcccctcttccatgaactgtttctaataaccagctggcatcctgatttttcctgactcataagacacaaaatttcatgtgtgccaaacactggtattggttttgcttggttcagcatgttgttttacaaaatcttttagatgatgattaccttgttctatatccaactttttcctggcaggactctagtggtggacatagctcaggctctgggtcagcagatgagattgcaattgttgctccaccacctggcagtcatagccctttgggcaagttattttacccctttcttagtctcattttctacagcacagaaatgaagtttaaaatcctaccaactattcagggttgccaaggggatcagtatgttcctgcacatatagcctttagcatgctctctagcaaaaaacaatgaggactctataaatattcactattattcaaatatatcttagaagattgggattccccctaggtccctaatgaagagtcaaattgaataggcttcacttatcaaatttttccttcaggaaaagctccagaaagctgtgacaaaactgaagcaacttgaagacagatgtacggagcagaagctgtccacagcaatgcgaataactaaatggaaagtaagaatctgacttcattgatctcaagctattttccattctagagcttaggcataggggatgattgaggaaaagcacaatgaggatttattctcactaaaccagattgaaaaaatgaaacccaaggaagaaaccattatttgtacttatgcccctggttccaggtttacatccatgagtatttagcaccaatctttccatctttaaactgtagttggc

SEQ ID NO: 46099 - DNA, 1943 bp, Homo sapiens
tctctaacctctaccctgatctttgtttgtggatgttgctcttgagctcctgagtacactcttacttcccccatttctaggatcttgggcaatggggaagaccttgattgtaactaacatatatgaaaacccgtctatacaagagttaaagctgcacctgtctcctacacaaaaattccacctcatcctaagtcaaagacccttcttctatatcatagtcatcaaaacactgtatgaatttatttttattttttaatttttatttttttaagataagtagagagtttatttgggccaagtttgaagactgcaatccaagaacatagattcaaattgccctgaatacacactcccactgcattaatttagacagcactaatggaaattgcaactttacatctcctcagatgagagtttcacttgatttctgtcagtcttacacataggaatgcttaagatgaccctagggtagtagaacagtatttctcagttaaccataataaatgcctgtcacactcaaagctccccctgccaagaattatggaccctcttaccagcctggttgtcttaaaatccagtctgggtgatgttcattataagcttttacttcaagaaaatcgctccaactcagaaatctaacttcttaaatcataagtaaaaacctctttttatccttgtaactgataaagtgtttgaacttggccctagtttcacaattaaattatctagcactcctaacccagctttctcctgtgtcttggctgaagaacaagaaaattaattgggtgactataaggaatctgaggcaacctcttccacatctgagtgcctgcctcccacacatgactctgcagcaggaaactggggacattcttccagcttcagtgactcatgagaaaataatgtcccagtggctgattgtgtgtgtgtgtgtgtttgtgtgaaaatatatataacacttaagcatttaaccacttttaagtatatagttcagtagaattaagtgcttttacattgttacattgttgtgcaaccatcaccattcccatctccaaactgcaactcagtttcatctttcatcttctaaactgaaactcactacccattaaacaataactgtccattttctggtcttgccaacaccttgtaaccactattttactttctgtctctatgaacttaactactccagatgccttgtataagcaaagtcttacaatatttgcccttttgtttctggcttattttgcttgaatgtcttcaaggcttgtcatgtagtagcgtgtgtcagactttcattcttgtttatccattcatccatagatggacatttggtttacttccaccttttgaccatactttcttgactccaggagaaggtacagattcagagacaaaaaatccggtctgactttaagaatctccagtgtttcctacatgaggaagagaagtcttatctctggaggctggagaaagaagaacaacagactctgagtagactgagggactatgaggctggtctggggctgaagagcaatgaactcaagagccacatcctggaactggaggaaaaatgtcagggctcagcccagaaattgctgcaggtgaggctgtgtacttggagtagggaaaaaaggtatgttatagtgctattaaaggagaatggtaaggaagcatgggaagataaagtaatgtttcttttagatgtacatcagtgccatcaggctggccttcactaatttatagggtacctttatgtcaattagaaaaataaacttctgagggaacacagcttggccaaatgaaaccacgggataacatttaccactgtttgcctccttggcccatgtgcagagaaccctggttgttgactctctcctgaaatactccactaggtgactgatgggtgatgaagtggggcagccaaaatgagtgataacctt

SEQ ID NO: 46100 - DNA, 1914 bp, Homo sapiens
gggaccacacaaaaaaatttattcactatcgtgtaggacttggtcattagagagcttttgtttcttttttttaaaattttttttaatttttattttcgtgtatgtgaatttaatggagagcttttaaataaccagatatttaaataaccagataatacagatgcccggcctgctccagacaaattagaaaagtatgtaggtgaggagggaccagccagaaggcggtttcagctctggagtgacactgaacgtacttctcttccagggatgtcacgaggtgtcaatttctctggccttacccaggtccatgcccgcccccaggggccccaagaatgacttcagcaccccacccccacctccctctccagatgtgggtcctgggagcgttcaaggcccgtcagtcactcgagccaccccttggcggctggaccaaatcttgggctgccgcctggatctgcagctggaaagcgccgtgaccaccggtgtccccagctggagcagggcgggctgcacgactcgcgaggacgccctgaaccgcggcttcctctttcatagccgcaggactcgtggtcagaaggccgactccaagcctcagcggatccacgaaatggcctctttgaggctgtggtgaaatttaagataccctttccctgccattgttactgacgtacttcagcaaacaggttaaagttctgaaaggacgtggtcacgactttatatttcttacagatttgtgtctcatgttttgtgcgtaaaaaccattcgtcctcatttgagattctcatatccgtaattcagttatacataaaactgaattcagttatatcataaaatgttcccatgcggggaatgattcgttggggtctcagcctgaggccagacgcagcagagagatcgggagttgggggatggcgggcggggagcggagaggaggccgcccgccgccagactcagggtccagcagagcagcaaatgctccccggctcccagccagggcgcagctgctggcctggggccgcccctcacgccgcaggagccccgcccgcagcgccggccctgcccctggcctgtgagggcgccagcgccccctacagcttgcagtcgccctgcgcgcctccccgcgaggcttgttttctagcgcctctggtgggccgcctcccgcaggcctggtgtgagcctggggtccgttctcacagctggatctggggtctgaatgccgcgccctctggagagccacagatgggtctccgctgatgcttctctcaatttcctctaagagcgagagctccgggaaaggagccgatcctggtggaagactacaggtctgagtccactggacgaaaaacgaggtgcgttaagagaccgcgggagtggggaaatggggaagtgagggtggggactgggcaatgggggcgggacgagaggtctggggctggcggggacagggcttaagagagagccacccctcctagccttgaagctgtaccgagcttccctgtgatattttaaaatgcaaaagtacaaaaattgaagtaatggaactatgcgtacgcacctcctagatttttaaaggttaacgtgtgactgtgtttacttcagatgttcctgaaataaatgaaaatgaccagttaaaatgaaggaagaacgcgcttgcgtccctcctagaggtcaaacactcttctgaggataggttgtatgctctcagcgcctctttttattaaaagtattaagaagtacttttccaaatattagatgtagtgtgtcatatcatttaaacgattttttttgtttaaaatagtcttttaaaaataatctttttatttttagatttttttgagacagagtctcgctgtgttgctcaggctggagtgcagtggcgccatctcccctcactgcaacctctgcctcccaggt

SEQ ID NO: 46101 - DNA, 1939 bp, Homo sapiens
agaccgtttgaaaaatacaactgattattaactcatatgcacacacgcaaaaataaacttttagaattgaactgcactaagtaaaagtgagtaaacttggctcatcatatactcttgtcagatgtaaacaaaaaagtccaattattaaaatctgacccccagaattaaaattgcaaaagcttaaaggggcagttctgagaaaaggatcttcagttttgaatgtgtgggctccaccagggttgaaaatcctgcacgactgatgaaacacgatccagttaagcacagtaattttcaaatatccaatcagggcgcttccgtttctaaaaacagagaaaccgagcaagggattttgggttgcagctctaaaactccaacaaactaagctcctttgtcctgacaagggcctaaaccaagtcgacagcccgtaagtgcacccatggtaaggcgctgcacaaagaaagcattttgcgtttcaaagctttgtcatgatggcgctgcagaaagcaagcgagctaggcctacctggcggggctttcagaggacgccaacgtgggcgccagccacgccagcagggtcaccgtccttcccaaggacagacagctcgctagccactcctgtggagagggcgtggttaagccatatattttgccaactatcccagaagcatttcttaggaccacccaatttcggaaaatgctactttagcaatattgaccccaaaacgcaatatccccactttaaccttgtataataaaaagcctcaagcctgggactgggcttcaaccttggttcaatacggttatgactaattagcttggagtcgtgagacgcgggacttccggctaccgaaacccaggtgactttaaaactcgattttaactcggtgcatttgaattcaccttgctatctttgatagattgagtagtaaattcttactagatgaggctatgttaaagttctatcgactctccaagtgattctaatataattgagggcgtgttgcatttgcttgggggatttcatctgtgtactacagctcttttcctgaaatgcgtaggtggctcttaaaagagccgttgggttactagaagaaacttctaactgaatttactttttcttgggtgccgctttcttgggtttggcagtctttggcttcgtcaccctagccttggccgccttgggttttacagccttagctttagcagggcttttagctactttcttgggctttacagttttgggtttttttggattcttggaggatttccttgttgccgcaggctttttagcctttttcggagtcttgacgctctttttgctagcccccgtggcctttttgagctttttagatgcacccgttgccttagtttttgtagccacctttgaggcgccgggcttggtttccacggaggacgccttcttgttgagcttgaaggaacccgaggctccggtaccctttgtctgcaccaacgttcccttgcttaccaggctcttaatgcccagcttaatgcggctgttgttcttctccacgtcgtagcctgcggccgccagcgcctttttaagagctgccaacgacacaccaccacgctccttagaggaggaagcagcctgcacgatcagctctgacacggaagggccagcgggttttttcttggaggctgctgcagccttagcaggtttctttgccttcttgccagctaaaggtttctcaggagcagcagaagcggcgggggcgggaggcactgtttcagacatggtgactaacacagcacaccaaataaagtggtataaacctgacgaagcaggatgcgaaaaaaaggccccaacgcagcctatttatagggtgggactgcgccgtgattggtgcccgtcagtgcccgcccctcgcgccctagcgccccctgcgcgctgccgagggtttcgcccagtctcagaaggc

SEQ ID NO: 46102 - DNA, 2219 bp, Homo sapiens
aaataccacttaaataatcatctgtagagttggaatagaatatagtagccggtgaaactgcacgattgttgctggcttaaagatagaccaatcagagtgtgtaacgtcatatttagcgtcttctatcatccaatcactgcactttacacactataaatagagcagctcatgggcgtatttgcgctagtgttgggtgttccgctgtgctgtttttccgtcatggctcgcactaagcaaactgctcggaagtctactggtggcaaggcgccacgcaaacagttggccactaaggcagcccgcaaaagcgctccggccaccggcggcgtgaaaaagccccaccgctaccggccgggcaccgtggctctgcgcgagatccgccgttatcagaagtccactgaactgcttattcgtaaactacctttccagcgcctggtgcgcgagattgcgcaggactttaaaacagacctgcgtttccagagctccgctgtgatggctctgcaggaggcgtgcgaggcctacttggtagggctatttgaggacactaacctgtgcgccatccacgccaagcgcgtcactatcatgcccaaggacatccagctcgcccgccgcatccgcggagagagggcgtgattactgtggtctctctgacggtccaagcaaaggctcttttcagagccaccaccttttcaagtaaagtagctgtaagaaaccaatttaagacaaaagggaatgcattgggagcacttttcgttttaatgctactgaaggcttcaaaaccaatcgatttcggccggtcgcggtgactcacgcctgtaattcaagcactttgagaggctgaggcgggcggattaccagaaatcaggagttcgggatcagcctggccaacatggccgaatcccgtctctacgaaaaatacaaaaacacgccgggcgcgacggcgagcgcttgtaatcccagctacactctgaaggctgaggcaggagaaacacttgaacctgagaggcagaggtttcagtgaatcgagatggctctaatgtactccagtctgggcgacagagagattcggttaaaaaaaaagttcgacttaaaataattctggagtcagaatgggtttacatttaattcttaacccagttcctcaaagcctgtagctctgttaagaaaataaaggccattggtcaagcctgcttggtcccaccctcatctccccaccctcccccaatcgctgctcccgccatttcctggggcttggaggaggggttaaaggagcggactgtaggcgtcacatttcccgcctgcgcgcttttcagtctcagtgtccgctggaggtgggggcaggggtaacgtagatatataaagatcggtttcctattctctcacttgctcttggttcacttcttgggaagtcatgtctggacgtggtaagggcgggaagggtttgggtaaggggggtgccaagcgccaccgcaaggtgttgcgtgacaacatccagggcatcaccaagccggccatccggcgtctggcccggcgtggcggtgtgaagcggatctctggtctgatctacgaggagactcgcggggtgctcaaggtgtttttggagaacgtgatccgtgacgctgtcacctatacggagcacgccaagcgcaagacagtcactgccatggacgtggtctacgcgcttaagcgccagggacgcaccctttatggctttggcggttaaggttgctgatttctccacagcttgcatttctgaaccaaaggcccttttcagggccgcccaactaaacaaaagaagagctgtatccattaagtcaagaagctcaatgtgtaattaagatgaatgatactgagctgacatcctaaaaaggaaagattaggggaactccaagtttgccctccactcactacatatgggtaggggagcaacgatattccaactctgaagaaagagtggaaaaaaagtagtgttaaaaatttgtattagtttccaagggacaaagaagcgctgcccaatcaatgagggccattcgtagctgtcaaccaatcagaactgatgagctaatatttcctgaggcaagccagggagccggaggggaagctaagaagcttattgagaaaaaacaaaaaccctgttttaggaaaaaaaaaaaccatcttttagcgattatgaaataaaatcacagagacatttaagtatccctcaatcatgtactgagagc

SEQ ID NO: 46103 - DNA, 2811 bp, Homo sapiens
gtctagagatttaaggtcagggagatggtttataattgcaaacacttatttagagacacagtttcactcttgtctcccaggcctaagtgtaatagcgcgatctcaactcactgcaacttctgcctcccgagttcaagctattctcctgtctcaccctcccgagtagcttggattacagtcgcccgcaaccatgcccagctaattttttttttttttttagtagagacggggtttcacaatattggccaggctggtctcgaacccctgaccccaggtgatccaccaggctcagctttccaaagtgccgggattacaggcgtgagccaccttgccgggcctatatttcttaagctctatgtttcgttctgaagcttgaagtgggtggaagcaaactgatagaatttggagaggtggttaggcatcccgggaatgagaaacagcccgaagctgccactatcacaggctttggcattgctagaagttaacgtggcacttacagctaggccgtggtgttctgttgaacaaactatttgacagagcacagagcatgtaagtggtgaggccagttgagttagccaagaaaagaggagtccaagaactgagccagagtacaccagagtatgtagtggagtacagctttctcattctttagtagggctgtgtagagaaatactctattttatggatgtatagatcactctagtcctttctgatgaaaactttacagttgccactcatttactattacaaacaatgctgcactacattatgtttcagtttttagccatctcatctggtctcagcatttatttatctgctgatgactcacacatttttatctccagctcagacctctcacccgaactcacttattcaactgcctattcactatatcctcctgtcaggagaagcttgttagcaaagtaaccagaaaacaaagttgattttttttgctgaagtagccatcaatatatttgttactaaatcaaagatgctgaatatttggctgacttctaaaaatctggtcacctaactttgacacttcctaggtcgtacagtttgaaactttcacaattaaatcagttttggaatttacaatttaaggcaggaatagaagactattgggttgacaggtacagtgaagatgcaagtcatctgagaatcttacatcagagggggcttccatcttatagctgctgccacggacctcggagtcagaagaaatttgagtccttatttataaaacagactcccttagtctactaagtgggaatttacgaactgcgtaggcagcctgcttaggggagcctccagcctgaggactgaaaatagcaaagcagctttaaccgccagtcctactccagagaagggggaggtgacgtcactcagcaggacgccaagctcaactagaaatggaagtaaaggcttctggcgctaccggcagggggcggttaaggacggcaggtgttaccagggaagctaaaagtacagcttttgctgacgttaagtcagatacgcctgggaaaacagacctgacacccattttaatccacctactcagttccaggcagctagcatcttaggctctcgtacaaataacgcacaactcgtttttaaaactaaaaagctgagctactcatttatcggactcgcgctgcacgttaagttgcttgacatgtcaaaactatagcattgaagtttatagctcacttatctcggagacctcgtttacttagctgatttctgctttagcagccactcagaccaaacaacctggtctctcccaactggtttataatagttctacatactaggcagaatagccgagtaaagccattgagatgttaccatccgaaagaatacaatcacagctctttctgagagggagtgggcggccctgaaaagggccattggaagaaaactgacgaaaagattaaccgccgaagccgtacagagtgcgtccttgacgcttgagcgcgtaaaccacatccatggcagtgacagtcttgcgcttggcgtgctccgtgtaggtcacggcgtcccggatcacgttctccagaaacaccttgagaacgccacgagtctcctcataaatcaaaccggaaattcgcttaaccccaccacgcctagcaaggcgccgaatggccggtttggtgatgccttggatgttatcccgcagcacttttcggtgacgcttggcacctcccttacccaaacctttaccgcctttgccgcgaccagacatgtctaaccagctgacaacaaaaaccaggtacgcgaaaagaaagcaagccacgagcatttatacacgaacatcggaccttattgagaactgaaagcgggagcgaggataaggaggcgttgctgcctcactttttgctccgcccctcgaggggcagtgacctaaggactgcgagggagaacacaatagtttcactttttaatccctttagtttttccctcccgtttacgacactactatttgaatctgaatttataccctcgactgagaattttaataagggcttatattaagggctttcactaatatgccggagtggtaaactttttaagtctttcaagtgcttgaagacatattgactattcaaaggtacttaaaagagcaggcgtgaaaagatcactctggccttatgttttcttgaaagctgacctgtttcttagaagcagtaggtgaaattctcatatgaaagatgttctcactgtagtttaaaaaaagcaacattcttctcaaggataggaggctgaggccaagagaattctgtacaaaccttgcactagcccttgctgggc

SEQ ID NO: 46104 - DNA, 805 bp, Homo sapiens
atggatggcgcaaaggtttgtgtcctcaaagagccctaccaagtaggcctcacaagcctcctgcagcgccatcaccgcagagctctggaagcgaagatcggtcttgaagtcttgggcgatttctcgcaccaggcgctggaacggcagcttccgaatcagcaactcggtcgacttttggtagcggcggatctcgcgcagagccacagtgcccgggcggtaacggtgaggctttttcacgccgccggtagccggcgcgctcttgcgagcagccttggtagccagctgcttgcgtggcgctttaccgccggtggatttccgagctgtctgtttagtacgagccatggcaaaaccacagaaaagcttgcctgcagagacgtctgtggaggaaaggaaagagctactcttcttttatagagtcagaccaccaactattggacccaagaaaattcaaaaatccccgcgcccttcttggattggtccatctctgtgcctggttgcagattaagagaggctcctgcccattaccgtagctactctgacgtcattttgttaaccccttagctgctatatccactgtggacaagtcttgtactggaaaagtttcctgaagtcttaaaatttacaaccacacaaagcaacgcggaaacctccaattgtttctagttaaaatataaaaaagaaatcagagaatattggagacgattagggaaatttgcatatgcgctttatttaaaattgtatttttctgggtgtcgcataagaagtgtgggcaattagaaaaatgctcttagccgggcgtggcggc

SEQ ID NO: 46105 - DNA, 1011 bp, Homo sapiens
tattaggcaaaacgccaccctgcgcgatggtcacacgccccaagagtttattaagctcctcgtcattgcggatggccaattgcaggtggcgcgggatgatgcgggtcttcttgttgtcgcgggccgcattgcccgccagctccaggatctcggcggtcaggtactcaagcaccgccgcgagatacaccggcgcgccagccccgacgcgctcggagtagttgcctttgcggagcaggcggtgcactcggcccacaggaaactgcaaacctgcacgagaagaccgagtcttagccttggcgcgagctttaccgccttgtttgccgcgaccagacataactacttctgataagggaaaatcgccacaagaaaatgtaatgaaactacattagaacgcaaggcagagaagtatttatactgactggaggtaggctgtgaggaattctcccattggctaatgtcaaatacccaatgggaaatcagaatctgcatccttcatttgcatgtaatccttccgtctggtgtaaggtttatgtttgacccaatccccagtctggcttgacgagccttcgacttgaatactaataataattggccgaattaggattttgtcaaaataccttttttaagcatgagtggaggttttgttctggttattttgactttcagccgctcgtgcttttcccggattgtgactcatgtttttggaaaggagtggactccgaccaatttctaaatagatatttaagaggtccttcaaatcgggcgcagtggctcatgcccgtaataccagcactttgggaggccgaggacggcgggtcaggcgttcgagaccagcgtggacaacatggagaaaccctgtctccagtaaaataaccaaaaaagaaacgggggagaaaaagaaaaaaaaaagccgggcttggtagtgcacgcctgtagttccagttactcgagaagctgaggtgggaggatcgcttgaacccgagaggaggaggttgcagtgagttcacatag

SEQ ID NO: 46106 - DNA, 1634 bp, Homo sapiens
aaacagaatagaaaagctactaacactctccactacagagtagtacagagaacagttcagagcccatgtatttatagtcctgagattcaaatgacggtttaagattcctcacttctgattggacaaaagaaacacggtttcactgaggggtggggtttatgcaaatatggaatttatgttatctttttctattggataaagcaccaaacataattgaccaataggatagcttcctattgcagccttgcagtttgtataaaaggatttgttcaggcgccattccagcttgcttgtctttcacagttttccgctgctttcataggtcgctatttgcggacgtggaaaatggagctaaagcaaaaacttgttcgtcgctaccgggcttgcagttcccaatagggcagagtccgtcatctttttcgaaagggcaattattttgagccggtcggagccggtgcgccagtgtacttacaatacctggccgccgagatcttagaactggtgggcagcgccatacgtgacaagacccgcagcatcatcccccgccacctgcagctggccatccgaaacgacgaggaggtcaacaagcagctgggcaacgtcactattgctcagggaggcgtcctgtccaatattcaggccgtcctgttgccaaaataacagagccacgataaggccaaggtcaagtaaacactcaaatcagaaaacgtagcttacacttgaaacggcatttttcagagccgtccatagttacacaagaaaggatgataacttgcttctgttagggtattttttgcttttcgtttggattggtttgttttgagacagtctagttctgtcacccaggctggagtgcagcggcgcgatatcggcttactgcaacctccaccccgccgcttcacgcggttctcatgcctcagcctcctgtgtacttgggattacaggcgtctgctaccgcgcccagctagtttttgtatttttatgcgagacggggtttcaccattttagccagggttgtcttgaactcctggcctctagtgatcgtcccatctcgccctcccaaaatgctgggattacaggcgtgagccaccgcccccctagcctaatggtgttaaaaagttaagtttcgagaaaataacaccttcctttagaaagtacattttagagtatacaaagtgaaacttaaggccaaccaaaataagacattttgagaacaggcagggtgggaatgtgacttggacttagaaaacaaagggcaaggaaacttgctgttcgccagtaacaaaatagcatggaatctcattctctgaatataagcgttatttcccgacatgagtctgaacgtttctggtggtttagtgagtgttcaccagcattgataacttgcgagactgtcaggaatgcagaatttcaagtcccactcaaacttactgaatcggaatttacattttaaaaatccttagataccttgttatacactctgttctttgggactggatgaactagaattttagacaatttgtcgctgcagataactgaaacgaaaaggacaggatgggcggtggggcaactcatccaataagattgtctagtaatgaaccaatcagtctggtcactcttcagccaatgatttt

SEQ ID NO: 46107 - DNA, 3173 bp, Homo sapiens
gtccaactgtccatgaaattatagcgtattagcctatgacaaaacagccaaaattgataggagcgtggagggtggcacgggaggaagaagggggaagcagaaatgaaagttcataaatggtcttgggaaaaatatgtccatatgttaaaccttacaccaaaatagagggttcaccatgttaaaccgtgttgtaatgtaaaattaacaacacaaaattacttaaaccatgggagaatgttttctccttcttccctgcctctgtcttcctgtctctctgcttgcctccctcccctttctctttcttgggatgaatccgtggtcactatcactaacaaatcaactcactatattaatcattgtggagatggtagaataattgagcagcttatctccagaagccccagtccccataatttaggtctcaccaaaatgtgcccaccagattttaaaagaagcgaatataagacgctaggctttctgtattcagaagcaccatggatgtcaaacagagggaaccattaacgaaggcctttattagaaatgtctcccatttatccatacactcttcatagttaatagtacaaatactgttttctgcatagaaacatttggactgccaaacaaaatacgtttaaaggaacttcgatttttaaatgttgctgtctgtctaaacaggataagcaaccgtagtcatgcgaggacaaaatggctggctaaaagttgtgctttcgatacgctcaaaatcgatacgctcaaacctgtcagtttagcggaaggctacatgttatgtggcacaaaaaactccctaggtccacgattgccttgggtggaggaagggctattgccgctgttgtggctgttttttaaatgcattccttcgttgccacaggaatgagaaattaacagcagaggaatgtaggacaaaggtacctgcacgcactctcctcccagggctggatgttgccactacctccaggagacatcaacttgactaccaacaacatggaaagcgtccgaaatcccagacattaatataaagagaaaagaggcaaaacttttaagtcacagtaaagcaaaaaacacagaataagcaacgtcttccaccatccaattaaatacagaatgaaagtcatgtactagaagaacggaccaacccgggagcagggcgggacttttgaaaattttttagtccaatccggacatccctttagactaagaaactggctcttgttttgcggtcttttctgccgttcacaggcctggggcgggactgccatcccaaaaccatccgccagcgagaaaagcctccggtcagggacctagaagccgcaataaaggtttaaatgctgtaacctcaccacggccactctccaaccccgtcacccaattcgtctgatacctcagtaactcccatacgactaaccttaagtaacagggcagaacaagaaaaggcagatagtaaagaaattatccagctcttttattgagatcagtggtggctctgaaaagagccttttgggttttagaagtaggcgttcgcctatttcttcttgggcgccgccttcttaggcttgacaaccttgggcttagcggccttgggcttcacagccttagcagcacttttggcagctttcttgggcttcgcaaccttggccttctttgggctcttagccactttcttggttacagtggccgcggccggcttcttcgctttcttcggtgttttcttagcgctcttcttcggagttgcgccgccagccgccttcttgggcttcttggctgccccaactggcttcttaggtttggttccgcccgcctttttaaccttgggcttggcttccccggaggctgccttcttgttgagtttaaaggagccagaagcaccggtgcctttcgtttgcaccagagtgcccttgctcaccaggctcttgagaccaagtttgatacggctgttgtttttctccacatcatagccggcggcagccaacgcttttttcagagcagccagagaaactccgctacgctctttagaggcggccacagccttggtgatgagctctgacaccgggggaccagacgccttacgaggcgtacccccagcctttttggccgccttcttctttacaggggccttctccgcaggaggcgcggcagcgggagcggcaggagcagtctcggacatgttgagaatcaaaaactcgggtacaagtggcaaagcgccgatgaagcagcgcctgggcagggccgctgtatatatagagcgcaggcgcgctctgattggtgctctggtcgcccgcctggctggcaggctctgagccgctgcgctgctcccaagttgtgtttgttccacctcacaaaaggggaaaaatattaaaattccccgcaccaaatcacttgggtttggtcaggaaaggatctcagaagcctcgggcttcatgctcttcatttattttttccacaaacacaaaaacaacgcgtccaggcgtccccaattcccccaactccgaaggaagtctggggcagtcagagaccactttctgtttttcttataaattacctgttcgctcctttgcccctgaaggttctttttcccaggggtggttgggcacatgcttcccttatttttgaagaaaaaagcgaaatggtttccacctaaattttcatgataattctgtttcttcacaagggaagtaacacaggtcctctgtgaattcttcgtgcagtcgcacaggaactgtggactgggacaaggattccacggccagtccaaagcaattagggcgggatgggagggggttcatgagccttgctagggtccggggtggtggggggctacagacttaaatctttgatttgaagacattgaaactatcaaatccctcttttcatagatgggggtggggcatccttttcacttctctacaggcgagaaattgggctctttttaaagagctctgaggtccccctctgagttgtgtaaggcaggaggtctggccctcaagatagagatcataaaggaacaagggagagcccttaagcctgcaaaaaagccaatagatttggcagttagaggcactgagataatatgttttcaaagaaaacaagcattttttatttatttatttttgtacgctgcaatatagaaatgaatttcagcccatgaaaattgtagg

SEQ ID NO: 46108 - DNA, 667 bp, Homo sapiens
cagactgcactaaagtggaggttatgtaaaagtccaacagaataagaaccctcccccattgtgtattaatctgtgaactaaaaaaaaatttcattaaattgaaaatatctaattgtcaactagcaattttaaagagtttaggcagaaaatgaaatataaagcttttttttaacttttagatttttcaaagctagcagaactgctgaagaataacaattcaaaacataggtttgctttggtttcaatctctgtagccaaaggcatttacaatgtaggatgttgtttgtgctttcagacactagatgacgctccaaatcaaaatgccggtagttggacagcccctgatcaagccgcccggcaaatcattaactgggttgacactgtattactcagcagatttcaaaactcattcacatacagagtcttttggtggacaaaaataattattacccacaattgacagtgacagtactgagaagctgggaaactgaagtaggaccctggagcagccaagtacagagactggctcccaggaccttaggagttaatactattcctaaagagaataaattgtcaaatagacaagaaattcatgtgggttgatgcattcacttccccaaaacaattattaagcagtagaaatgataactacgctggtagtggaaat

SEQ ID NO: 46109 - DNA, 1735 bp, Homo sapiens
taggatctaattggttaatgttatgacttaattaatttgaatcaaaaaacaaaatgaaaaagctttatatttctaagtcaaataagacataagttggtctaaggttgagataaaatttttaaatgtatgattgaattttgaaaatcataaatatttaaatatctaaagttcagatcagaacattgcgaagctactttccccaatcaacaacaccccttcaggatttaaaaaccaagggggacactggatcacctagtgtttcacaagcaggtaccttctgctgtaggagagagagaactaaagttctgaaagacctgttgcttttcaccaggaagttttactgggcatctcctgagcctaggcaatagctgtagggtgacttctggagccatccccgtttccccgccccccaaaagaagcggagatttaacggggacgtgcggccagagctggggaaatgggcccgcgagccaggccggcgcttctcctcctgatgcttttgcagaccgcggtcctgcaggggcgcttgctgcgtgagtccgagggctgcgggcgaactaggggcgcggcgggggtggaaaaatcgaaactagctttttctttgcgcttgggagtttgctaactttggaggacctgctcaaccctatccgcaagcccctctccctactttctgcgtccagaccccgtgagggagtgcctaccactgaactgcagataggggtccctcgccccaggacctgccccctcccccggctgtcccggctctgcggagtgacttttggaaccgcccactcccttcccccaactagaatgcttttaaataaatctcgtagttcctcacttgagctgagctaagcctggggctccttgaacctggaactcgggtttatttccaatgtcagctgtgcagttttttccccagtcatctccaaacaggaagttcttccctgagtgcttgccgagaaggctgagcaaacccacagcaggatccgcacggggtttccacctcagaacgaatgcgttgggcggtgggggcgcgaaagagtggcgttggggatctgaattcttcaccattccacccacttttggtgagacctggggtggaggtctctagggtgggaggctcctgagagaggcctacctcgggcctttccccactcttggcaattgttcttttgcctggaaaattaagtatatgttagttttgaacgtttgaactgaacaattctcttttcggctaggctttattgatttgcaatgtgctgtgtaattaagaggcctctctacaaagtactgataatgaacatgtaagcaatgcactcacttctaagttacattcatatctgatcttatttgattttcactaggcatagggaggtaggagctaataatacgtttattttactagaagttaactggaattcagattatataactcttttcaggttacaaagaacataaataatctggttttctgatgttatttcaagtactacagctgcttctaatcttagttgacagtgattttgccctgtagtgtagcacagtgttctgtgggtcacacgccggcctcagcacagcactttgagttttggtactacgtgtatccacattttacacatgacaagaatgaggcatggcacggcctgcttcctggcaaatttattcaatggtacactgggctttggtggcagagctcatgtctccacttcatagctatgattcttaaacatca

SEQ ID NO: 46110 - DNA, 2951 bp, Homo sapiens
gtgagtggaagaacctaagaactcaatttggggcagaagaatgtaatcaattatttcagaagtgatacaaacaatatgacatgtagagcattctggcctttcctgggtcttttttctccattcctggatttcttctcttcatgtgagcaagtctgaggttactatataatgtctctcacaggccacagccccattctaaatattcccaatagaaattcatttattaaccagagagtggtgggtggggttgtttttgttttttaaacaaaagtggatcttatgggcattctggaaagctcccgcaggaagctaagaataaaattttgaattgagaagtccctttcttcaaaccacattcagacccaattctgctattctatttatttttcaaggggattagccttattttaacaccaataatcttatcacaaaaacctcccagaggaagaccctgtagattttgtaatgaccttaatcaagtattagccctacacttcaattaatccccaactgtacaaaacgaatgttcttttctctaaagctgtagcaagttgaaaggggattaaaaacggagggaagggaagagtgtttggaatttcaggcacagcaaacaggcacagcagaccaggaagagcgtcccgggaaaacatattatccagacttaagtttatattccctgtctctctcagacttttgcagaaaaatgagtcattcaacaaatatttgaatcgagatagggaaagtgacgaggaagaagtttgcacttatgaggttttaatttgcaattatttggctacctttttgccttcccaaaacatagggtctttaggagtgaaacttcatagccaaacttataccttgtccagcacagagaaggccatcaaaatgcctggtttaaataaaaatattaaaatgattgggagggtaaatcccttgacctataaatctgacctcctttaaacattatttgtatgttccccaataaactattccgtaatttattagttagcaagtggaaataaaaagaaatgtggaatggggctatgcttagcgtcattaagctgacaggaatacagcgcattcaacttgcaaacacccttccactcccacaaagagcaagctgtcactggccaatcaaaacaatgaaccataatgaaacagtttttcttgctccacccacttggtgaccaaatttgaaaaaaaaaaaaaaccgcgccaactcatgttgttttcaatcaggtccgccaagtttgtatttaaggaactgtttcagttcataccttccactgcgataggaatcatgtctggtcgcggcaaaggcggaaaaggcttggggaagggtggtgctaagcgccatcgtaaggtgctccgggataacatccagggcattacaaaaccggctattcgccgtttggctcggcgcggtggcgtcaagcgcatttccggtcttatctatgaggagactcgaggtgtgcttaaggttttcttagagaacgttattcgagacgccgtcacctatacggagcacgccaagcgcaaaactgtcacagccatggatgtagtatatgccctaaaacgtcaggggcgcactctgtatggcttcggcggctgaatctaagaatacgcggtctcctgagaacttcaaaaaacaaaaacaaaaaaacccaaaggcccttttcagggccgctcacaaagtcgtttaaagagctgaaatgcgttgcgagaatgagtttggatgacagaaataaccgtgacatcctgcataagaatgaattgtgtttgccatgaccggccacactgtgacaaaatttcaaagcataaagtaggcatagagaggtaagcgctaataaagtgattggctccacaaaaagcattttgctgggcgcagtggctcacgactgtaatcccagcactttgggaggccaaagctagtgtatcacttgagatcaagaatccgagaccagcctggccaaaatggtgaaaccccctctaccaaaaaaaatacaaaacttagccgggcgtggtggtctgcacctgtaggcccagctagcccggaagcagagattgcagtgagccgagatcgcgccactcccctccagcctgggagacagagagagactcctcaaaaaaaaaaaaaaaaaaaaaaaaaaaaattatgtattttagagcattctaagaatggtactttggacttaaccgaagggctggaggcgcgtgttgaacaaaggttatcaccttttggctcatgcggcacacagctatgtaaataaagcatctttagggacaagctctcatttgcggagggttctatggctgttgtcctattggccaaaacaaagtggtctaagtccgggcgcggtggctcacgcctgtattcccagcagtttggtaggccaaggtgggtggatcacgaggtctggcgttcaagaccagcctggccaagatggtgaaaccccgtctactaaaaatacaaaaattagccgggcgtggtggcgggcacctgtaatcccagctacgtgggaggctgagccagagaactgcttgaacccaggaggcagaggttgcagtgaaccgagattgtgccactgcactctagcctgggtgacagagcgaggctccatccaaaacaaaacaaaacaaaaaagtggtctaataatccccagaactggaggaagaaccataacttattgattttgtttttaaccttatgtatgccaggcatgctagccttgtatacatacaaggctagaggagcaaaggtgcaggaagccatcttgagggagtcccatattattgagagaccggccagctgctgggagaggctagttgttcatcctcactgtatgtgatgagaatctggtgacagtccattgctgggcacagcatttaggcaaaatggctctctgctatgtcaggcaagtgaggcatatttttgcacaatcctagtaatt

SEQ ID NO: 46111 - DNA, 6498 bp, Homo sapiens
agtataagaataaagaagccatttttaaaatgaaattattaagccaatttgtccaaaaaaaatcttgattagatgtattatatattttccttattaaaaaaacctaataaaagaggtattaatatttttaagttatttaaaaattgtgaagtattttttttacaaaatactttaagctgttaactaagaccactaatgaaactcacagttaaactttttttctcttaattagaacttaaagaggtagcacatttaaagcacaaggaaaatttttgatttttttttagacaaatgagtttttatttaaattgatgtattttaagtctttatgtaagccaactaaaatttaagattacattataatttattaattcccttaagtggataatttcacaattatttaaattcataaaataagatagtcttttctgggcacggtggctcacgcctgtaatctcatcactttgggaggccgaggtggatcacctgagttcgagaccagtttggccaacatggcgaaaccccatctctactaaaaatgcacaaattagccaggcgtggtggtgcacctgtaatcccagctactggggaggctgaggcaggaaaattgctagaaccctggaggcagaggttgcagtgagccgagattgtgccactgcaccccagcctgggccacagagcaaaattctgtctcaaaaaaaaaaaaaagatagtctcaatcttattgccaattaggaaagctaaccgtgctaatagaacagaatttaaagtgggtaaaaacagagccataggttatctatttagcatgttgatcagttaaagaaataaaagtatgtaattaagatcagaagtccctcaggtggcaccactgctgagaatatgaataattctgattctcagtttagaagaaaattctagtttcctagtttccagcatcacatcccttacaataaactcgttaaggtttagaaaatattaaatctttgttttattcagatattgaaagcactcttttttttccctgactcaatagtccaatttgtaacaacattatgtttcttctgtcctctaaccttacttaaagaacgtgaaggggcaataatgtgaaattactaaaattaataataagctgtagagcctctgccatagcagttattgagaccagacattcggtttccttgatttcctttttgtctcctgttagtcctaacactttcttaaagtcaaaagttataacagggcagccattttatattcatatcatcttaacacaggaatactggttttgcagatatcgacaactatttggactcaaaaaagacaagttttggaaggtggaaagaggcatacaagcacaaaacatcaaatcccatgtaaagtcagaaagaaaaacaccaactctaaccctgtgtcctcacagagaatatcaacatcttcaaacaaaaacaccccaaaaaaaggttaataaataaaccagatttcctgtcctctccactgactaatcacttaatgatgtgaccagaaaaccagaattcaaattctactactgccaccaatatgcaaccaatcagccaagtccaattagaataaccaaaacaaacaaacgcggacgataaacttttagcatgcaaaagccaaaggaaagtgaacagaaaactcaaagggtccagggatagacaacctgtttccaagacacacatttctgttggttcttattgtatgactcacataaacactgtcttggtggaaaattcagaaataaatgaccaagaagttaataatttgcttactgggtacttgtacagaagagagaacaagcaatagaattatttcatctaacacaggcaaaaacataatctatgtaagagaaaggggaaaaggcggggaaagaatactgaattttgtttgcagattttggttacactgattagttagttggcaggtaggagagcggtcagtctgaatgggaataagtgaccaggtccattagaggcatagaaaaaaaaaaaaccatttaggcccggcgcggtggctcaagcctgtaatccaggactttgggaggccaaggcgggcagatcacctgatgtccggagttcgagaccagcctgaccgacatggagaaacctcgtctctactaaaaatacaaaattagccagggtgtcgtggcgcatgcctgtaatcccagctactccggaggctgaggcaggagaatggcttgaacccgggaggcggaggttgctgtgagccaagatcgcgccattgcactccagcctgggaaacaagagagaaacttcgtctcaaaaaaaaaaaaaaaaaagaaaaaaaaatttacttgtgagggactctggaaatttcatttctcatcagaatttctcagataagttatctaggcaaggcagcctgtgattgcacagcagtgttcaagtataaggccttgtctggcaccaaagacaggccttagtttatttcccaggtgtgaaagaaattgcagatttaagatcacacagtccttatgttaaataactgtaacctaaattacatggtatttaagtttgtaaaaatctgctttaacactaattttatttattgtatattcccggtttttaatggagaaagcaaacttctaggtgctaaaaacgtgttctagacttgaataaaaagataggtagactacgtctaacccttcatcttaaaatctttacctggaaaagaccatgagtaaaatacttaagggaatgtggaatttcccaggccacaaagcggcctgcagttgtctaggaagggagagtcctctaggagatacagtgtatgtgctaagtttaatgacgtctcctcttcattctcccccacccagcgcctagtccttactggccttcagttcagtgttcgaaggcttgtcaatttacccagcagttaagagttggcttctcctaaagcaactttcaaacttgtctgcatgttacaagccccctacggagattttaagtttcaatcaggcaacacaccatttatggctgactgagcactgggattcaagcaaaatttgatttgatttgaatcttgaataaaccagttgaatagaataagatgtatgaagcaacatctggcgcagtgcttacatctttagttctgtactgccttagtgttgttatcaaaactgacgcatattaggttaaaagactattaccggggcagttggaaacccaggagacacacccttcagtatactacgaaggtgtgcgccacgaaaacagagggggagtccttccttaggcagttactgcccaggttcccactccggtccgctatgtaaatcagagtctcaaaacagctttccctcgattggttaatatttaaaatgacaggacagcctattggctagaagctggtggcgaaattatgacattacggcaaccgttgatcctggcgacgtagacagggacagacagctgggtctgaaacctaagcgagcctgcggtttcttccgggaacgccgagttagcaaaatggccgcttgtctccattttaaatttaagcacaacgaattgaccccaaagccatttttaatggctggcttctttcgggttcaggaccctttgtccctctctaagctgcaacacttgtccccacccctctccagttcctatattctaatacccctccgccgccaaataaaatttggcgtctggccacagctcttttagtgggtatctgggtggctcttaaaagagcctttggggttaggtgttaagacgcttacttggaatgtttacttggagctggtgtacttggtgacggccttggtgccctccgacacggcgtgcttggccagctctccgggaagcagcaggcgcacggccgtctggatctccctggaggtgatggtcgagcgcttgttgtaatgcgccaggcgggaagcctcgcccgcgatgcgctcaaatatgtcgttaacgaaagaattcatgatgcccatggccttggaagagatgccagtgtcgggatggacctgtttcagcaccttgtacacgtacacagagtaactctccttgcggctgcgcttgcgcttcttgccatctttcttctgcgctttggtcactgccttcttggagcccttcttcggggcgggagcagacttggctggctcaggcatcttaaaacaccagaaatgtgtcgaaagtaaagagcggatttctgctacttatagggcttttatgctaatgagggatggagagtacctcttagttaattggaagacaaactgcacagttgtcatccgtgggcagagctatgcaaatgaggtatgaaagtacagcttttctattggctatctgactagcatttgctaccgaccaatcaaaaagtcggatttactccccaggaactacctataaaagcggccatgttttacatatttcttgattttgtttgttttctcgtgagcttaggccgctggttttggtgatttttgtctgattgcaatgtctggacgtggtaagcaaggaggcaaagctcgcgccaaagcgaaatcccgctcttctcgcgctggtctccagttcccggtgggccgagtgcaccgcctgctccgtaaaggcaactacgcagagcgggttggggcaggcgcgccggtgtacctggcggcggtgttagagtacctgaccgccgagatcctggagctggccggcaacgcggctcgcgacaacaagaagactcgcatcatcccgcgccacttgcagctggccatccgcaacgacgaggagctcaacaaactgctaggccgggtgaccattgctcagggcggcgtccttcctaacatccaggccgtgcttctgcctaagaagaccgagagtcaccacaaggccaagggcaagtgatttgacaggtatctgagctcccggaaacgctatcaaacccaaaggctcttttcagagcccccctaccgtttcaaaggaagagctaacctcactgcttgtaggtagaaggaaaaaaggcactaaggtaagttaattttatgccaaccttgagcaaagcgtattactgcttttcggtttttggggagcgctgttactaaaggttggtctgtttgtatgtaatagtaggtcagttacgtactatcatactctaaagaaatattctagttaatgctttgtaagatcgaccatagttagtgcctaacagtttacatgcagggatgcctcgtgatctaaacacttcgttgtgattactttaaaaatgtaaattgaaggcaaaactctaacgtgttggtaaccttgtttggtcctccgactagtcccccgtctatttttttctcaatttaggctgtaggcagcctcactttcctaattctgtgagagttataggtcccattcctgctaaagtgcagagtatattacctaaaagttaaccagggagttgaaaggtgtctgtaaaacagactaatgtccctaatgtagaacggtgcctgacatgcaacttactcttgtattttaagaagctcaagcgtctaggttgccattacaggcagaaaaggaaatagagtggggcctgtggccactcaaaaacctttgctttctgctcacccctctaatcctaccactttgggaggccgagggggctgatcacctgaggtcacgacttcgacactaacctggccaacatggtgaaacacctctctactaaataaaaataataaataaaaaaataagttgggcgtggtggcacataccttgtaatcccagctactcttgaagctgacgcaggagagtcgcttgagcctgggaggcggaggttgtagtaagccgagatcgtgccactgccctccagcctgggcaacagtgagacacggtcccccaaaaaaacctttgcttctagggatctggtaacagctgccccacccacaagaaatggagatctgggaccatggacaaatttctagagacctattttcctggattctgtgaatctcgccgaggttttcttccggatctcggtttctgcatttttttgtttgtttgcttgcttttttgaaacggagttttgctcctgttgcccaagctggaatgcagtggcgcgatctcggctcactgcatacaaactccgcctcccgggttcagacgactctccggcctcagcctccctagtagatgggattacaagcgcccgccaccagtagaaacggagtttcaccaggttagccgggctggtctcgaactcctgacctcaggtgatccgccagcctctgcctaccaaagtgctgggattacaggcgtgagccaccgcgcccggccggtttctgctttgatcggaattaagtgggcagaaaagtctaggcgggctaagtcttgcctatgcatctgcgcccagctgctcagactggccaaacagacccagtcgtttagtctaacgcttctggaactccactgaagcgttttgcattgtttcgtttggagccttcaaatccgagtgtgtggcaggagataataatcctagcagaagctgttt

SEQ ID NO: 46112 - DNA, 4503 bp, Homo sapiens
tatttattttgccttatcatcaatgcttgaatttcagctctaagctactttattgcaatttggttctgaagcatatgccaaaagcactcagcaaggctgcagacaaatgctttaaagtaaagtgcacctccacttccagtgactttatgaacatcacatttgaaaattaatcctttttcatctctgtaccctgagtacattttggacttcccttcgttcccaaataccctgaattcaaggtatctcaatccatggagcaattgtccagaggaagagagaagcaacagccccgcccccaacccttgggagcagaaagggaaagaattatccaaagaattgtttaaaaactcagatgtagcggacagatgtaaaaccatggctgtatagattgatgtcccaggggtccaaaacttaatctcaaatgggcaataatttgtttggcattaaactaaaccagtttgatgaactcaaatgccctcggctcaataggcaggactctccgaggagcctgtgttacttccctcacttaagtgcagatttgtaataaaaatcttaatgccagtggcatgctttttggatatataagaagctaaccacttggagtatcatatttgagaggtcagaaaagtccacagttaaagatcggtttataatttacgaagaaaatagaaagttttgtttctctgagttgaaatttgccaagcacggcgggaaatattgcaagtttttggcacaaggctttgtgcttcccttataatttgagatctgcgtgaagcctgagggttcggggatcattatctgagaaaaaccgggcagttcggtgtagacaatttttatatttttggctttttttgaggtgtaacaaacacaactcgggatccgagaggacactctgcggctgccagcgaggcgggctggacagcgcaccaatcacggcgcagctccgccctatataaacgggcgggcgcagcgccgcggctcgagtcccggccagtgcctctgcttccggctcgaattgctctcgctcacgcttgccttcaacatgtccgagactgcgcctgccgcgcccgctgctccggcccctgccgagaagactcccgtgaagaagaaggcccgcaagtctgcaggtgcggccaagcgcaaagcgtctgggcccccggtgtccgagctcattactaaagctgttgccgcctccaaggagcgcagcggcgtatctttggccgctctcaagaaagcgctggcagccgctggctatgacgtggagaagaacaacagccgcatcaagctgggtctcaagagcctggtgagcaagggcaccctggtgcagaccaagggcaccggcgcgtcgggttccttcaaactcaacaagaaggcggcctctggggaagccaagcctaaggctaaaaaggcaggcgcggccaaggccaagaagccagcaggagcggcgaagaagcccaagaaggcgacgggggcggccacccccaagaagagcgccaagaagaccccaaagaaggcgaagaagccggctgcagctgctggagccaaaaaagcgaaaagcccgaaaaaggcgaaagcagccaagccaaaaaaggcgcccaagagcccagcgaaggccaaagcagttaaacccaaggcggctaaaccaaagaccgccaagcccaaggcagccaagccaaagaaggcggcagccaagaaaaagtagaaagttcctttggccaactgcttagaagcccaacacaacccaaaggctcttttcagagccacccaccgctctcagtaaaagagctgttgcactattagggggcgtggctcgggaaaacgctgctaagcaggggcgggtctcccgggaacaaagtcggggagaggagtgggattttgtgtgtctccggagctatttttgactaaggcgtcgcgtcgcccaagccggagtgcagtggcgtcatctcgattttgcgttctcgagtgtcggagttgaacccatttgggcctcccttgtgctttgcacttttagcaggccctggcctccagatagcatgggaaaaaaaatgttgggattttcccgggtttctaagctgggtttttccgagttccaaacacggcacagtgtatcagtttctgtgctggttacaagcctactggttatccctatcgagtatggcaggcagtgagggacttcagaggagtacgtcttaggacaagtggcatagtactgacattatttccgaagggctacatttcaagtgcttggggagactactgccacataactgaaaattagaaaccgacactgcagaaaaatacttggtccttaaatgtggcatttggatggattaaggacttgccgaaacgtaaaactgacagacttgggggggggggatgtcccaattagcacggcttctgtatgcaacgagtcccatactttgttaaaggaagaaaggaatgtgagttctcctaatctgttaagtatctttcggtgtaagttctgacaccacaatgttaaaaaagtcggatctcaaaaaccaactgctccaagcgaagtgcacagctgtcttgcctaaagaggcctatttatagtagcctcgggtagtctggtctgggctttctcattgggtacaagtaaaggaacgaaatagccaatgaaaaggtagacttttaagtgtcgtttacattggcatttgtgacgacactctaaaattaatccaatcataaacgaaatctgattaacctcatttgaataccgcatctataaatgaacagggcctcggcgggagtgattattttctcaggtgtttgcaacagtgttctaactattaacgctacgatgcctgaacctaccaagtctgctcctgccccaaagaagggctccaagaaggcggtgactaaggctcagaagaaggacgggaagaagcgcaagcgcagccgcaaggagagctattcagtgtatgtgtacaaggtgctgaagcaggtccatcccgacaccggcatctcttccaaggcaatggggatcatgaattccttcgtcaacgacatcttcgagcgcatcgcaggcgaggcttcccgcctggcgcattacaacaagcgctcgaccatcacctccagggagatccagacggccgtgcgcctgctgcttccgggggagctggccaagcacgccgtgtcggagggcaccaaggccgtcaccaagtacaccagttccaagtaactttgccaagtaagcatctttacacctaatcccaaaggctcttttaagagccacgcatgttttcaataaatgagttgtaatcatttcattcaaaaggggggttattggacttagcaccacagtaccaatctttaatgttacgttagtactgcagaggaaataacttggaagttacagggaataacaataggtactagaaattgagtgctatgggtacgtattagatcgttagctcatttagtatcacataacactagcataaactgaaagtattgtaaatgtacagctctttggtttccgtgtgcagatttccaagttgatcgtgatgttgatccgggactcggtgtggtgacggcccgccctgagcacgaaagtgcacgctcttgacaacttccttatgtttggagctttctccaccaccacccccgcccattttcttgtaaaatttttaccatgcagatatgtaataactgcaagtaaaggctgaagacaatgtgagctgaacacggaactattacaaaggtttctgatttgttttgtaattgggccagtttctgtctgaagctcttaagcgagtggggcagggaaaggcggatcctaggcgctgaggtgcaggaaaaagaagcagcttctgagacaccttaaaattcttttgctaaaccgtctttttctgaaagtcatttaatttataggtttttttttttttttttttttttttttttggcagctttcaggttaaaagtcctccgggtaacggcagaaaccaaatagtcaatcattaaggtgcctgactgcacgtaggcaatagttatcgcaggactgaagccccctttgcagtacaatttatcctttcctagatgcccctgagtacggaggactggaggaggtagaaagggaaagaaaacctccttctggcaggatgtagcttctgctgcacaaggtaggatgatgacaaaaggttttcactgctggggaatggatgattgcgggagaaaaagaatctcggaaaagagtcgggagggaactaggagggagtggccagaaggaaaggaacaaatacttgagacgtgaaaaatgtgagatggatgaggctaggtttggagtcaaatgttggctgagagggagaatttaagtgatggatggatgatcattgtctaaaagaggaatgaatttagaagtttgtcctcatgccctcataaacaaacacgaaatgatggattatgggatacattttccataacatggcaagcgtggtacttggacggataaataaaagcctgagtaatattttctaaattctt

SEQ ID NO: 46113 - DNA, 1577 bp, Homo sapiens
ggatggaaggcagctcagaggaacagaaccaaacaagttggcctctccccattccactaaaaaatgttgaatcttatgtactttcatggttgtttctcccacggtaattactactttcttctttaaagaatgtatttgccagtcaagtgcctccaacacacctcccatccccccacaccaataaccatctgaatgccattttgtcttcctttcatataacaatgccttggtaggaactagtaactacctccatttttttcactattcttcacggcagcatcagcctttaccacttgccttctgagatacaggttttgctaccttgtttctccagcagctacagtctttgctaccttgtttctctgatagccatgaagaatgttagcagcagtttgccatgtttccttacagaaatacagaaaacacaggccaagcgtggtggctcacgcctgtaatcccagcactttcggaggcggaggagggaaatctcttttgagcttgagttcaagaccagcctgggaaacatggcgaaaacccatcgctgcaaaaaatacaaagattagccgggtgttggtggcgcaagccggttgccccagctacgcaagaggctgaggcacaagaatcgtttgaacccgggaggcggagactgcagattgccgagatcgcgccattgattactccagcatgggcgacacagcaagagtgaaaataaactttaatacactatcctcaccggccagtaagatatgaagccaaggcgtaataagaccatttaacttgaaaaccggagctactaaacacgtgaaactacacttttagcagtgactactactctttctcctgagtggataggtggccctgaaaagggccgttggttttgcggtagtgtactgtagaggtaagctcagccgccgaagccataaagagtgcgtccctggcgcttgagcgcgtacaccacgtccatggctgtgactgtcttgcgtttggcgtgttccgtgtaggtgacagcatcgcggattacattttccaggaaaactttcagcactccgcgagtttcctcataaatgaggccagaaatacgcttgacgccgccgcggcgagccaggcggcggatagcgggcttggtgattccttggatattgtcacgcaataccttacggtgacgcttggcgccacccttacctagaccctttccgcccttaccgcggccagacatcttgaaaccacagctgttaaatctgtaacgcaatacgtctggcagagccacgcagcacttttataatagcatgacggacctgtttgaaaacctcatgagaaggggcgggaaccacagtcagttcccgcccttctgtgcaattctcccttgctcagactggaggagaccaagaggggcctgaggcaacaaaagagcctcagctgggatttaataaatactgctaggtatatatatatatatacacacacactatacttgcagccattaactgagccatcagttcataaactttcgacaaagaagcctgacaattgtcccccacttttcccagaatatcaaataattagtactgtttccctca

SEQ ID NO: 46114 - DNA, 2573 bp, Homo sapiens
ccgcctcagcctcccaaagtgctgggattacaggcgtgagccacaacgcccggcgggatcactaattatccgtgtttttctcttcgggaggaaaatccttttggtcagatttcccttggcttggtggtggagagggtgagatcttgcagttttcaaacacttcctaagggggttccgtccccaagagagcaagcagcagaaatgccagaggaaccgtgcctatggggacaaagctgaactcctcatggaaggagattactgcagttccggtcttgtgagccaaagctcctgttcaatcgtcctagagcatcccaagcagcaaatgattttaaacatgttaatgtatttaatctcatttagttgttaaaatatgcctaaatttcctctttgggaacgcaagacttgcagagatgactccatggagagcggactctgccggcgggaactggagtcgttggtgacgtcatcccagtctgatctgtgaagggtagggccagcaggcagcaccaaagttcccgtatgcgcgttttcagtcttcatttaggtccgaattcccggcatataagaatactaccgtcgcttgtttttcagatttttgcggctattttcgttggtgtgttggtcatgtctggtcgcggcaaaggcggaaagggactgggtaaaggaggcgctaagcgtcaccgtaaggtcctgcgagataacatccagggcattaccaagcctgccatccggcgccttgctcgtcgcgggggtgtcaagcgcatttctggtctcatctacgaggagactcgcggggttctgaaggtgtttctggaaaacgtgattcgtgatgctgtgacttacacggagcacgccaaacgcaagacagtgacagcgatggatgtggtctacgcgctgaagagacagggacgcactctttacggcttcggcggctaatgctaccgcttaaacgactcagcatctcgacttcccaaatcaaaggcccttttcagggccgcccacagttttccgcaaaagagctcatgacttgttagacgattggttggtctctttataagttaattgttcctgtcaacaggtacgtatatttttcagccgttttttttttttcgttccaaattacatttggggtttcggcatacgattttttaggctacgatccttttatgtttattgtagtagggccttagattgcactgaaaaggctagggtaatagtgtctgtttaccttaccacttttattttgagtacctaaaaatgcatggttttcgacataagtgggaaaaccgcaagacactgcgtaaccgctcaaaatggcggagagcgaagaacaaagccggtgcctggcaatgggccggacccgcgaattagcgcaaccaatcatcttcctggaaaggagtgtgggccttaaattctagcggcctgttttctattacttaacctaacgaccgagtttaggtgtgtagaagttcctggggtagataagctcacgcaaggagaggttgcaagcattcatttcggaattctattaagccaacccagttgtcccttagaagttatgatatttgctgttttttgaataaaagaatttgactctctttaaaccctaaagcttgaaatttagcatttatctcacatgagacaaatgtttaggaactcatgtttaggaactcatgttcctgcctgaggcaggaactgaaacaccagatcacttgcatcgagaccgtgagactccctatgtttcatccatcatgattgcgtccttatccctccctgatttcctgttttctcgcccttctcgctacataagccccccaattttggtcggggagacggatttgtgatttcatctcctccctcatgaatactcatagaatttttccaaacctactgaatctgtatgtaaggttgactctgtaaggcatatatatattccagctccccttcactgccacagagcgctcattccatcctgggattacttctccctctgaaaataaagtctttgttacttcctgcttggatctcattgtctattgttcaaaaaagatatgtcgtcattccacagttatgccccagatgtcttggagatgtggtttgtttaaagaaggatccagccataacttccgttgtgtctccagttttcttatctaaaacaggctcctctcccctacttccccatttttgaacattgatttctcggagaccagacttacagaatgtttttgttttgcttttgttttgtattggcttgattcttaatcgttttacttggcttctgtactccccatgtcctgtaaagtacaagtgactttcatacacttaattgaaatcgggtgaatatgcctgtcaggaacagtttacagatgtaatgtacatagtacactacatcagaaacacatgatgtccggtttatgtaaattccaagtgatagaaaaatcgcaagtttgggctgggcacagtggctcatgcctctattccgagcacgttgggagggcaaggtgggtcgatcacctgaggtcaggagttcaagactagtctggccaacatggtgaacacctgactctattaaa

SEQ ID NO: 46115 - DNA, 1501 bp, Homo sapiens
agcacacatttacttggagcttgtatacttggtgacagccttggtaccttcggacactgcgtgcttggccagctctccgggaagcagcagacgcacggcggtctggatctccctggaggtaatggtcgagcgcttgttgtagtgggccagacgggaagcctcgcctgcgatgcgttcgaagatgtcgttaacgaaggaattcatgatgcccatggccttggatgagatgccagtatcggggtgaacctgttttagcaccttgtacacatacacggagtagctctccttacgactgcgcttgcgcttcttgccatccttcttctgcgccttggtcacagccttcttggaacccttcttcggagcaggagctgacttagctggttcaggcatgctgtcagaaaacaataacagcagtgagaatgaacgcacttaaataaaagctcgtgtctagagtctctccttttataggcctttcatgcaaataaagaattcaaaatatccagctctgattgggcaatgtgttagtgacgcatacatgtaaaatagccttcaccttatttcctttctaattggttggctcgtcaaagaacaattttaaccaatcaaattgcgcctttcacaattctaccgatgactataactagcttcttattcctccatcgagcccattctttttctttattcagtggattgttagttcttctgctgttaggaagccactatgtctggacgtggaaagcaaggcggcaaagctcgggcaaaagctaaaacgcgttcttccagggccggtcttcagtttccagttggccgtgtgcaccgcctcctccgcaaaggcaactactccgaacgagtcggggccggcgctccagtgtacctggcagcggtgctggaatatctgacggccgagatcttagagctagctggcaacgcggctcgcgacaataagaagacccgcatcatcccgcgccacctgcagctagccatccgcaacgacgaggagctaaataagcttctaggtcgcgtgaccatcgcgcagggcggtgtcctgcccaacatccaggccgtattgctgcctaagaagacggagagccaccataaggccaagggcaagtgaaatgattactagtcaaatccgtcagtgatcccgagtcccagaaaccaaaggctcttttcagagccacccaccttttctgtaaagtgctggaatacacatacgatgcctgaaatctcaatgttcactgtcctaatttttaacgaacgcttctgacgttactggtcagttctttattgaaatccttgctcacatttcatgcactaatttatcttactggtgtttctttgcagtaaaaatgcgtttataaaggtatacaagaatagaaaccgaggttgtgacaccaaggtttcactgcgttattttgtgtataggtccatgctgtgtatacaaatttatcattaatacacaggctgtttattcatgtgcacttgtcagaaaagggtgaaa

SEQ ID NO: 46116 - DNA, 2590 bp, Homo sapiens
aacaacaaaataagttatggtgatgtttctatattgctcactaagcggtaccctaccttttaatattttcgtaatattcaaaaacacattttaagtctattggaaacaatacttgcaagctctcaagtgaacatttatattgttaccccacactgccttttgtagacgagttttgtcaccaagtcaaaagcagcagcgcgcacgccgcctggacttgggtctgcgatcctactcacgcagatgtgttgcgctcacggattcgccttggtttaaggcccgccgtctgggtgcgagctttctttgtttttagcccttcccgccattttggaaagggtaacttgcagtctctccgcgaagtttccaacttctgtagtctttgagaaccttacgaacgcttcaagcttaaactgaaggaggaaggcccacgggaattataaactgtcacaatccagcttactcactgatatctagtgttaaaatgccacaagaaagctaaacatattcaacataccaacttccctcaagcagaaaacagtggctttaagtactttatgcccaaatcctaaacatgcgagattaagcacgagtaattaaacgttacctgcaaatctacacatgtgcacagtaactacttctcagcaaaaatctggaacaaagcaggataacaagatgtctgctcttttatgaaaaaagtgggcggccctgaaaagggcctttggttgaaaatgaaaataagagtgcagcaagcaggagccttagccaccgaagccgtaaagagtgcgtccctgtcgcttcagcgcgtagaccacatccattgctgtcacggtcttgcgtttggcgtgctctgtgtaagtgacagcgtcacgaatcacgttctccaggaacaccttcagaacaccacgagtctcctcatagataaggccagaaattcgcttgacaccgccgcgacgagcaaggcgccggatagctggcttagtgatgccctggatgttatcgcgcaaaaccttgcgatgacgcttagctcctcccttacccaaaccttttccacctttaccacggccagacatgactaagcaacttctaaaaccaacttaagaaacctaaacgccaaggcaaagcaacgcccttatatgccgggaattcggacctaattgaagactgaaagcgcgcataccggaactttggtcctgcttcttggccccaccccgcatagcccagccctggatgacgtcaccaacgactccagcctttggcatctgagcgccggctccgcggaggcgtctcttgcaattgctgggaaataggaatgagagttttaaggctgttttaacaaccaaatcagattaaataaattaacatgtttaaattgttatcaattgttccttcagttgctttaggacgattggagaggagcctcggtccacaagaccggaagcctgaggagtgcagctttgtccccaaggtcacagtgactggctttctgctgccggctgtaaagcacatgcggaccgaaaccccccttcggaagtgtttgaaaactgcaagatttcaccctctccatcaccaagccaagggaaacataaccaaaagggttttcttcccgatggcgaaggcatgataggttagtgattcgtggtagaattattgccctccgcgcggaggcctgattctattcccagtttgttctcttctttccctgcttattaaaatttgtaattgccatttaaatatctaactgcccctcacaactgcacccagtgtgtaggtttcggggtgggggtttttttttttcctttttttaattttattgagacagggtctcgctatgttgcctgcctgggtcttccaaagtgcagtgactacaggcgtgagctaccgcgcctagcccaccagtgtattgatatttatttttctatccctagttttgttttctgtttgattctggtgattcctttttccaaagtgagttggcaacctgtggtagccaaagaagtaggcaactgctcgtaggttttttcttaaattacgaggtagtctgaacgcatctcctgtaagtagttaagagtactgtgagaccgtgtgcctggcagaacagcagagtggcgcagcggaagcgtgctgggcccataacccagaggtcgatggatcgaaaccatcctctgctaggtcctttttttttctccccccccgtctattttcctgaggatcccttttttttaagttacagttttttaggttaaacaatgacgaaagaaaacaaaatgaacccgagtatttctttaattccagaattacaagcatttccgggaaataatgtgaaactacaatctctgcatgtacaattttgattttcatggacacccaagtgtcattaatcaatatgtcatctgtaaacaaagcaaatttctcttgtttagaggctataccactgttgcagccagttatgacagttgtaagttaacctgccaagcaaggagaatgcttacataaactgagtgccaagggtggggtggggtgggagcccaggaatggagttttatatcttttgatacataattcagaaagcactatttgccaagtagttaaggca

SEQ ID NO: 46117 - DNA, 786 bp, Homo sapiens
attttgagaaatctccccagttatgtataattaacaaccaccggatcacagctagataaggagaaatgctaggcgctactcagggggttaagcaaaaaatcagagggtcggaaatcagttttcaactacaagagtcttgcggatctggagcagcggtggatacacctctgcctgcgcggagggagcggagctaaaatactgtaatttttcggacctttataaaatagaatcagtaatcatgttaccaacagaaggttgttagtgccagcacacgttagtgtgctaatacatactgaagaatacctctcttaaagggagctaaaaacacctaattctcagtgagcaaacggggaggtatagcagacgataccttactgaggggaaacctttaaaaaagcccagttagcagggaaagccgagcgacgaggatgggattcgaacccacgcgtgcagagcacaatggattagcagtccatcgccttaaccactcggccaggcctctcctgatatgtgtaatgtttctcttctcaacagtttcatttggcaattcctattcttttgttaaatgttttcagtgacggaaataatggataaatggccctcttactctcataaaggaagaaaaactaaagaggagactgggagggaggaatagaccctaataaagatgacaaagtacactttctaagggaaaaataagagaaattaaaaaggaaaaacgaattagtgactgctcctgttttttaaatcaaattggattttgtcttttttcttaggtcatgtata

SEQ ID NO: 46118 - DNA, 1358 bp, Homo sapiens
ggactcaaattcctggattcagcatcccgagtgctaaccgatatactatgggacccttacatggggcacttgctactataattcttatgtaaatccttgcattttgaggggcttccaaagaagaaaacattcgcgggagggacctctgacacataaaccattaagcaccctgagcactcaaataacaccctggctgcctttgggaactcagggaagtgtggatgctaagagaaaagaccaagaatgtacaaggacatgatactactcagaagctagaaatgacagtcaggagttacatgacacttgctaatccgaagaagaaaccgtgaatgagaaagtaaatccacagatcgctgtgtgttgatgatttaagagacgaacgaaggatgggtcacaaaaagcaggacaggtcccaccgagatttgaactcggatcgctggattcaaagtccagagtgctaaccattacaccatggggccgccttccgccaccaatttcatgaatttataaaaatactgattacagagcatgtctattcgatgcagtattctcttaatatttattaaattaatactatctgcatcccatgtagcagaagctccaagagactcacatgcactacaaacctatctggaccaagtccgtcttagaaactgaaaaaacttgaacccgtttgagtattgttcaaaaaaggaaagaactgaggtctggtaggtgaaagacgtatccttaaacttgcgtatgataatttaaatccgaggaactcgcatccaacaagagaggaggggcaagagagaacagatgtgaaattccaggtgaaagattagaggatgctgttctgcaggaaagcatcgtgctgccgactgggatgggatgttaaggtgcttaagtgatcaggtgtacgctcctctgggtacaatggtaatttgagagaaagaaagagcactaaaagtttggtaggtcccaccgagatttgaactcggatcgctggattcaaagtccagagtgctaaccattacaccatggggccaacaacacagtaatctcctgacatatttttgataacatgaatgtagtacgtggaattggtctattgagagtgctgtttactttggcctctcaaaataggtgcatagtcccagattccgagaaagtaacaaaactgctccagcaggcagaaagcaagaacagaactcacctttccaaaaacttgttctgatctgcccacggagattatgaataggagcgttccttgattaatcagaacttcgcatttgctgaaattttaggtcacgatacttttttctacgtaagggtttataaaagaaaatatcaacacttagacatctcttaaaaca

SEQ ID NO: 46119 - DNA, 1573 bp, Homo sapiens
gagacagcatttcaagaagactgaaaggcaaaacaacttgagcgtttttccatcatttttatagcagtgtcagaaattacttgtgttttcaagtgctttccaatgtaacacttcaaaaaatctctaagtcttgttacacaaaagaactaaaattatctggttccacttttatggagaaagataataacaggaaaataaaaagtactactccatgttattctgtgtgattgcacaggtagtgcaccggatttcctctacccgagagtaaaaaaagcacgccgtagtcggcaggattcgaacctgcgcggggagaccccaatggatttcaagtccatcgccttaaccactcggccacgactacgtacctccttcaacaacctggatatattcccatgaggaatatatgtttcttttcacagacatctttaaatttgtttattttgacaaggtaacaactctggaatgtctctcatcctggttaaaaaacaaaatcaaaattttaaagatttagatattggctaaaagagatattgcaaattgcaagacttgtctgatgtaggaagtacgaaagactttacgagggggccacacgccaacccctaaatggtctccaaacctacgaaactggctgaaagctctccacacctaattagtaggattacagatattgaagcctacaaatgcgcatttccaccaggataccttgtggattcttacacgggtcaggtccgctgacgtttagcacgcctactttaaaacctcttttctgtagggtcctagtcttcaagtaaaatatatgcggccatatagcagaggatggtttcgatccatcgacctctgggttatgggcccagcacgcttccgctgcgccactctgctgtctcgacagtccgctccgccactctgctgtttcaacattactcttgtcaagtatgtattagaggctacaattttcggcatcttcctaattttaaatgatttgttgtcgtttgccaaattatcctggagaatgagaagtgcacactggccatccatatggggctgcacgccacttccaaacaccagcggtttagaattcttcctcgataaattcgaatcagctgaggttgaagttctctaaaacggaagcatgtttcgagttatgggaaaacaaagtgcaggctaattggcataatttataaaggtgaaattataaatgcttgggcaaatttcagccattcctggataccggagggagtcgttattacttccaaacattttttacttgagattttcatcgaaaatgttcacaggaaaaaaaaaattacagttgcagcgaggaggcaacagaacctagaactccgcgcggcaggtgagaattcaaccacttaaccaccggtgctaaacgtagttacatggatttgttttcttttacatctatcatcatatctcccttaaaaaaagtgacaatgtatgttctctgtctataatgttttaaaaatccagtcaaatattatgtctaaatattctgagtaaacgtttgaacatagaagtaagtaaatacgtaagaatatttttcagaacgtttgaacgt

SEQ ID NO: 46120 - DNA, 1057 bp, Homo sapiens
tgtagccccggctggagtctggagtgcagcggcacgcaggcgcccgccaccacgcccagctaatttttgtatttttagtagagacgggggtttctctgttttggccagactggtctcgaactcccgacctcgtgattcgcctgcctcggcctcccaaagtgctgggattacaggcgtgagccaccgcgcccggccattagatttttttttaccattagattaaacttcgtctttccccaaccaggctgtaagtttttttcaggggttggaaattccttggtttacaacaatgatttcactatacttggtacatttacagctcatagggaggagattattttccatcaaaaaatagttctgatttgtaacccgggaccacgtggcctaatggataaggcgtctgacttcggatcagaagattgagggttcgaatccctccgtggttatttgagatactgactagtctggtgttattttccttcctcaaagctggtaatcagaaatgtacttctttccatttacttcactaagttatcttcattgtagatcccttccttcacatcccttgcctttgctctgtacttagtctgtttatcctctctctctccaccataatgccatacagtccatcttctgggcctgcgctactcaaaatttggtccagtccctgaaccagtaacataacctgggagcttcttaaaaatgacaacttttcgaggccgacctcccttgctagtccgcactacacttgacctacctagaatcgctgtgtgtaggctctaggattctgggttttaaccaagctatccaagtggttcgtttgcacactcgaatgtgagaaccatttacagaccttacaggctgtagaatgcactctagaccataaagcacgtcagacccaattacaatttagcgccaagctacgtgagttttaaggctattacgacaggggtaatgtgaagctcccacgggaacctcttggaaagactggggtacgaaggaaggcagaaaagaggtccacacgtttgacaaaagtatcttctaacaaatacagaag

SEQ ID NO: 46121 - DNA, 693 bp, Homo sapiens
caagtatttacttcgtagaattgcgaggaataaatgattcagaacttggaatagtgcatggtatctattaactgttcaaacaatcaaagctaaaactactgcttttgttatttttaatctaattaggatagtaatgtattgcaaccagagatatagatctctgagagaggtgcaaatcaaaataagttcccttacggtgtccatgacaattataccaatttcctcctcctatgaggtagatctatttttggaagggggaaaaacaaatccacaaaacgctccctagcagaggatggtttcgatccatcgacctctgggttatgggcccagcacgcttccgctgcgccactctgctacgcgagtcacaggtcccagagttaatagtcaccttttttctagcgtgtcaagtttccaaatctcaaaattatgtcttctctcttttttttttttccagagcagtaatctgttcgtaatatggccataggcttagactactactaagaaaagagttaataagaaataggaaaaaggttattttaggtacacttctccgatgtaatgtttgtcactgtgtattgtgtgaatgtgtacagtaaatacataagagaaaatctgctaatatttcaaatgtcatgttttaaagtcattgtaagttataaaaatttaaacacttctgaagaaataaacgtactt

SEQ ID NO: 46122 - DNA, 1239 bp, Homo sapiens
ctgaagagtataattcagaatgtttgcaataaaagagtgaaaacgtctctataaacccggaaataagccccaaaataccataacatattcctgtatatatcttcctactaaaaaaagagaagggggtagttttgaggaggctaaagtaactgagtatacaagtgcctaagagaagcaggaaaagcaacttttttccccctgtaatatgtaatgtactccccgccatacagttatctgagccagcgagctaaaaactgttgaccccgacgtgatttgaacacgcaaccttctgatctggagtcagacgcgctaccgttgcgccacgaggtctccgggacacctacgttttatttacctgtcaatctgattcatgaaaataatttcggtactggtgaagaccaggcagctattaacagatacaaaatagtgcctagctgcttccctctcggtaaaattgctgtccgcccaatcactgattttctctgcctctgaattgcttcattttcacctgttcttgtttatatttcattccgtttcttacctagttttccctgtatattccaaatatagacgtcttgggagtttcgttgtttttatctttatagaaatacattctgttgaaggtcagtcgctttggaatggggttgtagagaggaggtagcgaagagggaataatgaggatccttcctctcccaactcctcattaaggaactctgatcaaggtgagttttaaattcgtttccaaagttcactgcaggtcacaaccagtgtttccgttaacgaattcacgcgggggctggcaggttgtttgtgctgcatcttttctgagagataacggcgcctccctgtagcctccgttctcagctgatgagagagttgatttcacaccccgataattcttcaaaatcagatcgctggacctgaaactgaccctaaaaagaacaagaaatcctgtcatcaggagtaagtgggttattctggcactgtgctttgtttggctggttaaagaacctgccttgggtaaccagagatcggagttttctaaagtcagcggggtttgtctggggaccccgaatttacatacagacgatctccgcaaatagtgcaggggccgctttgaactcttaggaaaagatattccaaaaagtggtccactgctataaaacactcatctttctctgaaaattaaggaccccccgcctcgccccaccccgccccaccttttcccccgccttgctg

SEQ ID NO: 46123 - DNA, 1634 bp, Homo sapiens
ataagggagtctcctctctcctaaaccatgccttagagttaataatgatttttaacattttctctggggtgtggagagcaatatctgtttctctccatgtccttccccaccttcatagtcagcaagatgattaagctgttctgatccacaaaatgcggaacctcagacctaactaatagagtcctccctctgatcagtggcaaagagtagccattatcattttttaatggtaataatatttattactttttaaacttattttttaatggtaataacatttatattatactgggtgtctgtatattgagttgccattccaaaggactatataaaaaatatatatctaaatgcttgacaaaaaaaaaatgcaatttttttggaaaggaatatatttggtggctgcctcatgcagcttaagtgtccaaaatctgatagattggtgtatcccagtggtagttttctgttgccacaaactccaatcagcaggaatgggggttgtaactcctgtacaatagttctaccttatccacagttctgttttctgcagtttgagttgctcctggtcaaccttggtctgaaaatattaaatgaaaaacttcagaaataaacatttcatatgttttaagttgcaactgactctgggtaggataatgaaataccaccctgtccaggatatgaatcatccctttgtcctgcttatccaagctgtgtatgctaactgcccattagtcattgacatcatctgcccctgacatccaaccacagacgttatcatggctcagtgatccaggatcacccaggcagatgatcctccttctgatgtatcatgaggtcaacagtagcctaacgttccatcacagtgcctacttcactcatctcgcttcatctcaccacttaggcattttatcacctcatcatcataagaagaagggggagtacagcacaagacgatattttgagagagagaccccattcacataacttttattacagtgtattgttataattgttctattttaagctagtgttgttaatctcttactatgcttaatttataaattcaactttaccataggtatgtctgtgataaacattgtatatatagtgtttgacacatccatagtttcaggcatccactgagggtcttggaacatgtcccccaaggataagtggggactactctagtgccatcaggctagcaggctgtaaaggttttaatggcagtccctggaccatggcttatttaattgcttccaaggcccactgctacaaagggcctcattcaaagctggtggctttgttggtcaccctgacttaggggaccaaaagaacactcaggtggggtacatgttgcctccaatgcccaagtacccaaagaggccttccagctgttgggcctcctttttattagtggatgtctccaaaattaaatttttttgcttggttgtatctagaatacttttctggcttactgcccatgtggccttcgcatttagcccagggacagtccactgttagtctccacatccgaaagcctttttgactagccaaactgagctgttacattatgacagggtagtttgtagcatttccatttgtaacaataattaacacaataatgtcctgttcttcag

SEQ ID NO: 46124 - DNA, 990 bp, Homo sapiens
cccaaaaggttatttgctgcttgagatttttggggggtttttgtgtgtgtattctacctagtaacagctgagaaataaggctcgagacaccattggttggttcagcctcactcggccaatcctgggctctaaactgctcagtggaaatcttgggactttttggacacccagagaacaggtcccagataccgagtccgcaactccaaacatcgcgattaataggaggtgaacacagcttttctcttctctttgggatgctttgttgtctggtggtgactgtgcccatgggtgagttgtatcggaaaatcgtcatgtgaggatcagaggggaaaagaaaacagaggttagttctagaaggtaggaaagggagaggaggcgctacagctccggggtgggggcggtagctgggggcggtaggtgcggggagcgggatctgctctggagaggagagggggacctgggagacaggaagcctactggtggggaggcgcagcctcgcctggctttacctcgagtgtcccgacctgggtctcggggagggggaagtggagggacgagggtgtgaaagaatccagggacaactgaagaaaccggactgtggcccgagaagtgggaagaggaaggaggaaaacggcccccttgatctctgcattgatggcttacttatggaatgtttacggaatccctctttcggagatacctgagccttgagatgcaagcgactcccagaagttggggcaccgatgagacctacttgagtgacaggagaggttgggcccgaccagcactgaggtgccaagactcctaggctgattctcctcctctgtaaccctaggcctctggtctctgcctgccctgggtgctcatggaaccagctgctgctctgcacttctccctgccagcctccctcctcctcctcctgctcctcctccttctcagcctgtgtgcactggtctcaggtagggatgtgtgtcacttgctgctgtcacc

SEQ ID NO: 46125 - DNA, 982 bp, Homo sapiens
tgcagtaggggctaagataccactgccttttggctgagccctggtctccctttccaggccttgggtctaagcccctcattgaaatcaaggcccaagaggatgggagcatctggctggagtgcatatctggagggtggtacccagagcccctcacagtgtggagggacccctacggtgaggttgtgcccgccctgaaggaggtttccatcgctgatgctgacggcctcttcatggtcaccacagctgtgatcatcagagacaagtatgtgaggaatgtgtcctgctctgtcaacaacaccctgctcggccaggagaaggaaactgtcatttttattccaggttagttctctgccctctgagacctatcaagtgtatgcaggatcctcagcacccagatggagcccagagcgggaatgggggcagcagtgtgggtggaatggtcctgggccctgaggagctggaggctgcagctgagttgagacgtctcccctcctcacaaagggagattcaaagagtcccaaaacacaagagtaggagcctcttctctgagggtaaacctggtcttttttttcttgattaggtctttatgctgcaacagttgtaaaatattaaggacaaccatcaaacctggagagtagtgtgggtgggtgactgtctatgcttggcattcctgtatgttgcagccatcccttcctgtctatgggacttcccaaaggacagagctggggaaattccctatcaagagacattcataaatgtattcaacaaatgttcaacaagcatttcttatgtttaagactgtacaggaaaccaagggtcaataattgaacaaaatatatcaaaatttctctcctcaaggagttcatattctagagagagacagcggccgggcacggtggctcacacctgcaatcccagcactttgggaggccaaggtggttggatcatgagttcgggagttcaggaccagcctggccaagat

SEQ ID NO: 46126 - DNA, 840 bp, Homo sapiens
tctcaaaaggttacttgctgcttgaaatttttgattcggtgtattctacctagtaactgctgagaaataaggctcgacaccattggctggttcactcacacccggccaatcctggactctaaaatacttagggaaatcttgggacactgtggaagcccagagaatctgatcccgggtcccacaacttcacatatcgcgagtaagtgggaggcaaagaaaattctttttctcctcttttgggacagtttgtgactagtagtgcctgtgcccctggaaaggttggagacttgggggacgactggagaattgccatttgaggaccaaaggagaaaagaaactacacgctaattctagaaggtaggaaagggagggtaggcgctacagctccggggtgaaggcggtcgatggaagtagcgggatccgctgtggacttgagagggggttctgggagagggaaagcccaccggtggggcggcgcctcctcgcctggctttacctccggtggcccggcgtggatcgcggggaggaggaagtgaagggaggagggtgtgatagaatccagcgacaactgaagaaaccggactctggccagagaagtgagccgaggagggcggaaaaaggcccccttgatcttggcattgatggcttacttcatggaatgtttaaggaatccctctctcaggagatacctgagccttcggatgcaggggactctctgaagttggggcactgatgagacctacttgagtgacgggagaggttgggcccgaccagcactgaggtgccaagactcctaggctgattctcctctgtaaccctaggcctcctgtccctgcctgc

SEQ ID NO: 46127 - DNA, 526 bp, Homo sapiens
ctggattacggaatacctagacaactggtatattatttctggatgtatttgtgagtgtgtttccagaagagattgacatgtgagtcagtgggaaattctcccctcctattggctgggggcccaatataacaaaaaggcagaggaaaggcaaattcttctctcccctgagacattcttcttctgctgctcttggacatcagaactgctggctctcgggcctttgaactttgggacttgtaccaggaagccctgggttctcaggcctttcactttggactgagatttacacaatcggcttccctagttctgaggctttcagacttaaactgagccatactaccagcatcccagggtctccagcctacagacgagctgtcatgggatttctcagcttgcataatcacatgagccaatttccctaataaacacccgctcatcatatgtatctatatctatatggtattggttttgtttctctggagaattctgactaatacaatcaggcatctaaaattctgacttgaat

SEQ ID NO: 46128 - DNA, 893 bp, Homo sapiens
gtctggctttctttccatgtatacatttatttgacgctgtagtaaaatctcctccttcaggtacccatattcatgcaagcaaatgttagcaaactgccacagtagcattttaattagtgcacaactttctctcttcaccacattataatcttttctcattttgttctgctgctatttctattatgataaaagacttaagtaaatatgtagaaatacttatatacatggacacgcaataatgattcaaatagataaacacagaaacacaaacactaagggaggtacggctggaatttttctgcaacgtgtacaattcaatgtactttcacttttcatttcaaccctcctcagtggtttcctcccagcaactgatgagaaacatcacctctgagccaatcaaaaaactaattcttccaaaaagagattgttattattcctcacaataaccagatagcctctgctttctttttcctttcttcggaatgagagactcaaccataatagaaagaatggagaactattaaccaccattcttcagtgggctgtgattttcagaggggaatactaagaagtaagtggggaatgttgattagagcctgggctacaatgcctgggaggacaagagctgaatcgctgagagtggtgagtgggcatgcagggagagtacttgcccagggaaaggggtgcagtgcctctgtgtgtgtgtgtgtgtgtgtgtgtgtgtgtgtgtgtgtgtgtgcgtgtgtgcgcatgggcacccatgcacacatgtgggcacatggagaagaggcaagtagtgcaaagaataaagacctgcagatattgggatttggtggaaggagagggagacaacataaatgaagaaatattccaactgcatgttcttaagaact

SEQ ID NO: 46129 - DNA, 1590 bp, Homo sapiens
gcctccagactaagcatttagacacttgaggggaatattgacaactgggcctcgggaagattattctggaagatatctttacaattacaagattggagcctttgggagagggatgatgtttacgggaggatggtatgtgtgctagtgtgtgtgtctgtgtgtggctcttggacccaacctgaccacctactatctagaaggtgaaggacaactagaaagttttgctcaattccatcttctgccaccaccagaatgccacctccctgagggaaaaggtttttgatcctcagtcaggattctcagcacctcttatccgatagctttggaatgaatggcaaggccttcataacagccactgcaactgctgtctcctttcctttgctacccctcccgctccagccatgccagcttcccccaagccctcctgcgctccaggcccaacctccaaagccagcaacttgaacaggagtcctctggctttggaaagggggcggcttacgttttcctgctcatgtttcctccccagcaaaattgccctctacatagagaggcctctccttgtggacaccagcaaagccaccgacctcagtgacaaaccccagggaatctccccaaggaatctcaaagcgagagagagagagagagtcttgagagagaaagagagagagagagagtcttgctttcgaacaaagaaaaaggaaataaaaagacccgataatctcaaaaggttatttgctgcttgaaatttgtgattcggtgtattctacccagcaactgctgagaaataaggttcgacaccattggctggttcactcacacccggccaatcctgggctctaaaatacttagggaactcttgggactgtggaagcccaggagaccagatttcgtttcctgcatctccaaacatggcgacctaggagaaggggaagaacaattttttctcctcttttgggaaggtttgtgtctagtagtgcctgtgcccctgggcagattggagagaagagggacgactggagaatcgtcgagaaccagcggagaaaagaaaaagcaacgtttaattctagaaggtaggaaacggaggggaggcgctacagctccggggtgggcacagtaggtgggggaagcggggtctgctgtggacacgagacggggtcctgggacagggaaagcccaccggtggggaggcgcggcctcgcctgtctttgcctcaggctgcccggcctgggtcgcggggaggaggaagtgaagggaggagggtgtggtagaatccagcgacaactgaagaaactgcattctggccagagaagtgagccgaggagggcggaaaaaggcccccttgatcttggcattgatggcttacttcatggaatgtttaaggaatccctctctcgggacatacctgagccttcggatgcaggggactccctgaagttggggcactgatgagacctacttgagtgacgggagaggttgggcccgaccagcactgaggtgccaagactcctaggctgattctcctctgtaaccctaggcctcctgtccctgcctgctctgggtgctcatggaatcagctgctgccctgcactt

SEQ ID NO: 46130 - DNA, 597 bp, Homo sapiens
caagaaaaaaaaaagaaagaacaagaaatatctccaaattttgatcatcgtgcaaaatgcatttacgtagcaactgaatatgcatactcatagtattaacagtaacaaagtacttattatgcgtcaggtcctgtattttgtgtgctgtaattcctgccatttttcagacccctaggaggtaggtaggcatcagtgcagtctccattttacaaataaagactctgaagagcagagagataaaatggcttctatcacccgctagagagtaagcagagatgagatttgactccaggccatctgactccacggtccatgctgttggttaggtacaaagtacattgtccagaaaatgactttcaaacattcctataagctgagcaaatcttgtgttagtttacaaagcagtatacaacttagaacaagtaggaggtaagaaagttaacataacatcaagctactgccacagaaagaccttgtactggactgtacaagaatttggcctcatgttcttccaagagagagaggtgaaggcagccaccagttccattcaaacagcaaaatagcagtggaagataatcaagtgccaggacagtggct

SEQ ID NO: 46131 - DNA, 1545 bp, Homo sapiens
acattgtattctatcaattgaactcacgatgaaagtattataggtgtctaagaaagctgtttctaatgtccacagaagcaaaatgacttatctaagattctccaggtagtgaccagttctagttctgtctgaaattcgtactcaggtcccctgacttccagtcagtgatattccgaccatggcatcctgactgctaacccttgctaacaaaatttgaagtaggtcacctctgacctttgtttatgtttagaaaagttgttgtgctcaaggccttctatcaagtacccgctgcgccaggtttagtaaaatacataagctactccccatttttgttgttgctgtttttgcttttgctttttaaagtttttattacagtataacatccacaccgaaaagtgcgcaaatcctccataaactccgacagagaggcaagacaagccaggcttcccacgctcctgtcccctccaccggccctgccaagggtaaccacgtgctgggagatttgcagcacaacgcaaaggagaaggattagcgagcaccttgttccagcaaaaactggagcaagcctaaaacttcctgggaattaagtgtaaatttaagccaggtattctagtaatgttgagttcaacaggattgccattattttaactagaattcagttgagagcagagcgccatcgccgtcttccgccttagtcactcggccctgggctggctcacgcccgccccgccccctccccgcccctcccacgcccgccccgcccctcccacgcccccgcccccgtcccgctccccctaccccgacccgccctccctcgcccgccgccccacccgccgcagccctccccgcgcagcctgggagtgactcggcgttcactcgggagacgccgctctgtggcccggacaaccggtcctatgcagcgccgtccgaggcagttcgcggagaggcggcttaccttttaacccaggaatgcccatatcttgagaaaaagaacaacaagggggtgggcgggggtggggacatggggtaggggggcggctggtggatggggaactaatagcgtttagacaagagacagaagtgagtcctgagcacaatgtagcataagcgcgtcaggatggccgagcggtctaaggcgctgcgttcaggtcgcagtctcccctggaggcgtgggttcgaatcccactcctgacagttcgtacttttagtatttagacacaaatcgagtttaagtttacgctacgttttcctacctgctctttgtgacatggtcttctctctttttaaaaaataaattttccgagttccggaataaaagcactctttgtttttattagccactccaaggacagcaaaaagtactctgtactccgaaaataatttcagaacctaccggtgttttgaaatctcacctcctttttccgtttctcctctgtctctagttgtctttccctctccctccttcacaggcagagttgaataaatgttactcttcagttcatggctcattacattactgcagggctcctctttatttagttatag

SEQ ID NO: 46132 - DNA, 1121 bp, Homo sapiens
ccttctcaacaacagattatgaatcattccaaagattgaccttctaaaaacattacctgcagattctgacaatgaatctgtttaggatttccccaggaaagaaaatagaatgactagagattatgatgttgcttgtagtttaaatttggtgtttgccttctgctttccctggttcctctcgtacatgttgtaagatataacatgtggaagaaaagtgtaagaaaagcaagaaattcagaatttcattattctgaaagaaagccaaatttatctttgcttctttttcgtaaacaaggaggtttcacaccggacgcatataaaacactttgatggagccccataggggaaaataacctttcacgcatacttcaactgttccgtgggtactttgaatgcaggaaaactacaacaggccccgctgggattcgaacccaggatctcctgtttactagacaggcgctttaaccagctaagccacggagccaccatgcctgcggtggtacaaatgagcatagaaaagagatgatctttgcctttgttctgtgcattgatacactttcttgttactgaggtttgaaagtagctacacgcttcttcagacactgaagattaaccttggcttcgccccaaaagacctaagaaaccgctcagctgcaggataacgaggtttttcgcgtgggggaggtggggggtgagggaaaggctggcgatagcctgacccccgccccggggcgaacaggagagtcctccgagaaactgcctcaaatagcaagcagctcatcctaacgtggataaagtatgacctcgggcttcagggagaagagggtaggagagcgggtagccagccacatttacagaacactcctccgagtcgtgtaatgcatttacaccagaacacttacggcaccaagaactgatctagcaggaaggaagctatttgtttcttatttcatggcttttaaattaaactggaattagattaaaattccagtcattccttaccccatttctttccgttaaaactgggctccacctacctgcttcttgcttattaaagattaactaatggggttccagagttgcttcttaaaaatgcaagatttaagaattaacaacttaat

SEQ ID NO: 46133 - DNA, 2734 bp, Homo sapiens
tgaacattcatatgagtgtccgggttgatgatgctccttataaagctgtcaaattctgagatcaaggccctgcagtagaagcagcatgcagtgaggaggcctagcacagtttcgcttagtaaaatatttgaagaaaaaaaaaaaaagacccacagagagacaaatgaaaactcagaccacgtcaccgtacaacggcttccagtttcctacagaataccagccagagtccttacaagagcctgtaaagctggccagagtccttacaagggcctataaagctggaggtggtctcccaggatctcctattcctctccactgagcaccggcctcctcaacataactcccaagcctgcttccacctccaggccttttccctagcgatttttccctgttccagatcactcatttccccgatatcagcatttatccctcattcatcactttcactgctggcctttcctatcctctttccctgttttattattatttttctccaatcgcttatcactattattttgtttatttaatgctttattatccgcttccgccactgccatgtaatcttgagggcaagggtctctcatgttttcttcaccgttatctgcagtgccttgaacactaatactggttgaatgaacgaacgcattaatggagcggtgatattggggcagagaggatgcagggcttgcttttcaccgccatttttcagccggcagagacagaccgagaaaggaatgaaggccacggggcgtgtgcagaagtagctaccagagagtccatgcgctgcgagcctggaccagcgggcaaacgcggcttacaggcgttcacccagatattacgggtacaacctagtttcttatgaaatacctcgcccctaaggtacgcgcagggccagtggcgcaatggataacgcgtctgactacggatcagaagattccaggttcgactcctggctggctcggtgtaagcagggtcgttttacaactttctgactccgcaggagtaaggaaattcctgcaagataaatttgcctggaagactcagaagcaagaggggcagctcccgacaacatatggggttatcatttctttgcggagcattctgccactgaccacgtggtaacgccaactacgccagagaaacgctcgccctacccaagttgtgcccagccttgcctggccattttggccgaagaacgaaggaccgttcagagattaaattaaagtctctattgtgttcttccctattcagtcatttgtagaataaattctatggcttcagtttgaacactggaggggctgggtctgagcttttcattggtttttctggtttgagaggtcggtacagagacgcacgcgcacatcagcaaaacacgcacttggaacgaagaaacacggaactaggcaggaagaactatttactctgaaaaataagcccttagtgggtttccgtagtgtagtggttatcacgttcgcctcacacgcgaaaggtccccggttcgaaaccgggcggaaacacgtttttttttcctcatcttactacgaaattcttccagtgtgtatcttttaaagactttttcaggctgtcataaatttcctgtcttcttgtcttgctagatcggggcagcagtgcttagggcgggcctcagaggctcacacacgtatcgccagggggagaaccagctctctccggcttggactcggggcggctccccgcctgcagccccggaagcgcatcctcaccttccctcgccttcctgttcctggcggagccgggctccgctcgtcttctctgtcttagggctggtgctggccctgcccacgcctagggctccggcgcgtcacgggcctcagctgggattcccgcgcccctcggacggccacgagactcgggtaagtgcctcacagactttgtgcgctaccccggaaaatgaggggcgtggtggggggggtcccgccgccctccgtatacttaggaccctcctgccagctggccccggtcatgattaggggccttgggccccgtcagccccgcctgtcttcccgtctccagagtaatcgcagcatctctcctgagctccgagtgtgaatccctgggaaaagctgaatccagaggtggggtcacagagagccgcaggcccgaccgggatgagaagtcctaatcggcgttctaggggcgttctaaaagaaggaaggaaggggatttgaaaggattgctcccgcagggctgtggccttaaagaggtggtgactggcaggttggactgacctgccgtgggctctcccttcctccccaatttaccttcgagaaaccctcgttgaggagacacccaagggctgagtcctcctccactttgaccttttgctattccatcacaaagaaaaaatggatcccaaagttaagaaatggaccagcacttgtttagaatcaggactggtgccttggtgtttggcctcttacctctgccacatggcttgcttacaagttaatcggattaatcaaacgcttttatgagaaagttttgttgtgtcacctggcagcctcgggtgttccctaagagggatttctttcttagatgtattactactttttctagggattagccaagcctagcctctcagatcatattgctccaggttccctcaaatgactaataagaatgtgatgtgtttgtttttgtttgtttgtttttgagacggagtctcactctgttgtccaggctggggtgcaatggt

SEQ ID NO: 46134 - DNA, 654 bp, Homo sapiens
tgtttgtggcctcaacatgtcatagttttacatgtgtaaatggatctatagtgtacatattcttctgcaacttgctatttttcttcggcattatattcttgagattcatcctcgtttttgaacctacctgtaatctatttgtttctgctgctgaatggtattcccttttatacatactaccaaaatatatgcatcccttctactattgaaggacatttgggtgatttacaggtttttgaaattacagtgttgctagaaacattcttgtggagatctcctgtccacacctccaagaatccctctaagtaaacacctagaagtaaaattgctttacacaataccactgtttgcagagtgctttacaaataaccactgtttccaaaagcaaatacactaattggcacacacacacagcagtacataagggttttgattgctccatatcagctgagcccttgatattgtcagacaacttggttttcctcagtttgatagatatgaaatgttatatcctatgcttttaatatgtacttcttatatatttttaggtgcttattcctcactcatgcttccaagaagtacctgttaacattttttgccatagttttaaaattttcattttgtcctttcctcatggatctataggaatgcttt

SEQ ID NO: 46135 - DNA, 2474 bp, Homo sapiens
ttcttgtcagatttccaggtagttgtcaatagttctatccctgggtcagtaggttaagtatttgacaagcatgtctgatggctggaaggttttccacactttgaaaactgatggatgctgccccattaaccatttcaggattttgttcgacaaataaaagagaatttagtttcagcagtccgcaaatcttagaattttggggacagagatggggacggggacagatatgggaggacggagacggcggggcggtggggtggtagcagaaatctttcacaaacaactagggagagctacaaagaacggtttcttagggtaggggatgtagctcagtggtagagcgcatgcttcgcatgtatgaggtcccgggttcgatccccggcatctccaagttgttttatcctatctgcccaatactattagaaactatatttcaaaatgtgaaataattgtgttttgtatcctccacttctttaactttttatggctttcttttagccactgtatgtagaattgtatatggagcacggggaacaagattgctttgaagtattttgaactatctatgtgaaacaaatggaattgagaacacagaaaaacatgcccaatggggagatgacagaagaggagcaacctggaaagttgcccggaacccattaatgagccctatttgtggtatatggtttgcctttagggcagaaataatcttggcttgagaacatggaaaggggagggaagacgggctattgttagtcctgtgagtcataggatgataaaaataggacaaatatcgaaagaaggatgaatctcagctcagcacgggcgaatttggctgctctagtgcaccggtctcccgtaggggaataacaaaaatgaaaacattccgaaacactgatgaaattcttgatgcagtttttaaaacttcttggagacaggtggccggttagctcagttggttagagcgtggtgctaataacgccaaggtcgcgggttcgatccccgtacgggccaactttgttttcttccatcacgtaacttacggccaaagacaaggaaaaatcaattgtctgaggactgttactacaagaaagactgtgctaacctttataactaacactttgccagaagtccaaacctttgtagcaagtccagaggtcctgttttcttaagtcatggtgctcaaaatgtttgctcatgagaagcagaaaagcagtaggatagtttaggagttagatttaaattcaatagagggcaaaacagtgccaccaatttgtttagtgccccaacactgtccttgaaatagtctgaaaacagataaatcttcagataatgaaatgtggggcaagtgtgagaaggcagtgttcattatctctgattgcccaattaaggatccctacttgggaagatcaacactcacacatcaagacagaaattccattccgagagaaacattttcttgttactttgatttcccaagaaaggactatgcccctttccaaaatctacctttttcacatcagcaacctggacctgttggtccaggttggccaacgccgggaataactgctcagtccacatcttgatgttaaatatcccctgttccttgtacaactaatgctctctgtttatttacgacctcacagctgtatagcctgttgagtgatttttcaggtgttttactattttctgtggaaaatgctgatcgcaactcacgagctccacgtgggctttgttagccccacacctgtgggtgagctctagcgcttgtcaaaaacgaaacttactgggcctcgcctccagagacttttactcagatttgagaaggaacccagatttctgcgttttaaacaaacgccacagctgtttctcagaaaggctgtgtcaagagccctttgagataacagtccttaggattggattgagggaaaattcggagaaattctgagagcctcattgacctgataatttttttaacaaaattaattaaaggtattatcagttatagttgcatatagctacacgtacatttaaaaaaaaagaaatttggtaaatatttaacgcatctaaaataataaatgctcaggcggctcgttggtctaggggtatgattctcgcttagggtgcgagaggtcccgggttcaaatcccggacgagccctagttttgtcccttgcttctgaatctggctgctttcgcccaaccttagtatataagttaaaacttgccagttagaagcgccgataattgtggcatcgatatgcgttagaaaccaacaagtgagttgcgatctctagttaaggagtttttttttgtttttgttttttgttttttttttttttttgattctctttagtccgctctacagacttttgcaaaggcaaacgtttccggatcttctagaagttccgactccacgattgtgttcatgtgaaatatgttagaaataaaatggtcacatcttaattcaatgctatt

SEQ ID NO: 46136 - DNA, 944 bp, Homo sapiens
gtaagcatccaatgacactgacttttaggtcctggaaacattttgcggcctatcaacacaaattggtgagaatggggaaaagagggaaaatgtagagaaagtgactggaatgcatgctaatgattcaggttacgtttacgtcctttgagtttcatttcatcttacctataaaaccaacatagacattgaaatctagaatcctaatcataccaaagaaattatgtattctcttagtgtattgggggaagagctacgttcgggtgagcccggctagctcagtcggtagagcatgagactcttaatctcagggtcgtgggttcgagccccacgttgggcgctctggttttcaatcctaaaatgttttcaggtttctcattgcggtccaaaaaaagggcattattaaagctcatccctctggaagaagggaattgtgtgatcatcgtgaccattttagccttactgacttgactgacgcattccagccttctctgaaattctagctgaacttagtctcagtgatccctggtgtggatacacttctctggcctagaggttttgtaaaaccagatatacttaaacataggttatgtaagtcgttggtagggcatgagctcttgtatatttaacaagttcctgggctgattctaaagcacaaatcccagcaaaaaaggtttaggaggcaggaaggacccatgaccatgagttaaaaaagcataccacacacctcttcgttgatttcaaaagcccaattagccacataccttcctctcacttcactaacatagttctcatctcttcaggtctcaggacaatataaagaaaatgctctagctcaggtgtccaagactggctgtacatgtgaatcacctgaggcacttctaaaattttagattcctgggctcacaggatctgaatctccagtggtttagaaaccattgttttat

SEQ ID NO: 46137 - DNA, 1577 bp, Homo sapiens
gcactccagactgggcgacggagtaagtctgtctcaaaaaaaaaaaaaaaaaaaaaaaaggaaaagaaaaaaatttgtaatacgtcctcagtctgctgtgataaaaatgtaatacataaatgatcgaagtgtataatagatttgccaatgcacctggcagaggccaacactcagaactgaaaatagtgagagaaattcgaagtacccagctctgtctacgatagaacaatctgaggactagggaaccaccgagtagatgggttttcatgggtggtgagagaatcttgagcttgaaggaaagaccacccccattatgatacgggagtgtgttgttagctgcttatgtgtcagcaagatattcatggaaagataggagtaaaggccaaagggtaaggtgggagaggaaaccacataaaactggagaatgcgggcatcgatcccgctacctctcgcatgctaagcgagcgctctaccatttgagctaattccccgtgtgggaaaacgtctcttatatcctttaccctctttgatatctggaagtaattcaggactctcgctatttcaattgactttcgtcactagccaataggaaaaaaatgaagaactgtgtacaatggtgactaaagagcctcagcatgacttccgcccctcagcgccatctataacctgttttaccatgtcggatcccgtctggagaagcccaccgagtgcaggtgaaccagggaggcgaagtccatagaaacagctgtcttgggggtccgggaagagtttaacactggaatcacatctgcggaaaccgggaactggaagcaaattgaggatgcggccagaagggaaaatcaagtttttcaagcaatgaggttcggccttggcctaaccaatagtttctaccactctccgcacccctaaaatttccatctattcatctggttccagaaacagattatccagcgtctttgtagatctacgaatatcccttaaagtcgggtgcggtggttcacgcctgtaatcccagcattttgggaggccgaggcgggtggatcacttgagatgaggagttcgaaaccagcctgccaatatggtgaaacccctgtctccactaaaaatacaaaaaattagccgggcgtggtggcgcacacctgtaatcccagctgctcgggaggctgaagcaggagaatcgcttgaacccaggaggcagaggtcgcaatgagctgagttcgcgccactgcactccagcctgggcgaccgagtaagactccctctcaaaaaggaaaaaaaaaaaaaaaaaaacaaatccgctttttgtctggctttgtcgctgccggaggaccttgtggccacaagggggcgtgcgtcccatttgatttctttattctggtttctgtagtcctgatttcgatccaggggtgtacaaattatttttctaaggtaaatattagcaagagaagcgaatatacttatggctgcagacttagaggcagagtctttgcacaaagacaaatgctttagttgccactttttcttctgggcctattgagtaccagctactgtgccaggtgctaggtgctaggtactgt

SEQ ID NO: 46138 - DNA, 2209 bp, Homo sapiens
ccccgggctgcttccagaaagctaaccggattacttgtacgcggttcccagcactgtcctttgcagtcagcttgtcgctggcgccgatgggaagaactgaaacgcctcaagggtggggacggcgccccctgctggtcgcgccctcgggcgacgataagagactgaggacccgagcccgcgcggggaaaactgccctgagcttggcttagggatggtccgcaggccgcctggtgggagcaggaccgccgtggcccggtccgttctgcggttgcgtaggtcatagaaggaaaagtggtttgtgatctgatagggaatctgaggacagacccagggagagcagaaataagcgcgccgccggggggtcgccagaattggaggcttgtgcgcctctgacaagtatttgcaacataagtatgcatatggataatgtatcaatacacacgtgtaatagatgccaaacaaattcttcaaataattgtcacacatttaaattttcagacattcacaaaatcaaatgtaaaatattaaactgaaagttcacaacttaaattttcaaaaattaaatctaattaaatttccaaagttgaactgttttcaaaattaaattttaaaatattcaaaattccgaggtaaatttccagaaatagttaaaacctcaaaactcaaaatttttaaatgaaatttataaactttaaaaggtgagtcattcctcagctggaatcgcacccggggcccttgaataaaatgctattttgatcgctagaacacatagaaacttctctaaaattgttctgcaaaattccctaaaaagccggcatcaacccgccttttagcgtctcgacaaggcgttctatagggtaggttatatttggggatctgccttttctggttctgcctgtcctgagttggagatctgaccgggaatctgagcctaacccaagtttcccatcccgcttccacgctctgaatcaggcttccgacctgacacaccacttcctccctctcccctcggccttcccctggacccgactgtattgcccaatcatttcctttcatttgtcatcaccaccttggacccgccccctcgtctcaggccgtcgcacgcgttttgcgtcagttggcaaggcactttacggccgtcgtgccgctcgtgtcagtcaacatggaggcagaggaatcggagaaggccgcaacggagcaagagccgctggaagggacagaacagacactagatgcggaggaggagcaggaggaatccgaagaagcggcctgtggcagcaagaaacgggtagtgccaggtattgtgtacctgggccatatcccgccgcgcttccggcccctgcacgtccgcaaccttctcagcgcctatggcgaggtcggacgcgtcttctttcaggctgagggtaagtatgcaggccctgacggtgacaggaggaggttgtcgctcgctggcggggtgcaagcatgcatgtcctgttgcttcgctgcgcgaggctgaggcacgagttgctggattttgggggtggggagtgcggtgcttggctcctggctggtgaatcagtctgtgaggatgctggggtgggcgggcggaggggatatggggagagtgggtagcgcagtgtgtctggtggttctttagttctcggattgttactatttgtgttcttatcccggctctgttcacctctctttccggacctgtttactggtttgttacatgaatacaacctgagtaaaagtctcgtcagcttttctacaaaactgaacataactctttagcattgctgcctaggtcaagaaactatttgatcaaccgcccctcttctttccaccctcaattttacattgaggctgaggacttgtgccggttttaagcagcgttcagggctggccagattaaggagtggacaattaaggaaagaattgagttagctagaggaaagggtgcgatttacagttcccttcctcctgggcaaaaactcttcaggtgggactcccactggcagatgtgaagaacgttgcgggcagtgggaggtgcttttgagtgagtgctgcataggcgtcctggacgggtctttgtctttggcgcgcagaccggttcgtgagacgcaagaagaaggcagcagcagctgccggaggaaaaaagcggtcctacaccaaggactacaccgagggatgggtggagttccgtgacaagcgcatagccaag

SEQ ID NO: 46139 - DNA, 1716 bp, Homo sapiens
tgtggattctaaaaaagtcaaatacatagaagcagagtagaacagtggttaccaggggtggagacgtatggaaatggttaagatgttggtcaaaggatacaaagttgcagttctataggatgaataagtctagagatgtaatgcatagcataactatagttaatactgcattgtgcattggaaacttgcggagagtacatttcatgcgctctcaccacttacacaaaatagtaactgtgaagagatgtattatgttaattagcttgactgtagaaatcatttcactgtgtacatgtatcaaaacatcatgttgtacaccttaaatatatagtttttatttttaaaacactgtttgggattaaaagcccagctaattctgccttaatatctcattcttatccacaatgtccacccataagaaagacgcccgatactccgtgtaaacacacactccccatctcccatacaaatttaccttctagagagagcccttttccccaaactctcctctcaaaacactctgaagcacaaggtctttagcctagttagacattttctgaaaaacttagtttaactcagcgtagagacaccatgaatttcagagacccagtcctgggcctgcttcagttgctttagcctagagtttcaactcccaggtcccggggagggatgctccaaggaagaaatagaggccctattccagggctgtttctcgcagactagccacagaaaatgcagcccagcgccacttcctttcagtagcaacacgtttccaacacgtttgttaagcgggaacggaagtgagcggaaaggaatgcgtttggtaaatcccactttaaggatttcgtaatcctcccagggattcccaccacccgcactccactcgcagactgcgggccttcctccgacgctgggagaaggaccctgggagaggcaagggaagggctccggaaccagcgcagcagcgggacgctagcccgcccacacggcggccacttgaaggtcctccagggaacacctgaggcagtgggagcgtctgccctttcctaagtctccttggaaagaagtattcgctttcgtttccgcaaacaaagcatgctccgcgctttcaggaccggtggctcccgtggagaccgcagcggaacccagtccgccttcgcacgcgtccgggggagaagcggccccaggactaagggcgcgcgcccgaggaaccggtgctgtgacgaccagagcaaacacgccggatgttcctgtgtaggctgtgtaaggagtgaccggaagtagaaactgggtgctccagtggcgcaatcggttagcgcgcggtacttatatggcagtatgtgtgcgagtgatgccgaggttgtgagttcgagcctcacctggagcattgttttccaacccaaaatagcattacttgaagtgcctttccccctgtaatccgactccatcgtctttaacgtgtttggaattgtgtacacagtttattgttattggtttccttagcctttttagaaccaagcaacgccaattaccaacaaaatccgttgcgccgcagtgagttagctaccttctatctccactttgttctgcacgtcgatctcaggtaaagaacatcatctctttacatccttctttccactttgttcttaggatcatcgatcatcgttcctcggggagcccctggcacatacttagtgctaagaaactcccatcagg

SEQ ID NO: 46140 - DNA, 1529 bp, Homo sapiens
gtgcctcctatataggtaaacaataaatataattatttgttgatacatttcttagaatattaatgtaaccccaaaattactggtaggataaataagacttggatcaacagtgaacatatgctttgcatgtatgaagtttttcaatatgaccctgctaatctccaaatgcctaagggcgggcaatatccccaaagactagaacaatgcgtggccaaatatgttaaatacacacacacacacacacacacacacacacacacacacacacaaaattcccctgtgaaactggcctacatttctaaatcacaaatttagccaggtaacaacctagcttaaaattcgtggactctttctttcacttggttcttccaaaaaagtttcacactgctcatcaccggcatagtcattctagcctctaatcacacaataaaacccaccacctaattctaacccaccacctaacacttagctcaaaccctgtgctgctggggaagttcccttctcctctactccaacttcttgcttcggggcggactgtctctagtctgtctgttgtctcccctctgaatctacttgcttttcattttccttttctataagctttcttgtcaaaaggaaaaattactgattggaccaattgacgctgaacatgccttaaaaactagtaaactattccaaaaatctccgtgatgatttcatgttccgtttcttcactcctgagaaaagctgtgctcctccccttacccttgcagactatcctgcctggtggtctggcatcttcccgatgtcccgtgggctgcagagatggaatcagggggtgagggggaagcaaagcaaggcagagctgggtacagcctagaagaggttaaataaggtaactgctcgagcgaaagccatacgtactggaacgccatcgggaaccaaatttactaatatataaactcacgttagaacgccattacatggtggaaagtacacgtgacacaataggctttcaacaagttctaacaggaagtcacagcactcgacacaacggaagtatccattttcgcgccaagagccaggaagcactttctgttaacacaagtttcctgcacatccctaattttttaggcgccatattcctcactcagtactaacaaagtgtatgtggcttctccttagccagactcgattacaagcactgcatgcattactcagtgtgataagatcatgataatccctttaaaaagatcgcccgaatttaagcctggattaggaacacgtgtttacagctctaatatcgataatttaagtggctcttaaaagagcctttggggttgggctttaagacgcttacttggcaagtttacttagcgctggtgtacttggtgacggccttggtgccctcggacacggcgtgcttggccaactccccgggcagcagcaggcgcacggccgtctggatctccctggaggtgatggtcgagcgcttgttgtaatgcgccaggcgggaagcctcacccgcgatgcgttcgaagatgtcgttg

SEQ ID NO: 46141 - DNA, 1250 bp, Homo sapiens
aaaacacgaccaggaccttgactctagaggctacgttcctaaaacagcaagcggggcaggagggaagtcccacggagctttggagccacaggagaggcacttttatctccctcttctggcaaactaggtatgaaagggagaaagaaatttcactctgaggtgcgagcgccgccggacatttcctgacggctcaggtgggcaggctgagtgcgcgagcgcctcactggcttctcataggtacctgggtcaggacgaagccacatagttcctcgtgatgagaaactcacttctggcacctgtcgagatgccagattccatgccaagcccccgaagattctgactagtttggcaaaaaatgggatctggcaggtccacttcaaagcagcgccctcttccttttgttgccaaagatctgaggaccacactgctaaactgagcaagaaacatgcgtgggttggagatagaagtgagaataatgagtttacaagcacagtattaccaacccccaaaaacaaccaccacgctgggaaaattccatataatgaaacttaatgtgttacctttggcttctttgccataagcaaaatattggggacggggagtggataaggaagtaaactgggtaggtgtgtaaataaggacgaaagactgcaccattctttagatgacaaaaacagacgtttctgggaaataagcaaaggaagagccccacaagcagcggcctctggtggcgtgccgtgatcgtatagtggttagtactctgcgttgtggccgcagcaacctcggttcgaatccgagtcacggcagtaccttgatgtcgcctcaatttctcaacgtactgagcagtaccttgacgtcgcctcaatttttcaacatactggagtggagacagtctcggaaaaacccttgcaaaattgaattgacttacgatctaatctgtacacaaaaaacactagtattcatcatggtgccccaaccagtcagccaagcagagagtgtctacgcttgttgccttgtcttttttttcccctctccaaagattctcttcccaaccctacccaagccctacagtcttgttggcattggctgtatgtgaagaaactgaggtaatttttttttaatggaaaacttttactttcaaacactggtaggcatgaggaaaggactgttcaaaaggggatccaggtttgttgtggagatctttcttaaaacacaaaagacaaattattaatcacgcgtttctaagtatc

SEQ ID NO: 46142 - DNA, 911 bp, Homo sapiens
gttagtttgttttggggtgttttttgttgttgttttatctccctgtagaacataaattcaataatggaagaaaattttgctgttttattcaatgttctttctccaatacctagaaaagtacctgaaatgcagtaatgactcaacatttgtggacagaatgaatgcacgaacagagaaataaatttaaaatatgttgcgatatccaatatttcctgtagggggagatagtcaccatgaaatagaaatttcactcatttcaatttgaaataaattctgaaatcttgcattgaagaaaagtattttttttagtgttggaattgctgctttgttgctggttcagaaacacagatgtgctttctttgtcacaaaattaagtacacttttgtcaaattgatacattttacaaaaatgttataaatacgatatatctgaacatatgcccaacaggggccctgtggcttagctggtcaaagcgcctgtctagtaaacaggagatcctgggttcgaatcccagcggggccttacgtgttcaattttatattttcaatagtatgttgcaaatacatatgttgaaaatgcattaaggaatttataggttgtgaaatccgtattgagcgattagcacaattatggagagtcccttgcaggtaactgcatcacaatatgaaagggttgggatgaagggaaaaattaataaagtttctgttggtaaaaagcaatgggtttgctgatgacaggtaagactggggatatacaagttgtacaaaaaaaaaatcttgtaatacatagtagagagtaacatttcaaattctgttgtagacgttcagtctccagcctcttaaccttgatagccatcattttcagctacatgatagattttgattatcagtgtcaggcaaataattaataag

SEQ ID NO: 46143 - DNA, 1830 bp, Homo sapiens
tgtctcaaaaacaaacaaaacaaacaaataagaaaaaccttttcatcctaactcgtatattatttcttcaaaagaataaaaaacgtgcaaatctaatgcttgtctagctattgcgaccacatttacaaatggataggcagcgctccggagttggatgtaagacggtagtatacaatccaggtgtggtcgatttaagaaaaaaaaaaaagaaaaaagaaaaaaattcctgtctagctagtgcaactacatttataaatggataggcgaggctacggagttcgatgtaaaaccgaagtttacaagcgaggtgtggtcggtgtaaaataaaaacgaaaaagaagaaaaaaaaaaaaaacaaacccacggaagtggcccgtacggggatcgaacccgcgaccttggcgttattagcaccacgctctaaccaactgagctaaccggcctccttggtgggagggtcttttcttatgtttatttaaatcatacctgatccatgcccgctgaatttttttttttttgtaatagaagcgttactttcccttttattaataaaatatatttttttttaagaaaaggagaattcctcactgtaggcacaggaaaaccatgctgtttcagggaaaacaatctcaaaccactgattctgactggagaaaactcagattcaacgaccccaagcagggcttccttcccctcaccaggtgaaggactcagaacaaaccaaaaagcagctccaagcttgcgatcgcggccagttcctcacggaaccaaccgcagagccgccgcaggttcgcaggatcggagggttcggaggactcggagggtgcggattcctctctgctccttgagaccattccagccaggtgggctcttaggcctgggaacctgggaaagtgcactgtctcgcctcctggcctcgcggtggttccgcagtcaccaggacccgaaattcacagctgtgcgtcctaagcttgcagctccacaaacgataaaatcagacttggccctgcagtgccgggcaccgggcccttggtgatgctcgagtgccgggctggcatcggcgtaaatgaaaggaccagcgggacggctcctttcaagagtctctgactccttccgtcccgggaagaccaagacacccacatctaagacaagggaagtcaccattatctacaccaatgataaacgccggtatctgggaggaactgagcccaggaccgggtcaggcaactcagagtgttgggacaactaagtccctcttcaaagactcaactttcttgtcataagttgcaaaagttgtacgtcaatcctgcctgccccccgccccccaccacacacatacactcctttttttcgcaaatccagggtttaccctatttgccaaagtttaagtcttagccaatcgggatcagcttagattgtgcggtccaaccccagccaataggggaaggacacagaaacaggaactgcgttaggattaaaaactccttacctcctttgtttggtgtgctcttgcaattgtaacaggcaaggagcacccttctgcagaagtaaagatgccttgctgaggaattttctaagtgagggtttcttttggctacaccaagcacttgtttccagtaaatcttagggactcgtccgggatcccattctccttcgggaggggctagcgattatctttcatggggagacgcgtcccattgcctcgtggtggccccaggagcggaggatcgagtcccgcccgaagtgacgaataaatccggactctcagcaacgcggacagtagggaggatccttaagaattctgtgagaccagcttggtcaatacggtga

SEQ ID NO: 46144 - DNA, 1367 bp, Homo sapiens
ctccctttcaccatttcgccctaaatgtctgctttttggatctaagtgattgtactcaataaatagtgtggagaccagagctgggcgccttttgcagcctccattttgcaattggccccctggcccccactctttatacactcttaacctgtctcttctcattcctttgtcgccaccggactttaggtaccctaagggtggtattgaggctggtccccaacattctggtgcccaacgtggggctcgaaagaatctgatgaaggaatgctcgagcgtgtgaaacggagggctgatggacgaaggactcccgaggacgaaaaagtttttaagctctgcaggtaagcagggcacttggagaaagccagggacacaatggggaaaactgaaagtaagtacaccacgtatttgagcttgctagggcggctgttgaagcgtgatggcgtaaaagttggtacaaaaaatcgtatgaattaatttcatgctgtagaacaattttgcccttggttccctgaacagggaactttgaaattaagagattgggaaagagttggaaaggacctttaaaaagcacgtagagaaggaaaggaaattcgtttgcctgtttggtcagtttggtcattggtgcgtgccgcactggagccatttcagacaaatgatgaggctgagtcagaggaggagaaggaggagtttgataatcaggactctgaaacgcctctaccgagtactagccaaaaggagagtccggaagtaatttatgccaatccccccagtcttcctaaacctattcagaaactcattcagctcagggttcctcaagaggaatgtccggaatggccacctcctcctcagccgagtgagtgcaggcggagggagcctgagactccgctgccgagactcggctggccgcgctcattattgcccgacccgcagttcattatggagagggggtaattcaggttcgccctgcagttcattacagtgaaggagcaatttcccttaaaatggatgacccagcgccctgtctgggtcgaacagtggcctaaggaaaaattgggggcgctttatgaaatagttaaagaactactagaaaaaggatatatttcacccactttctctccttagaattccccaatagttgtaattaagaaaaagtccggtagatggcacatgctgaccgacttgcgagtggccaacgctgtaattcaaccgatgggagccttacaacctgggctcccatcccccactatgctccttaaagactggctgctcattattatagatttaaaagactgccttgttttacaattcttttagcagaggcagatttcgaaaaatttgcctttactgtccctgccattaaaaacaaa

SEQ ID NO: 46145 - DNA, 651 bp, Homo sapiens
tcgttcaagttgcctgcgaaccaagtccttgaggtctttgtggggatcaggcgatgagagcatcaattataataataataatttgttcggcaaaaaattgctcgggtctgttcatgtccacccgagtagccacggacacttggctttgaagagggctttttccttgtcgaaaacaggaagggctctggtgggagaaaggcggcaggtgtacttcggtttatatgcacaccacaggtgacaaggagaaccttctctcctaaacggctaaagatggtgcgggggtgcaattctaaaaacgtgcactgagaaattcagctaaggattcctcaaaaatacaggttgcttctgcccggtttcgaaccggggacctttcgcgtgtgaggcgaacgtgataaccactacactacagaagccctgacatttgatagtttttctcctaggagaagaagaaaatttttctggatatcccagatttggtaacatcgaattgatcttttctttcaggaaattatcaaggttgataagctttcctatttattaaaatcagtaatatcggagttcacgagtcatacaaagaaaatactgcgacttggggaaaattttcttttcaaacacagcacagaaattttacacagccccccagtagaggac

SEQ ID NO: 46146 - DNA, 760 bp, Homo sapiens
tttaacaagctcacttggtgatttatttgtgtacgctatttaaaactctgtgaaccaccggtctaggctatactttgcagtgtattaaggtggtcttcggcacctctcgcagacccccttcctcttgcctctagcgccaacctctcagcctctcgcataccaggggaggggctttgcaaaaccttccacgaaagtgaatcccagcacagccctgctgtagctggctctcaggcgcaagcgcagagctgcgaccgctgctgatacgttgctcagtctcagtgtggtctctgttttgcaactggtcgtccgcgtcaggagacttaggtccaggcgactgcccagacaatgactggtcccgcataccgagcagagcatgatcagcagcagtctgagtggaagagtgcctgtgatcttagggaacctgatgggcgttggagcagcggttcgacgcatgggtttctctttaatccttccgacttccccaagcccagcgcactcaggttccgctccaagtgcgggacccgcccggggtgtgtcgggggtactcggccggaggcggccggtgagtgaggcttacagggccccgggaccaaggtgggtgctcttagaggttctggaaagcggaaacacgggttcttcgaaggaaacgggcgaaagggtcgcgtgtggtttggctgcaggtcgggtcaggaggcacctccacggttgggacgccgcgtggcgtggggtcatgaagcccccagcgctcgtctcactggcg

SEQ ID NO: 46147 - DNA, 1393 bp, Homo sapiens
cctctggaacttgaacaccagggttcgccaggcagcgttccttcagctggtatctcggtctaggactcagatgtctaactccccttgcagggaatctgcaacacgctgaggttgtctaccctaaaagacacaggatggcgtcagcagcatacgtcacacaatcacacatcagagtcttgcaaagtgaccaagaggtgctacacaagagaagtgccccaagagagcactagagaggtgtgtggcactccgatgaacaaaacagagtggagatcgggtacgcgggttctgcttcagatccaaaaaacccttggtgcccaccctagaatctggccggggcatccacagacctggtgtgttccctctgtgcacacttgtgactcacacccctgcgagctcggataacacgaagacacacctgttgcagagcgttaaagctggaaggtggacaaacagggcggggcccggcacccgacttccccttaggccagaacaaaagaacaaagccctccaagggatcagggcgggaccgccccgcacagaaggaggcgaggtgcgcccccttcgaggactccccagctttctcctgcagaggcctctaagcgcgaaatcagaagggtgacgtcacgagtccggagggctggctgttgccatggtgatacctgagctcccctccccctatagcgatccacacactctgatcccgggtccggaagcgcattgaccgccaccagacctaacgcagggagccgaagcaactggacttccagcgcgccaacctctttccacgcctacaaccggcttcaacggtcacttccggtcgttacgagcgagccccgccccgcacgccggcgccgggcgggcacactggaccagcgttcccagaacactccgcgaaggtgttcctgaacttcatttcccagaggctttagctaacgtgtactttcgccctgcgatgggccgcacattttcgccgccagtcttttgctcctgtttcaggtatgcgtgtgcattgtaaacttgtctgactgaactgattataagaaatgcacgtctactgaccgagcgcagtggctcacgtctgtaatctgagcactttgggaggccgaggtgggtggatcactaggtcaggagttcgagactcagcctggccaatatggtgacaccccgtctctactaaaaatacaaaaattagccgggcgtggtggcgcgcgcctgtagctactcaggaggcagaggcagaagaatcgcttgaacccgggaggaagaggttgcagtcagccgagatcgcgccactgcactccagcctgggcggcagagcgagactccgtctcaaaaaaacaaaacaacaaaaaaaaaaaaaagaaagaaagaaaagaaaaaaaagaaatacacg

SEQ ID NO: 46148 - DNA, 1553 bp, Homo sapiens
agtttcaaacaaaaactaaatgtgtcaggcccagatttacggtgagggtctgattccacttccttgcggggtcagtttgggtccaggtgagagaggtacagtggtctctagttttctggaaacggtactgctgatagggcaaggactccttgcggctgccccagagaggttggcttgtcttatccaacttgcacttcacgttagagtttctaatgaactcgcagactccagtttcttgcccaggaaaccatttttaccgtattttgttcttttgaccgtttcttgtcagttagctggtgtaaattctgtttaaagatgtgaagggagccttctccattcgtgtagtcgtggccgagtggttaaggcgatggactagaaatccattggggtctccccgcgcaggttcgaatcctgccgactacgggatgttttactgagaacagttcagcgaggaaataggatctcacatttgctttcagtttgggagtaaagaaactcgtgatagagcctctgcgtgtcacctaacatagcctgaacttttgccgacttcgggatgttttactgagaacagttcagagaggaaatacgatgtcatatttgctttcagtttgggagtaaaggaactcgtaatagagcttctgcgtgccacttaacgcagcctgaacttttgccgacttcgggatgttttactgagaacagagaggaatcgtatttacttcagagaggaaatacgatgtcatatttgctttcagtttgggggcgagggaactcgtgataaagcttctgcgtgccacttgacgcatcctgaactttaaaaatacatctgcagactctttatctattttacctcaacggagcgcaggtattggtcccacctctgcttttcctgtctttgaaaccaaccgatgcacctttcgggatttgtaactcctatgttagctagggctccaaccatggttgaacatagacggaaaccagtgcgtcacaaaggaggctagcgagagttcttttttaaaagggtctgacaaagcgtccgaggaatgaaggaggaactggagaggattcgcggttgggcggagacacgttcgctgaattgccttgcgtatatttggtaggggaaacgtgtgactacagagcaaagaaagatggacaatagcgagtaacttcacagggatttcctaagagctccattttcacgtcaattcctcgttagtatagtggtgagtatccccgcctgtcacgcgggagaccggggttcgattccccgacggggaggaggcttaaacttttttttagaaaagcacacttccggtaaacacagtctctagtcttctgggcaaatgttgggttctctttttctttagcagagttctttcaaaccaacgaaatactgatcgcaaaaaccataagctgtagaaatcatgaggttctgtaatagcaagaaaatttccactctgcactgtaatctccatcacagtggagaaaccgggtagataccatcttacccaagtgattgaatcagtattgggacgaatctacattatatacctttt

SEQ ID NO: 46149 - DNA, 745 bp, Homo sapiens
ctatggcgagtacagaagcctggccggtcccggggcaggcaggcgctcgctggatgttattcgactgactggatatttgctggaaacgttaatgcttgtgcgatgaggactctctctaattgcagggcgctcaattaccaaggatagcctgacttcctttcctagaattctcatttcaccttagcatttccaaaaaaactcaccaaagacagaagtttgcacacgtcacctgacacgtcatttcaccaatctatcaaagggtgaagttccacagctgtagtcgtggccgagtggttaaggcgatggactagaaatccattggggtctccccgcgcaggttcgaatcctgccgactacggggtggtttttgctcccagtgagctaacttaacccatctgtttggcagtgtgaaattacctaacaaggaaatccttaccacccatttcttaccacaagggtgcaaacttcttgacttgacttgtccagatgcctcgctcattcaaacctctactgccactgggttcccagcgtgccagtgatcccaacattacttcttatttgcctaaaaataagcaatattctctatgagcaaaacgcaggttttggcgatgctgcctcatttcctgtcttcgaaccccctgcctcgaatttccctcacggaattgcgcccgggaagaaaacgaatgtttatattcataaggtgtctctcatctttgtgttcacaaatatgtctcacttggagaag

SEQ ID NO: 46150 - DNA, 1417 bp, Homo sapiens
ttagggtctcagtccacttgttaattagcaaagtttagttccagttgcagagactccactgccagagctcagaccacagcctacttccgggcgccgacgggagctcgctcactgtttactaacgtgaagtttgtattctttgtttggaacgctgatgatgctcatcctcacgcgggagtactctcattccagtgctcttgtccaggtggcacaggaggttggctttttttgcttttttttttttaaccaaactctcgttgtacctgaaagtttgcgttcaactcacaaagcccattttcttgtacctagatagtaattatcctgatttgcattttctcatgtctataccgtgaaaaaaaacgttgtgattctgtgtagtcgtggccgagtggttaaggcgatggactagaaatccattggggtctccccgcgcaggttcgaatcctgccgactacgagttcgaggttttagataattaacaacagaaaatttagaagaaagaaatttaagccaactcacgtgttgcgaactgaatttgtttggtacttccccgatcctgaaaccccacaacaatggagggtggaagttactgaatacctactattttcataagattatgggtaccttaattagcagatacctagtcattttcccgttagcggtacctttgtacggttcttggggacgcctctcgtttccctgccttccaaaccctcctgaagcctatacctgttacaagtcttgatagtgctttcctcttcatggaaatttagtcctagtcagaggtccaagtctttggtcaattatcagtttctgtggaatcaatggttcaactgctttggtcacccggtctcgctggttgcaaatgactagaaacactgtcagagatctcgacaccaccacaatcgaaagaccaggctgtcctgacagaccccgtcgttttggcttaggcggcagattaaagtgtaaattcgccaagtataatcaatttagtagaatacaaacttacagacttaaaaaagtgggcaagaatacttaagtttattagaggtagtcaaaactcgctgacgcagagttcttcctcgttagtatagtggtgagtatccccgcctgtcacgcgggagaccggggttcgattccccgacggggagaaaagttgctttttgcatcttctgcccactgatggcccctacctggctctgagagcagagctgcggtgggacccctctgccattcctccttaactgccaatggaccctctcgactttcctcactcctaagaccgctgctctgatcagagaaacattccagtcaattctgaaacctcaaagtcacagttactttaaggcccataggagaatctaggtttaaatgacacaaaatgtactcattaaaagttaacgagaatacagttgtc

SEQ ID NO: 46151 - DNA, 815 bp, Homo sapiens
cttgttgctgttgaatgacagtccctaaacttgggctaacaaaacacttaatacactataggcaaaatcttcacacaccagacaagcaacttagacttatctacagagaaaactcgatggagtctgacttcgattctcagagcttgtaggtgaggaaaagagaattgccttcctcaaatcaggattaacgttaggtggtgtttacaccacagcaatagattctctcttactcgagacacggttgtctcggatgttggaggaggaggaaagtaatggactcagagaaagaggtaaactacaacgcagggttaataatgatgatgacagctagaatgcagagttcaacgcagtgttaccaaaggagatgacacaattgtaatccaggagactcagttgcctttggggtgcaattagaaggaaactatttgggagaagtcaggctaaaaccaaaccgtagccgacaggattcgaacctgcgcggggaaaccccaatggatttcaagtccatcgccttaaccactcggccacgactacgcacctgtgtagtgctcttggtttaagcttttgaagatgtgagcagtgtgccattcttgggtagtatggtaagtagatactacagtaaaagatgttttggtgcctggttactaagtctagtaacaaagaattttctaggtgcattaagagcttccagcttttagatgaaataagtcatccatactgaattggaattcagttgagaaaagtggagttcaaaggagcattctgagacaagagacttggattttctctccccctagaactccacttgctagtca

SEQ ID NO: 46152 - DNA, 1605 bp, Homo sapiens
acatggaccttcagtttttcaaaagcctccagtgggctagatttttattgaaaatgcttaggatcctcatgcttcttgttcccgaggctcctggaaaccacctttagttatcccgtttggtaagagggtttcattctgtcttgctttctggtagtgagtggatcagaaagtcatagggctgggagaagatggactggatgagatatgtacggatattctctttgccactgtacagcggccattgcagctcctgccgcagagcccacggccctacgggcgggacccattttaacctggtagtgacagtgccgcctcattgaagcaggaaggatttttgtccatgacactagacgtctctaagcaataaagtaattttggcagatgccgatacctctcatgtgatcttgttgggaaggttcagatcctatcacctgagattatttactcttaaagaccctctgcctccttcctcagcctttctgtttgacaacataagatcgcttttatctcctgcaatgaacactcctagacaagtcatgtccgggtcttggtatcagtaaatttttactgctgaatattttgggagaggttctcagttaatcccattgagaaagaccaagttaaagctttatcagtgagaaactaattacaaaatcctgccttgcaaatattcgagcttttaacagtgctttactctttggtatccacgaggtggagccttcccgggaagcagaaagcatcttttggtgtcctgttttttgttttttaccctcggcaacgccacgggtgccaggactagttgacacgccgcctcaatttaagtcatccataatttatacgttacgaaatggaactttcaaaagtgttcctagcgttaggagcaaagaacgccggacaaacgctcgggaggcggcgagcctcgcggttcttccaacaacgcaatctgtcagcgcggctaggttggtgccctctccccctgtatcggggcagcccggcttagggccgcagaaccgaggctggggagccccgcaggctgttgctaagagtccaggggaggcacggacttaccttatctgcccctggaaacagatttgctcttggatcttgcacgaagagccctgtgagaaacgaaaagggaacttgtgtgatggcggcagataacgaacattagggtagaaacttaggttcttaaagggaagacagcttgagttcggaaatgaagatatattccttcaggaaggcctgttaaaaacacgagctattgcgaggttccatggtgtaatggttagcactctggactctgaatccagcgatccgagttcaaatctcggtggaacctgtcgtttcttcttgcttcctcactatttttttctttctaaaataaatttccctcttagatatgattggcaggaatctccagttcatgtgaacccaaagtatgacgcggactctgtacggggcccactgactctctgctctatgttcagagcaggagaccctcatacctccttcattttactaccctcctcaccaccacctaacagatattctaatacccaaaataattcgagttgagttaaactttttacttgatttattgcttta

SEQ ID NO: 46153 - DNA, 577 bp, Homo sapiens
aatgagccatttcaagggagttttaaaatggtccatttcccagtcattccatcaccagtttattatttttatatcatgtccttttcctcttctcttgaaatcttggggatacgtttcaaataatattgggaaagcataatttagtgaagaaagcgatgcatttgtctgtttcggcctttgtgatatttccttctcctcacaaaatgttcccaaatgggatgggtttagacctaactgaagtaaaacttctgaagttcgcctgaacagggacttgaaccctggaccctcagattaaaagtctgatgctctaccgactgagctatccaggctctctacactgggctctaactcactaagaagtgctaataaggctcatgatttcagtaattattaggttcttccaagcgttctggtcatatacctgtgcctcagcactgcagccgagctttattatattgaacattcatttcaacctcaaactgtttattcgttaaatataaaattattgtgtagtatttattacaggggaaatgacgaagaaaatcgggctcagaatagagtgggaccccttcggtag

SEQ ID NO: 46154 - DNA, 839 bp, Homo sapiens
ggtaaagaaagattgttatgtcacaagggaagcagttcaattcccgttgtttcctccggtgttttcctagctctttaagagatgaagtttcctggaatcgtaatgccagagcaacacacaagtgacacccgcttctgtctggggaattaccttcttcaaaacacacgtcaaaattttataatatctttttcccggtcgcccaacctagtcttcatctttcgctctctttttcttcacctcttcctcagtctttcccttcttcacaccggtctctgctcctctaccgccttatttttcagacctcccatttgcagattcactcatttctccgcttatgcttccgttctttgaaagtgaaccactaggtttcagaaagcaccaggcagttaaaacagagtttactccctcggtcactgtaggtcttcagtcattcatgagaggtgttaaagcacctctaacaagtgcaagatgcagtgttttggaggaaaaaaacaggcacctagcagaggatggtttcgatccatcgacctctgggttatgggcccagcacgcttccgctgcgccactctgctgtccccttcagctgttgtgccttatctccaagtaacttaaacatctcctaacaccgctgtccagctgcgtcaatatttttttcttccttatccatttatcttctctagtctctgtctttcatcctcgagttgtctcacgtttccttctcaacatagtcacctacaacttgttgtttgctcctttgcaacttaagaaaaccgattgaaatcctttctcaggaacttgattttcaaaccgttaggctctcatacaccgacttctagggt

SEQ ID NO: 46155 - DNA, 792 bp, Homo sapiens
acaaaaataaaataaaaagaggaggttcccttcactcaccattgaaaatcctattacagcgctttttccacatcctctgtcaaaaatttctccgtgaattttctagtctggctcagagttaaaatagtttggacttccttgctaaagtctgtaaatatagtctcaaaggtctcttgaaaggagtaagaaagaaaaaagttctgttttatttagaaaaacaaaaatatcaacgaatttatatatggtttcctttaaaacagcagcgcattcgtgtggccggttagctcagtcggctagagcgtggtgctaataacgccaaggtcgcgggttcgatccccgtacgggccactggatgccatagtggggcccttcacttacctgaagggaggccttttaatttaagcctgtcgaatcacaggtgctccgaatcgaatcccaggtgctctgaatccgaaattaagacgccctcttattcgtcaagcgagaaggctatttacgttcgtttccctttattgtgaaaaatgaaaagaacaggccgggcacggtggctcgaatctgtaatcccagcactttggggggccgaggcggggtgatcatttgaggtcgggaattggagaccagcctgaccaatatggtgaaaccccgtctctattaaaaatacaaaataagctgggctcatgcctgtaatcccagctactagggaggctgaggcaggagaatcacttgagcccgggaggcggaggttgcggtgagctgaggccgtgccatagtaccccagcctgggcctgggca

SEQ ID NO: 46156 - DNA, 757 bp, Homo sapiens
ggattataggggcctgccaccaagcccggctaactgttgtatttttagtagaggcggggttttgccatattggctagggtggtctggaactcctgacctcaggtgatccgcaagcctcggcctcccaaagtgctgggattaaaggcgacagccacctcgcccggccaaaagggcctatttctaaagctgttgaatctgcatcacttgctctcgaacggtaggacaaaggagcaaacctcagctatgctaggctacctagccttacaataggacaaatattgtgtcttaaagttatcatgaattaggaatgcttgccatgaaactgttggcatttcccgcttctcgcctaatgtacctcctgttttctagcaaggcttttaaaagcctgagtattacagcatttattgggtgtaaattcagttgcaccgggtgaaattacaaaatgtgtaaggtacagaaatcaaggccccgctgggattcgaacccaggatctcctgtttactagacaggcgctttaaccagctaagccacggagccacagccgagaaagccctcgatcgtatactacttgaaaactatttcacacttccgtaatttgcaacaatcccagcaactagtttgttaggtgacttcacaacaaaaatagacattcaggtctcagtgaaaaccaaataattttattttgaaaggattaattcataggctggattgaaatgactatttccccttgaaaagttgtcccggcccggcgcggtgg

SEQ ID NO: 46157 - DNA, 846 bp, Homo sapiens
attcgccccaggcaggaggaaggaagccccgattggaaacgttgacttgaatcttctcggatcagaattagcaggttaagaaaaactgtttccccgtaagaagcagggttctttggtgttcaatgtggagctccgccactcccagcccgggtgaaggaaaactgggaaacagaatgaatgtgattatctattcgaagataaatttccacaaagcatgccgtttgatagtagcttataatgtggaagtaaggcatcctgtcatccggccggttagctcagttggttagagcgtggtgctaataacgccaaggtcgcgggttcgatccccgtactggccaagtattctctgtggcttttatcaccagaatggatagtaacccagacatcgatctaaacgtgtacctgtgtgtttctccaggcttaactttgccccgagaaaacggatctgtgaatttggtgcgccctcgcttactcgacagcggttaatttgaacggggacgtttctttccgctgcctccaaggcatacccacatcctacccgtaaaacaaaggggctataggcaccttacagtgacagaggtacgttacggttggaggcttttgtgatttttgtcctcctctgccccggggaaattttcttggagtaaaatactgaattatttgattacttccaaaaaaaaaaaaaaaaacgcatgtaaaaccacccaccgtttgtatcactcatgctgggtcattccgttttcttcatttcagtctaagagaaaacaagattataaagtgagaaagaaaaattttcaaaaacttcaacgataacaatgacaaagatctttgttttatatactctga

SEQ ID NO: 46158 - DNA, 1614 bp, Homo sapiens
cttccccaccagggctgagatccagacctgcatccaggttgggagggtagaaaaaaagtgctccagcggaaggtgcaggtcatgtgccatctagagtaccaaagaaaaatgttcatggggaagtctgttaccagagatgctctaaaggaggttcccccaaagtactgctggccaccatgcactgcaggaggttcctactaggtaaactgctcaggctgtgggagccaggccactgtgcacagtaacgccaagagattatttcctccagcaatgtctctccatcgccctctattgacaaaatttaatattgagctaaactgcgacagaaaatatttaaagggcccagctccgttccattgttatggagcaaggaaaagtgattttgctgctgagaggtaataaatagataaccggacagaagagaaaatgctgactttctttggactggttcgaattcaaacacacttttatatccttgtccaagtgcacaatccatggtgaaagtttaagagctgtcaaaaagtttgttttggccgggcgcggaggctcacgcctgtaatcccagcactgtgggaggccgaagcgggtgggttacctgaggtcaggagttcgagacaagcctggccaacatggcgaaaccccatctctactaaaaatacaaaaattagcggagcgtggtggtaatcccacctactcgggaggctgagggaggagaatcgcttgaacccgggaggcgggggttgcagtgagccgagatcgtgccactgcactccagcctggcaacaacagcgaaactctgtctcaaaaaaaaaaaaaaaaaaaagtgtttcctctctgtgcttcagcaaaaaaagagcaaatccaattccccgaagggctcaaagcgaagcgctcttccttagaaatccccgaggaaaccccctccacgaaaaacccgcaagtgctgctctctggattccaagaaagcctgtctcacctgcgaggtgcaggcgggtggagttctgggactccggtgcctattgggattgacaccaccggggtcactcagacggagatcagaaaaggaggatgagggtgagggttcggcgtggggtagagaaaggtgtgacgcgggattcagcgccacgtcgctgggtgacggaaggagtacagaagttgagggttcacgtgctcggcaaaaagcaaagattctattggttcaaatgaaaatactcaaaaacagaattagcgatagaaaaaaaagcgactctctttgtttccgcccggtttcgaaccggggacctttcgcgtgttaggcgaacgtgataaccactacactacggaaaccaacggttacaaagcttcttctttttgacctaaaagactagtcctgaattctccccctttccctccacccccacctccgatttttttttgattatggtgaattacacactttcacatttactatttataatataaaaactcgatgtcctaatttaagttgaggaacatttgataaataatcggtttgtacttttttgtataataaactatatttcccagtagttacttatacaaagaggcatagaattaatttgggaaaggtaatttgttaagatttatgcatctatg

SEQ ID NO: 46159 - DNA, 2344 bp, Homo sapiens
taatttttagcccctaccagtaattatctgtattttaagtgtttttcctctggctttagttgtttttaaatttaatggtggtattatgtaatcaataaaaattaagtatataatatttgataagtacttataaatatataaaaaataaaattgtgttgaaaatatatcatttataatgccttacaaaaaaaaaaaaagaaaatacatcatttaacaaaagggataaatcttcccacacaccatttaactcgtgtgtttgtgaataaaagctccaggatggaatgagaaaggtgtgtagaaattgcatgattgcctttatatcacagagaagtcatacgactgaaacttgaaacagcagactgggtcccaccgagatttgaactcggatcgctggattcagagtccagagtgctgaccattacaccatggggccaagttcttagcgattttccctgaattctttcatgacctagttcttcctttctaaagtctgatgtggttttccaatgtcagcacaccccacccttcgcaccccagacctttccttccagggggttcagaaacttggtgccccctcgggcttctgtttcttcactggaaaaaaagtgaagtcgtcgaacaaaaccgagcccttatcgtgtgccaggttttgtgactagtgttctgtattgttacctcatggaacgctcacagtaacctggtgagatgcgaactattgtctttattttacaggtgaggagcctgtgagagacctgagatcttttattctgctttgtgatcagatcctattgctttcacaaaaaaacgtcgtttattaggggtggtgtatggcgcgtttgaggacgtgcgtggaaagattttcccaagttgcagaggagacgttggtgtttacggaaaactgaaataagtgaacttgcaagacaagactggaggaaaatcccagcattcctgggagctcaactgagggggcgaagggaaggggaaaaggaatgcccctcgggagtttcccgggatagcgcgcggccccacgggcttcctactgccggctcaccaacgggaaatatgcgcaggggagactcccaaacggacacaaaaaagattcctcatccctgcttctcataccccctttttcgcacatacacag[450 bp omitted]tttatcaggattcctgctggatttctttgcaacggaatttttgcaactggctgtcattaggcaaaatctttaaattcagtgttttctggaaagctgggttgggagtgttcctcaatcttagactaggtctatgagaaacaaattcaccgtccaaacccaaagaatggactcagagacccggagaacagcaaaagtgagagtttaacgacgatcttgcaagatcggttgtctgatgagcgggcacacccagcacactttgaacaaccgatttatcccgtggtgcgcaggtccctccccgggttcctcacagggtgagtactatggggtcacaaccttcccggatgtcgcctattgattgttggttagaggctttaggtgtttctttagggttgtcttgctgcattttgttgcagcccacaatgcattgcaatcctagttagctcgggggctctttaagtatttgacttatgacctaagtagctgggcaggctgataagaacagacaaaacgagcaatgttgcaggctagtaaactttcatcttagactgaactttggttcgggtgagggcgactaagaggcggggaaagagaggcgagccgataagcaggcatcgctatccaagcaggggcctagtgtatcctgtttcttctataatttgcttacctaagacgatttaaggcactttgtcttggaaatggaccactgtatacatgatttcctttaggtcgaggatggtcaaggacagtcct

SEQ ID NO: 46160 - DNA, 757 bp, Homo sapiens
ttatgcacacatacatgcctttctaggaatcaagacatggggagacatttcagacaggcgcctctgtcccatctgtgtctgggaacaggttacagaattagggagttgttcctggtagtgttgattgtgcacatgggctttgcttccacaggtggtctcacacttctgaggactgacatagatactactgctaagaagatactatgatgtatggtggactggattacaaggaatcactctagttttaagagacaagataactggcagaagtgggaaaaaaaaaaaaaaaagagccaagaaggtcccaccgagatttgaactcggatcgctggattcaaagtccagagtgctaaccattacaccatggggccacctataagcctgcttatgaagtttttcttctgacaaatatttatccctgagtcactagctcttaactgctaagtatgaaataatgggtttttaaacaaaactgtactgccctctacaggagtattttggaaatgcctgggtgttttgcttgtttcaatgactggggcacaactggctttcacaggtcagaaccagagatactgggaatcttgcaatgctcaggacaatactgcataaagaattaaccataggagtgcacaatttttgcaaaacgaccttggatctttcatctaggttttctggggccttttctaatagtaaaatccgtgcttccatccttgtttgtactctcccactgaatcatcctctcacatacaattacaat

SEQ ID NO: 46161 - DNA, 691 bp, Homo sapiens
atctacgaggagactcgcggggtgctgaaggtgttcctggagaacgtgatccgggacgccgtgacctatacagagcacgccaagcgcaagacggtcaccgccatggatgtggtctacgcgctcaagcgccagggccgcaccctctacggtttcggtggttgagcgtccctttctatcaataaaaggcccttttcagggccaccctactttctcagctgaagagtggtaacactgaggagtggttttggtaggtacggaattttgcttggttctgagtcagttctggggggaacagttttttgaacacagcggcacacgtgtggccattcacccggggtcactgtaggcaggactaattacgagatgtaatgtctaaacttgctcaaaattcgtaagcttgtttacgtaatggagaaaatactcgtacacagaatgtgcagtaccagaaacgtttatgtaacccccgtagtgagcttgacagtggtaatcggaaatcgtttttgaaaagcctccaaatccacaagtatttgtgggttttttttgtttcgtctttgtctgcgagttggagtgcagcggcgcgatctcggctcactgcaacttccgcctcctgggttcaagcgattctcctgcctcagcctgccgagtagctgggattacagttttgcgccactacacccagctaatttttgta

SEQ ID NO: 46162 - DNA, 1776 bp, Homo sapiens
ataggccagaatggtctccaactcctggcctaaagctgtctgccagccttggcctcccaaagtgctgggattacaggcatgagctactgcatcgggcccagagagcaaccttttctaacagccacattttagtactctagattcagccaggagttgtgtaattaaacctttgtctattatgaaatcataggaaatacctgtgtcaagtgcattttttcacacaatttttgcaaatggagacatcttcattattcctatagtatcatatgtttttaaagtttgtactcacactttgggtgataaatgaaggacaagatccttccctatccttgtgaggatgactacagcatgactggatgggcttgctatgatttttatctttccctgtgttctcactaccgttttattaatctcagttctttttcacagggtagcacagaatttaactagcagaaagagatccagccatgtagaccagagatttgtctaagtgacggcatgtaagaatcaggaaggaaagttttttgtttaaataccaacaggttccttccttaaagcaattattatttttcaaatctaacccacaaggtgatagtatccttaaaccaattaaatcagaatctcgggttggataacctcaaatatgacttattagcacttcccattaatcactggtccttcaggcctttaagtttacttactaggaatctcacttttaataccatcttatcaacttcagttgtaaataagagaacactcaaaggctgaggaattctcagcggtaaagctctgcccacgttaagtaacaaaggataagttagtctttgttgtgatcactttgttgtactgataagctacgtatttctactcaaggattcaaattctcacctttctcaagaattgggccaaaaccgataaactaaacttatttacggtccactgattaaaggttgttgcataataagttcttgctatgttcagcagttggattcacagcgccagaaacctataactgcttgactttcctccccactacactgcgaaaattgccccttaaatgtaactaaccctaaaacctcaacagtatcgtggccaggcgtggtggctcactactgtaataccaacattaggcataggcgaggggattgaggccaggatatcgaaactagcctgggaaacacacggagacccggtctttggaaaaataattagccttgcgtggtggtgggcgcgaggttccggctaatcgggaggctacagtgagccatgatgacactgcactacagtctgcgcgacggcccatgtcagtaagctctggagcacctgaaacaagttgtgttgggtattttatttactggagagcgattagtgactgatgcctacttacagcgactagagacgcatgctccgatagcagcacaaactcagcaggcgcgaacaaatggtaaagagaaactgggcaaacaagcatcacggctcctcagctgagaaagtgggggccctaaaaagggccttttgttgatagaaagggacgctcaaccaccgaaaccgtagagggtgcggccctggcgcttgagcgcgtagaccacatccatggcggtgaccgtcttgcgcttggcgtgctctgtataggtcacggcgtcccggatcacgttctccaggaacaccttcagcaccccgcgagtctcctcgtagatgaggccggagatgcgcttcacgccgccgcggcgagcaaggcgccggatggccggcttggtgatgccctggatattgtcg

SEQ ID NO: 46163 - DNA, 3021 bp, Homo sapiens
ggtgatctgagaaggaaaggagtgatcttggtgaaagaaaggaagcaggaaaaactgacaggaacaggagtatatgaccatgatataataaaaaacctgacttacaatgtccttcattcatactgtttttaaataacacgttctaaagtaatctcacaccctaaccccaaccctttcccatcatttatataaacagtccattatgacatgtattctttgcccaagccaacttgaagctccttttggatagagactttatgtatctggattaatattgtattcccatttaggagagtgcctggcacaccatagatgctcagaaagattcaattgaactcgaataggtaggccaaacacacacggggtcctaaattgtgcagaagggtcagatacctaaattttgcttccatggtcttatgaagtataaactaaaagcccaagtaaggagcaaaggttagtttaccaattttatctctggaacccaggtacactgaaaagtattatttagctagctttcagtcctctgtaatacagaaagtaaatatctgacactaggttcatttgaaacactcttgctctgtcacacaagctggactgcagtggtgcaatcatagctcattgcagcctcgaactcctgggctcaagtgatccttctggtctcagcctcccgagtagctaggactacaggctatgagacgccaggcacggttagttattttacttttgtaaagatcaggctggcttcgaactccaaggctctagcggtccttccgcctcggcttcccaaagcggttctgtttaccggatggtgccaaacagttccaggctcttggtgcccggtagaaattggacgacacacacacagatagcaaagcaaagcagcaaaagtttagtaaacagagtattacactctcgggggtgggagagagcggactgacctctgcgaggtgagatcagcgtcagcttgctgtagtttgagtcattttatgtgtgtgcgtgcgtgtgtgtatgttttctgttcccagtgctgcctaatctatagccagcatctgcccttttattgataggtttgttgcttactttgtcctctgtggcttgtgcctctatcttataatcttaaatatatgcatgatatgtagcccatatgcatgaaccttaagtagctgattatcatacgggcttttgttaaggatacttttcctctctaatacgcatgcccatctctgaagagctgcctcttaaactggtttgttccagatcttgccggccacgaggtccttgctcacattatctcttttgtttcggctgcaaaaggttcactgcttgttatctcgcttcttgttcacccgcccatctaccttacttctgccctttgcttttacttattctgccctctaactttcagctccctttgttattctcttgcctcacttttcttattgtttcagctgtattgcaggcgcgagctgccgcgcctaaatttcttgatgtaccgtaaacatttcaatgtctactttctatctcaaaacaatgtggtgtaaaagccgtttagttttgcttcatctccatacagcattccagtgccattgcaaaatgactcgactatcagataaaactgaacacagctctacttggtgaaaaagtaggtggctctgaaaagaacctttttggtttggaccgaggtatgagtaatgaactgctccagccccgctacttgcccttggccttgtggtggctctcagttttcttaggcagcagcacggcctggatattgggcaggacaccaccctgggcgatggtcactttaccaagcagcttgttgagctcctcgtcgttgcggatggccagctgcaagtggcgcgggatgatgcgggtcttcttgttgtcgcgggccgcgttgccagccagttccaggatctcggcggttaggtactccaacaccgccgccaggtacaccggcgctccggcaccgacccgctcagcgtagttgcccttgcggagcagtcggtgcactcggcccactgggaactgaagacccgcccttgaagaacgggtcttagccttggcgcgagctttgccgccctgcttgccacgtcccgacatgacgtaaaaaattcaatcagtaacgttcctgagactgacgtaacgctaaagctccgctacttatagtcaacagaggcacgaaaactaagctgtgctattggctaacattacagtttcgctttaaccaatgggattgcggttttgaaaaacacttattttgattggacaaagttaatatacgtttccaggactcaccactggttaaacgcacaacttcattctctaccccacttgcgttaagaagcagtgaataagcggtaggttgacagagctaccgtcttcctgtttttttcctccaattttccggcagttactcccagtcatgcccgagccctcaaagtccgctcctgccccgaagaaaggctccaagaaggcagtgacaaaggcccagaagaaggacggcaagaagcgcaagcgcagccgcaaggagagctactccgtgtacgtgtacaaggtgctgaagcaggtccaccccgacaccggtatctcgtccaaggccatgggcatcatgaactccttcgtcaatgacatcttcgagcgcatcgccggcgaggcttcccgcctggcgcattacaacaagcgctcgaccatcacctccagggagatccagacggccgtgcgcctgctgctgccaggggagctggccaagcacgcggtgtcggagggcaccaaggccgtcaccaagtacaccagttccaagtgagcccgcccaccgcggaacgttcggtcagtctcggcccacaccccaaaggctcttttcagagccactcagtcttcccaaagagaactggcactcactgttcttacagcaggtatttcttacttgctacaaagacgatttccaagattcctttagccttgttagaaactaattttggctcaagcctctaatcccggttcgggaaaccgaagcgggtg

SEQ ID NO: 46164 - DNA, 534 bp, Homo sapiens
attagcactgcagtgtactgcatgttgcagcaacgcttgagacaattttatatctgaagaaggatgaggtttatcatcagacaaacctagtaaagggaaaattcagttcctgttgaccccaaagaaaatataatacttaagtgtcactggtaaaatatccacagtgcttccggcgctctgtccctaaacttcatgtgtactttagtaatgaagcagttggcacacacacaaacgtacaaatcgacttgtttgttttgagagtggtgctgtttctcctcccttgtccccagtttggatttgctaaatattaagatagaaaggcagtagaaaaaagtttgaacccagtttacagcaccgtacacgtcaatcgggctgagttgatgtcaatggccaatcccgacactgcgagggcagtttgaaacttggccaccgttttctctggtgagtgttctagttgggaaaattcttggcagtgcaggttttttggaggaatcttgctgtcttactcattcccataattctcttgtgtggaat

SEQ ID NO: 46165 - DNA, 2151 bp, Homo sapiens
aagagccttttggggttggacagacttcttgggctgataggaatatttatgccctctcccctcggatgcggcgcgcaagctggatgtctttaggcataatagtgacgcgtttggcgtgaatggcgcacaggttggtatcctcaaatagccccaccaggtaggcctcgcaagcctcctgcagcgccatcaccgccgagctctggaagcgcagatcggtcttaaagtcctgtgcgatctcccgtaccaagcgctgaaaaggtagcttccggattagcagctcggtcgacttctggtagcggcggatctcgcgcagggccacggtgccggggcggtagcggtggggcttcttgacgccaccggtggccggagcgctcttgcgagccgccttggtggccagctgcttgcgcggcgctttgccgccggtggacttgcgagctgtttgctttgttcgtgccatggctaagtagacgtacctactcaacacaaatgagagaaaaaaactgatcatcccggtatttatagctgccctcgcgttctgattggacagtagactgtgccatgccacgtctcacacacggaattggctcccagtttaatctgctagtgaaagggagacattccgcctctgttttgggtcaagaaacgtaaaatggttttgctagctaaagaaaaacaaaaacggaaacaaaaaaaaatcccccaaaagtctaggatttttcatgcatcaaaatcctgtttaaatataagcttgataaatctaaacttgccttgcactattttaattacgaggtgtcattactgatttgacaaaaagttaaagaacgtaaaggaaaagtgaaactagagtaaatttgtaaatggaggcattgaaggggatatgaaattcgagcgttgtggtatgccagtatttctcaaatttaaacgtacttaatgttttagaagttggccgactttttctgtaaagggcgatattaaaacattttgggcgttgcggaccacagtgtcatagttacacagccctcgcattggtagcggtaaagtaatcgatacaagataaatgagaccggctgtttcattatgacttttgcaaaaaccagagaggcgttatagatttggccgtgtatcagagaagccggcacttttaaccactaagtaatgctgaaaggggcaccgaacctcaaacttcagcgactgcttatgtggaatcgctaatttgccaaaactgccatacgtttaagtgttcttaagaaattaactatctttagtctacagctctttcacagacttcatgggtggccctgagaagggcctttgaggaaccgtgtaagtaagtaaaacactcagccgccaaagccatacagggtgcggccctggcgcttgagcgcgtaaaccacgtccatggctgtgactgtcttgcgtttggcgtgctccgtgtaggtaactgcatcgcggattacattctccaaaaacactttaagaactccgcgtgtctcctcgtatataaggcctgagatgcgcttaacgcctccacgccgtgccaggcgtcggatggcgggcttggtgatgccctgaatgttgtcgcgcagaactttgcggtggcgcttagcgcctcctttgcccagacccttcccgcctttgccgcgcccagacatgtcttgtactaaacaaaatgcaacacggcaagcctcgcagcagtactttatatagtaataaatcggacctgattgggaactctccacaccagctgcatccggtcggccgattcacagaccttgcgccctgcccacgacttcaggaaaaaatggaaaagggggtacttaaactccagtttctaaaaatgatgcccagttaaaaattactcagctcatcttgcccttctacagtgttttaggctgaccaccgctgcattccattgtctgggtctttgcagcctgtttttcctgtcacctcttagcatcgattgttctagtgctttgtggctgctggaatcaaatggcgccatctctagaggggtaatcacagtcgtttcgggcatttgtgaaatagcgtgtagaaactgcttccgtacaaactcgaagtgatcagcctatggagtggctgactgcaaaagacgacgcctgatgatagctccaaggtgggattcctcacctt

SEQ ID NO: 46166 - DNA, 935 bp, Homo sapiens
gagtggagacttttcaaggcatgatcccctcttctcaacagtgcctgaattctcatagcattgcatcctctgccactgcgttatcccctcttcaataaattacttctattgtaaatctttagcagcaaaatagcaagcccctccacaattccactccaggctttaaaatcaccccttaacttttcctttattttcctgacgtcacttcctttgcagctatgggtggaaggctatctcggacgaatagtctcgtctctgtcacaggtgacaaacagccccgaattatgccaattggttagtgggtcgttcaaaatacattgtaggatttgccgttcacttccctaaaatgttctcttccccagtccccgtaccttgtcattaaagtttggtgcctcgggcttggcgacagagcttatcgacaagctaagttacttggagagcagtcccctgatttcatcatgttctttaacttggcatcacatttgccccctcctttcattcctcttcgctctctttttcgagattcgtttctccctgcccatcccgcgtccttgagagaacatctgaggggtgattatcctccgagtgggtgagagagtacgtgtggccttctcctgccatcttgtggcaaaaaagcaaaagcacaagttcaaggcgttgtgttttccagccccagttaaaatgctttcttcttaactttctactgagtcagtgggctagggcagggtttccatttttcactccttttaattgcaggattcaagtttcttcaagagttgttagtgcggaggttaaaagggagcgggaggggggcgggggagttaataggaagagcgaggagtgggtaaaggagaaagtcctgttgagctttgtgatctggtcagagctgtccaaaagaaataaacaaataaaaaaagccaaaatgctttataccc

SEQ ID NO: 46167 - DNA, 1616 bp, Homo sapiens
ccagttctctttaactgaatctctaaaaattagctacctgtaaacttggaactctaaactaaattatagtttacaaactggtagtatgctgaggtggagatatttcagctcatggacttagtatcaattcctgctctttaagatggggtacctctaatttcttaactgaaagctgcttcctgattttctcctcaaaggcatgtgaatacttccatttgctgtcacttttcctttgagtgagctggcaagggaaggaaggttggtgagagtaagtcgtaagtatctttttagaaaaagaaaaaaaaaaaaatagcagaggatggtttcgatccatcgacctctgggttatgggcccagcacgcttccgctgcgccactctgctctatacggtagtgatatttgcagtgaattctttatgatgttttcctcaaaacttggtggggattctggttttttggtatggttaaacaaatctgatttccacaccccaccaagggccactagttctatttatgctgcaaacatgaggatgagttcagcgtgtattggtatcaaacattatgaaagcaaaaaaaaccctcgatgtttctgtaagaaaacagcatgtcgctggcctgcctgctttatcatgtagtcaaaatgtaagggtaaggcaaaaaaggcatagggaaaatatccaccttctgaaatagaatacgtagttttcaagaataaaacgtcatcgttgcattggccgggaatcgaacccgggcctcccgcgtggcaggcgagaattctaccactgaaccaccaatgcctcgcgtacaaaagaagccttgtcgtctctaggaaggctttgtcgtctttcaggaatccaactaataccataggctgtgttttcaaaaagatatttaggtggctttccgttcttattgaatagagcctcttaatagagccttcttcccttcttttcaggaagaaaaaaatccctttcactgtaacttcaaagcgtctcctgcaacactggaggctggcccacgtgtgggcggcccggctcccgcacggtctctgcggcgaggttggactgctctggctgggccagcacctccgccccgcgggtcgcgggcgcctgctctgactatatataataatatagccaattcttttgattaatattattgtggctaccttttccaaccttttactatttacttatgtgtgtcattatatatacatttatatacacatacacacacacatatgtattttattttattttattttatatattttttgaaacagagtctccctctgtcacccaggctggagtgcagtagcacgtttcatggctcactgcaacctccgcctcccgggttcaagcgattctagtgcctcagccttccaagtagctgggattacaggtgtgctgctaccgtgtcctgctaattttcatatttttagtagagacggagtttccccatgttggccaggctggtctcaaactccagacctcaagtgatccacccacctcagcctcccaaagtgctgggattacaggcgtgagccaccatgcccggcgaatgtccttatatttaaagcacctttcttatagacagcatatagtgggccttgctttt

SEQ ID NO: 46168 - DNA, 609 bp, Homo sapiens
tcataatttttagaaatgtattctacttacctccattttaagcattagaggtagatcaatttttttttttttgtctaagaagccttgagttcaaataggactaatttaaagtgcacagatacaacgtcttcatacacttagttgtataattgatttcatgaagttttttgacttattttaattccactcaatatgcagcaagtcacgaagtctctactcagagttaactagagaataaggatgaaatattgcagacaaccggaatgtggtgtgcagcatcacatcacctggaatttagagtgtcaactgctattttgggagactctgttgagtcagttttgcaaaatggataaaagaattttctctattgattttagtgtttgttttggtctccagcagaaatctcaatcactgaattgcaaaactcttcccccccagtttatagtagttaatagcatacccagtgggaagagagagggaggagatctctatgaagtgatgttcctattttaaaactgatttgctaagcaaaatcctttctctagggactgaatcctcaactttctaatgcaaaaggaatgacaatggggactaaaatactttatcaaa

SEQ ID NO: 46169 - DNA, 1702 bp, Homo sapiens
gagtcacctttagtcacctgttccgtaaccgtccttcccactgaaactgctcaccctaccactccggctcatacccctgctctctttaaaatagccaatcggaattaacttagactgtgcggtccaaccctagccagtaggggaacgacacagcactagggactacctgcgtcagggataagaaccccttcccctcccttgttcaggtgtgctctcgccattgctccatccgtgagacgcacccttctatagaagtaaattgctttgctgagaaaatgtgtgctcgagtgtgtatctttttcttcttcttctttttctgagactgagtctcactctgtcacccaagctggagtgcagtggcgcggtctcggctcactgcaagctccgcctcccgggttcaagcgattctcctgcctcagcctcccgagcacctggaactacaggcgcgtgccaccacgcccggcaatttttttttttttttttttttttgtatttttagtagacacagggtgtcaccgcgtaaaccaggatagtctcgatctcctgacctcgtgatccgcccgtctcggcctcccaaagtgctgggactgcaggcgtgagccaccgcgcccggccaacgtcattttcttttcaggagtcccttctgttatttagcaagacacactactacaatggagaaaaaagatgccccctccttcaagccctgagatcttcaggactttggcgaaaagtctgcgcccgaagagacccaggaaggattcttggaattgtagtccaaaggcatcccgccttctgcgcagactcacaagtccctgtggacggaattcttgaagtgtagcgccgctcagtccttccaccggaagtgtccgatcggaatcagccctgtccgagaggtgagtccgggtttggggatccagatgtccagccccgtgtccccctccaaacatccagtccctctcatattgcctttgaaattagcagcctctgggtgaccagaccttggccctcagaggaatcccggagaaaggtagaaccagcttcggcgttgggaacgcaggcgcgcttacgcatttagtgagggtttggcggtctccatagttaccgccgccgcgcgtgacgtcatagtggagcgctgagggcttggtggcgtggggtgggggctgtcctactgatcctgaatttggggtcactggtaagaggagttgcccattccagccaggtggaacggggaggggtgccacatgtctcagatctgccattgtctgcgaaaagaaactgctgcgaggaccatccccaatcccctgcttcccttgggaagagtaaccgccgttttgtaggacacttggggacaaccccgcttgtcctgaaatttattgacacggtaaatagtatttcctgtgtgccgaggatgcagttaaaccaacactgaccccctgcccttgagaaacacaaggtactatgggagcctttaccagcatgccccttgaagtctctgttctgctttgtggtctctaccggatttcccctgactgtctccctctccaccaacaaaactctcacccgtcttcccctcccgcaacatgcccaccaagacatgttcatccatcaggagccctgctctttaacctccaactttctcatcataattaattactcgttcctctctgttctcctagcgtttcttcacacatctgcttaccca

SEQ ID NO: 46170 - DNA, 1366 bp, Homo sapiens
cttgaatgcaggtttctgataactttggaaatcacaccactggactagctaaaaacttccagaactcttaaaaaaaaaaaaactgatggattcatgaagattactaacccaacatcaagcagaacaagaattaataacatgggcctaacctaatagaggactgcatttatcttttatgactttttgtttgaaacaattctgattctttctacatttgttttccagagtcaagaaaaaattcatttttattttgagccatttatggttacagtgattgggaaaagtgtacttttgtgagaaaactgaaactccaggtcggtggacagaaatgaagtctggggaggttcccgcctgccgacctgagcggggaggactgacggactcaacgctgcgaagctggaactcaaaccctttctttcggatgagacaagttgtgaaacaaaaccccatgcccaagtgaccccatttggagactccgcggcgcgcactggggaccccacacgctgcacacctctctgaagccgctggaagctggggcgcaaggccggaaggggttcgcagacgcacttccgccagcggccaggcagggcgcagaggagctagttagagctgggctggagctgccacccagcccaggtagtaagactggcaggaagagagcaggacgccgccgcccgagtcccccagctcagccaggtgcgggcgggaggagccccgtccttgcttagccccgcgctggaagcgccgtccgagacactgcacggggcagactggtgggtgtcccggccctggcaccgcggggttgccctagccaaccggagcccagctcccccacgcgggccggacgtttccccagacgttgcgaagtccgactctggttcacagatgccgacctggtcggtctatgcggaccacccttttctccaacgtgaccgccgactattggaagttttttgtgatctgtcaggccctgatggcttaaggaacatagccagatcttcccgagtccgaggctcgttatggttgtccactgatgatctgccatttcgtttatgttacagaataaacagggaaagtgtttgtagtctggttggttaacactgtattttgccttattctttcaaagatctaaactagtggaaggcaacctgtagaacccgcttccatgtcctttatcttgaatgattcctgaaacagcctttctccaaacctgctccagaagtccctgaattaatccttagagcccaggaagtgaagatgtctttcaaagatgccgattgggtaacagaagctaagcacagagaaggcagtagagggccttattgcgtggtcctaagttgtgtgccaaaaaacagagaagtgtccc

SEQ ID NO: 46171 - DNA, 2026 bp, Homo sapiens
ttaaaatgaaaatttttattgttctccttaaatctctgtggaagccacccttatcaaaaaaaaaaaaaaaaaccctttgttgaaaggcaaattgccaacaaacccgatgagattcagaacactgctgcaataacatatctctgtagaaacttatacttccatctggatagcaaatttcctaagctgataaaaccaggttatcaatgaaaggccagagtacagaatttaaaggaagaatgcctgggtatgaatctttgttctgccagttactagttatatgaccttggctaatacatttttctctctgtgcctcaggttccccatctgtaaaacagtattataatgatatctacctcataaagtaggaattaaatgagtgaccaaatgtgaagggtttagaacagtggctggcccataatgttaaagtcttagcccctaacagcgcacttagatctttttgttagcattaaattcagcattttcttcctatcaaagctgcttaaatcagttaactggcatttgatcttcgtgggctcattgtattgttgctgttgtgtatctttttaaataatactcgtaatcttaacaattagcataattttgaaccgctccctaatacctaaccccaatcccaaaccggacggtcgagcctatccaccggcagagaacaccacccaatctcgccctcactctgacactcaccggccagaccttttcttccgtccgttttctgcctctggcccagggcccagctcacgtagcgttttcgggggctgtttgggaaccgttagcaaccggaagtggctagaggtcgcgagagaactgaaaaaggggaccggcctttcccggctgcctaagcacttgggttccggcctggaaggaggcccagggctcccacaaagagaaataagggacctatttggatggatcccaagaaacactgtctggcatctgatttgaacgaggctcggcgcagccgggcccttttcgcaaagtaggcccactgcagacctgtgggaacctccgggatgcctggggacccgcatctgccgctacccgcaatttcctatcccgaccctctctgcagttgtcgaccccggccggcggctttgagcgtggggtcccgcagaccctggcacctagggggccgaagccgagggatcttggggtagaagagcggtcctacagagctgccgcttcgaaagagcccccaatcgaccgctgatggggaatggaggattttgctgttttattgcagcccgcccccggagaaaggcgggctcggacgttcttgactttaggatagactggggaggggtgccgaggagcgttcttccctttacgtctcgcggtcgcagactgtatttgctggtgccctgctcactgtgatctcgcaggaccttgcggacttacggagacgaaaagtggcctactttgagcttctctgatccttaggggaaatgagtgtccaaagagaaataggtgcagagtgccggcactagaattctttaaacctggattcaaattctgactccaccactctccagttaggactgagggcaatttatttttaacttctccaagcctctgtttactcgtttatgtaactcaggctaataacgtagtgtctatttcatagggtggctttgactattaagtgtgagagtgcatgtaagaacagtctaagggaatttccctgcctttccccttgtctgctgtcactctcatccgtgttagacaaatggaattaattaaccaacttccgcttttctgaagcacgggtaaagagtgaagtgcaggacttgggtaaaggaaaaaccaagaaggatgcaaaagatggatggtcattgtgagatccacagaggtgctcatcccagcactttcacctcacttggcatctgtcacatggtgggtgcttgataagtacatgggtgaatgaggacctacctaagcagaaggaattattgaataagactagaattgcagggagaggatgaatcagattgattagctacttgacaaaaaa

SEQ ID NO: 46172 - DNA, 1315 bp, Homo sapiens
tatgaatcgagaacagtaaagtacagggtatgtaacggagccaaacgcgaatccagttggaatcctaaggatccatgaagtgctccctcctccaacactttcccagcctcctattcacagctccagcctccccacgtccgatatctacccccaggggaccgttactattgacagcgagcgcgcggagctgcatgggcacacaaggcggaggggacaccaaggtccgttattccccagcacgttcactgccccagcgacagcgcaagcctgaggcacgcagacgcgggaggaacccgaggcacagcacacagcaggtgaggggcgtggtactccggtaccctcagtcggccgaccatagagcttgtagacctccaggactcctagagagcttccggaagtgcctttggggcaagatgcgtgctggccggtgttgtgcctccgcagatttagaagttagtggccggaggggcctggtccgagtacagctttcatcgcctttactccccgaccttccttcgagtctgtttatccgttgcagcctcccttccccacgacggggcgcctctgcaactcacagtgagtacggtcgggctctgggccggaggaaagtgggtgctttgtggctggtccaggccgcagctgaggactggcctgaggggtccggagaggggcctgtgcggtgttcggcgccgcggaccgattctgacgccttagttgctgttgcaggcagagtacgtccccacgaattgcccttgaactttttgcgagggaaccttttatgaagctttcttcatagataatcgtgttgtggtatgtttttgtagtcgatcttgtttatcttaaaatggggaacgccccccccatgttattttttatccaactatttccagagtctgaattgttttcacttagcgctcttttgcgtttaggtcacaacaaaattctcagtttttaaaaaagacatattttgcttttggaagccccgtttatccatggaaaccaatttttgctgttactcttctttctttagtgtattcagaaactggtggtgtgttgactagataattgtacgaaagtttttttttttttttaatttcagggtaattcagaattcaacattatcagaatgcctatttcatttgttaaagcaaactgaagttagccaacgaggaactctgggagggccccatttccaaaactctggttagtcatgagtaatttttgtcaggctactttgactgccaccaccacctttaaaaacatatttctgttgtttgttagttccgttgagtatatttacgtagcaatcattgtt

SEQ ID NO: 46173 - DNA, 1111 bp, Homo sapiens
tcccttctcaccaatctggtaggacaccccgaaggggtcaatccatatgctcagctcctcaggcacattggcccgcacatcttccactgtcaggccacttcgcttagcggccagctccccaacggggtccaccatctcctcggtgtggaagccagagcccttcagtggtttgtcagggtaccagtgggcttcttatttctttttcagaggcgccagagcagcttgttgtacaagtagaagatgatgaagttcagggctactttgatctccagctgcatggtcctttcctaggcagagaatcagcacaggggacgtgcacagccttgggctccagaaggcttccggtctccaccgcggctgggcgctctgccagcctcggggcagcttctccctctagagtggccctgagcgcggggcggcggtcgctctctcttttttcccccggagccgcccggccgggggccgaagtccttttcgtcgtcgagggttgggggaagcaggcagctatggtcatgactcccaaaaataattccttcagcgcttaggaggttgggcggctgggggacgaagggctggcgggcggcgaccgggcggggagaacggaccggaaggtggcccgtggggggggcggggggagcggaagaaggaccgggctgtgaccgcgggacggtcctgtcctcctggccctgcgtctctcgagctgctggcttctctccgccgacgacccgcaccttcccgcgccccggcccgaagtctatacattttttaaatgtgcatattctttgacacgggaattctacttctaggaatttatcctagagacagactcacacatatgtaagataatacgtgtctgaagctcagcattgtttataaatggaaagtgataggaaatattaatagcttaattgcttatcaataaatgactggtgcataatgaaatagtatgcagctgtcaaaacagagctgcagctctacatgtatggctataggaaaattttctactatttctgtaaaatcccagggcaaaattatatataaatatttgcttctacatacctaaaatatctctgaaaggctgtataagaaatgaaggccgggcatggtggct

SEQ ID NO: 46174 - DNA, 1692 bp, Homo sapiens
cactgcactccagcctgggtgacaaatttatttaattggttttggtttgattttgtattattattactaaaactccagaaaacttttacagcaaaaaaaaaaaacaacaaaaaacaaaaacaagaaagaaagaaaaggaaaggaggatgggagaaaggcaggaagggagggaggaaggtaggaaaagaggaagggagggaggaaagaaggcaagcacgcaggcagatgcctaaataaagaatacataggggcctggacaaataaattgctttatggactgttatgcacccatacaataagttagacttacatgatgagtaaagctttttaggatacatgaagtgaaaacgttaaaataagcgggggagaaaaggctaaatataaaataatgccattgtgtgtgtgagagaggatcacaatgatatacaaattccaggctaacggtgacagtggctgcctcggggagtgggactaaggaggggtaggtggggtttgacattttactttattaattttggtattgtctgagggtttttaaaccataaataatgtattaattttaaaaatgcttttaaaaatcatcattttcaatagttaacggtctatgcttcatcaacgttttccgtttaaaacctgtgtgcggcccacacacgtatgacattctgattatgtgattcactgctgaaaaagaactggacgccaggaaattgggggttgagtccgaagcaaggtgaacgccggacatcgagacatggaatcctagaccggcccggaagtgcctctgctccgtccgccttcgaggagaggtcggcatctttgttccctgcccggccattgttcgtgccgcgcttctagcaacgccgggccggtaaccccctctccctccttgcgcgttccgggtctcgtgagttggctgtggggaccgggaatggaggcgggtcagggagggtggggctggaaaaggggtgtggaaagtgaacctcagccgctgggaagtgggagccggaggagggggcggcggtcagtgccgggcggcttcgggcgtcccctagaccagagtggtcatccccagctgtggggacattgtacaagaaagggttgtaggaggactgcgaggctgaagggtcacctcggtgaataacgacaacaggcttaggactcagggaaagaaacacccgggagaggaagttaaggacaattaagactttggcagccttcacgatggagaacctgtataccctcttacctctagattctgaaagcaaattaaggggcgttgaatggactggttttcaagcgcagaatgtagcagttcccgattcccttttccttagttcattgattctcaaaccttataatacatacaaatcactgaggagcccgttaaagggcatattctgggtctccctgtacttctctccacctcccaattcagattccccagatgtctgccatagggcctttcaagctggaattcagctgctgcgctgtgcttcctggcattttggagacacacattttgggaacacccccatgggtttcaggtgcttcctgcgtctgtggagaaaacttttcccttgggcttctttggcttcttaggattgtcctcaaaaagaagttgaccttgggcaatctacttaactttccctggcttccatttcttatctagtgaaataattattataataaaac

SEQ ID NO: 46175 - DNA, 1775 bp, Homo sapiens
aacctgttctttctacctgcggcgccggctcatccagctgcctctccaaatactccaatagcaccaccacctcctccccgctctctggatgctgctcccgcacccagctctgcagattccccggcaggatggtcaggaactgctccagcaccagcagctccaggatctgctccttgctgtgcatctcaggctgcagccattgtccgcagagttctcggagccggctcaacgcctcgcgggggcccgcagcctccgggtagcggaagcctcggaagcgctggcgggagcgttcggggccccgagcagggctgcagggtgctctcacctccgccgtcaaggcggaggcttcctccttctccaccttcacggtcaggagccccgtctggtcttctgcagactgggcgtccagggctgcgttttttctcggttctctagccattctgacccaaggcagtactcgggtctcactctagttgcgacctgtatatcttcagaggattctggaagggtggtaaattttccagtagaactgcaagtggtccccctcctgtcatgcccaggggcccaggacaccccctgaggcgcagctgcacagatctctcttatagtccgtgcctttgcagggtcgtcctctgcaccccactctgaatcccacagtaagtatcaccaaaggatgtctttgggagtgaaagtgatcactctccagacataggagggaagttgaggctggggcacaggaagtctcgatgggaactaaggccacttcctgggcgctctaggaagcttctctcggtggttgtctccgaattaacccattagctaccctgtccttacctccacgcaagggaaggcagttaagggatagagaaggaaaggatgacagaccttggatcataagaaataggactgagcctttaaatcctggaaggatgccgctgcggctcatatttctttcctatgtaaagcttgcttaagcagctggcataaaattgacactaaaattgagctggaaagcaggggttccccagagccccaagaaccctggcagggggacctttagtctctctcagaaacatcaaagcagcagaacacatcaccaggcacttgcctggagcgagcagtggctgcccttggtccttccccactcacccccttaatctgtcactttttttcctcctccttaaggccagactactcctcccgaccctgactgtagccctcacctcccactaatcctcaacacactgtcccactcccccactcaccactttgcacattccatggctgcttctctggcaatcaggcttatgctgctctccacctccagaaactctctagtctctggcttcagggaccccattctcttctgctttcttccttcctgtttcttcccagcccccaatcacagtcaagcacagtggctagatacgcaggtagccaggttacctgtgtaatcctggcttaccctccctgtgcccgacttttccaatctgtaaatagggaaagtaatagtagatagggatgttgtaggcattactagggattagataatgttgtgagcactcttgtgtaaagtgcttagaacagtgcctggcatgtgataaactaggcctatcctataatagaagaaagccctgagaattctttgaactagatgggactcgattttaagccataattgactgtaagttatttgactggacacttcagtaagcccctttctgcccagtggaatggagaagctacaaaatgcaagttcagtagtttatgagggg

SEQ ID NO: 46176 - DNA, 2018 bp, Homo sapiens
caatgtataagcattcaaagagtttatcttattcaaaaactataaaaacccagtttgtgatactgtgggcaagagagactatttctgttctctgttgtagaatttattttgataaagtgatatctgttgcttttattccccctgaaacttacattgattgcaaagtgttgttgatttattttctctcacagtaatagccctaatttcttcttaccttaaacctttcaatccaaacgtatgtccattgtttagtttaattttcgaaatactttgacaattatttttgccattgtgtttgatgaatttctaaattgcgaaaaatggcgaagtatgtgtgttttatttatgtgagcaaagtgaaaatgttggctgtttgtgataacactcaacggagctggcctgtttttacatgaataaaataaacatccactttaaaatgagaaaacaaaaacaaaaacagaaacaaaaaaaaaaccccaacaatcttagctcacaacgaaatgaccctcccagccgtcctcagcaggcagcacccatgttagtctccttctgcgatgcctaagcggcagcaccatcgagccaaggtcctccagcgttcctagagcggagaagaaagcgctccgaagagctagagctgacactcggcgatgagctaagacgctgtttcagagcgtttgggtcctctgaggccccttgaccaggtgagcggaccctggagctgggccccgggctggggcggaactgcggcctaggggcctagggagcagctgcttcccggcgggtgcagagaatcttccctcgaccgagggggcggggtccgtagcggaggtgtcggccctggggcctatgagagtgatgaagctgtggatctggtaaacagagtacaaccttctgctgcatatttttcatccattcagcgcaattttaagtagatattaaaggtaggcgccaccgagaaggtaatatttgagcagaaatctgaaggaggtgggtggaaagacctaagtggcttttgcggtcaggaactttctaggtagagggaatagcaagtgcaaaggtcttaaagcaggagcttgcttggcatatttgaggaataacggggagaccagagcggttggagcagtgaacaaaggcgacctttgtagggaatgatgtcagagagattggggtatggagaggaagagtgtagaggaaatgagaactgtatcgtgtaaggaattttgtctttttttggtgtgtgtttttggaggattttgagcagaagaaaacatgatctgacttatgttttaaagcttctttacttggagactcatgatgataatagattgtaagtgggcaagaatggaatcaagaaaacttaaaagttaagagtaattttttaaaattccaagtaattcaggtgggagataaggatatcttgagccagtgatcagattatgatctgctttgaaaatagagacaataatatttgctactgggtcagatgtagggtgtgacagtaagaaggcaaatataaatccaaggttttgggcctgtgggtgcaagagatactggagaaaagatctgaggtttagctttggtacctcgtgtaagttcttcaactctccccgtctcaatttccttctctgcacgaagaaattaggaatagtgtcttctttatagggttgtgtgagggttaaataattaatatatgtgaaacatgtagtatagttgtcctggctcattgttttattatgctgagacatgaagtgtgagtgggcattaacaagaagaaaattggagggttggagggtggtccaagcagaaggaataagctgtggaagggccaaggagcaagaaggagtattgcaaatttgatgaaataaagtactttattagatcaaaaaacaatgtaaaccatattaaatgttttgaacttgatcctaagggtaataatcagccattatatgtaacaggcatagcagggacataataatatttcatatcctccttagaatgatcactgtttgcgtgtggaa

SEQ ID NO: 46177 - DNA, 780 bp, Homo sapiens
tcctagataaatatgaacaaaatacaatggttaactctaaagaggggacacttttcgttttatggtccttttgcaacttgacttttttattgtacatatattatgtatacttaaagaaaataatttgtacagcttactataatggtctttttattgatctgtctctcctaccagccagtgatgaccccgaagacagacatttaccactgtgttggttttcaatcgaaatgatgtacataaatttggggcgtgcttgcaccgtccgaatgggcctggggtccggcggcggagagtgacctgggcggggcaggaggtggcagcgggggtcctcccggctcaccagagagacgagcggccgtgctcctagagaggcagggaacccgccagactccgccactccgctgcgggcgcggcgcagggagaagcttttgtacccgcccagctgctggaggcgccggcagcgcccgccagacccgccagcccagcggcccgggctctggggaaaccggcgctcccgacaggggagcaccgggcctctgagctccctcgggagcctttcacgaggtcagctacgtctttgttgtgcgcgttcctgaacttttggtccattaaccaacaattagacacgccggtattcagtgcctggcgcggtgctagatgctgggtgtaatctcagaaaaatacattcaggggcgcgcctgagggtgctggctgctggcatctcaggtgctttacgtgcattcgtgaagaagcccatcagtatttcttgaataccaggta

SEQ ID NO: 46178 - DNA, 2715 bp, Homo sapiens
gaagggaggcaaagagtaaaattgccctaggttaagactcaactacatgcagtgagtggtctatgattggatcctagttggtacaaacaggtataaaagacatctgtgggacaacagggggtggaaggatttaaacatgaactaggtgttaggtgaagcgcctacacttagttgggtgtgctaataatcttgtggttatgtagggaaatgtccccaatttttagagatgcattagaaactagaggtgacaagttatgaggttggtggtttttacaatatttaaagaaaacatatgcgacaaacattgcataatgttgacttattaaataaaaattacgtgtatataggaaataaggcttttgacagggagagacccttctctacctctggacctcggtttcgccgcaaagctccgacctctctaggggtctctcccaccaccctgtgaaagggctacctagcttgccttaggtggatagcaagggaagggtccctggagagcctgcccccgcccatgatttagtgtcttatccccacataacataaaactaagcctggggaaaaaatcaggttgcaggcaccgataagggaactagcacagggtgttgtgcctagagatatgcccacggctgcatagatagaaaaacctcgggcccatttggataaaaacttgcacagaacctccagctcactcagataagggaacaaggcctgacacataatgcctttgtcctttgtatagtcagcaggttcccaggaaaagtttcttctccttttgtgggtatggacacggtgggttctggtaggttccggcaggcgctctactttcctttattaggactataagcccagcttctgtgaatcatcacctcagcccctgattggtccggggccaaactttcacttcggcttctgataggtcctgggccaagctaagcagcagctatgaatcatcatttcagctcctgattggtcccggaccaagctgagtcaagcgttcgccaggacagcccgcagactaagcgcattccctctcctttccagtccataaaaaccccagaacgggccccataatgggtactcccggtcgggaccccttctctgctggcagagagctttttcctttcgcttattaaactttcgctctaacctcacctttgtgtctgcgctcctttatcgtcttggaggcaggacaaagaactccgggcgttatctcagacaaagaaaggctgtttaatcttcaggataaggggcgggacctccacctactccacgggggcttcaggccagtgaatgtgtaggggcgggggtcacgcctgcgcagacgttccctccccgcctactccaaggcacagacctgaaatcttctgggaacctggcgggtcgcgacaaggggccaagactcaccttcggggcaccggcaagctacggaacaggtggcggggctgcagcaccccaatgaccgatcaaccgcaaaggccggaaatgcgtcagccgttctgagcccactggctgaagccaggcaactctttcctttctaggaattccagaggtggctgctgcttggtgactcccttattgcaaaccccggggccaaaaatcccagtcccactgggtgcgaggcggagaaatccggcgaggcatttctatggggagcggcccccagcatttaggagttagatggtcatcgagacccaaaacattagagccggaaggtgttaggaagatataaacgtagagagcgagtaacaggaggcaattccacggccaaacaggtttatttacaggaaaagcctgcgaagagttccagttaggaatctggctgagatcctgatcgcttacaagctgaggcttttataataaagtttctgttggggaggggttggggaagtgctggctagttggaactgtttggacactttccaactggggacagatgtggttagggccgttaggctctgttgcggttagagctgttatgctctgttgaagctatggacggggttgacatttgctttgtttcttgagaacacagtcatcaaggttgtaaaatggcatcactattgttagtcctcacagaagggacttcatactttttctgtctctaatacttacctattcttccccgagtctgtccacttcctctggtctctttgacatcacaaaggagagatggtaatggtggggacgagaatacagagttgtttttgttgtggttttgttattttgtgttttacactcaaacctctgtcttctggaatcccaaagtctagaagaagagcgtgtaaacaagtaactgcgtaaaacagacgtgcatgtgaaatgaagtaaaataaaataagtgcttgtaaatcgatgagaatagcctctggaacatgctaagtacgtatgtaggaaataaatgtatgtattagtttgaattcgtggcgtggaagagagaggaaaactaatggggcaaaacaagactcagcaggaatctgccagtgtacactggaaaaggagcaaaggaaataaatttctgggagagggaatcaaatgtacaaaagcagaactggggtgaaatcctttggtacatccaaagaactgggctgatcagcatgactggagagtggtatatgtggcaggggcaccagctcttactttttttggatccctaaccaaggaatttgagcagtctgatcaaatttacatctagaaatgttatcttggcagcca

SEQ ID NO: 46179 - DNA, 1527 bp, Homo sapiens
ttaaaaagtccagccaacttgctaaactctcttattaatcatcataatttgagtgttagattatcttggattttttatgtaaaccacgcagcatgttccttaaaatttatgtatttagaattcatattctaattaggcaatgcaatcaactctaaaattaaaagtacatttaaaacatgcaccctaacactttccttctcactcttgtccccgttttcactcagtttctgaccgttcacctctcgtaggtaaccaccattattaattttccgatttttccagggcttctttgtgccacacacgcacacataatttagattctttttactctcttctattcgcaaatatagcaaattatgaaaataattctgcaccttgcctttctcccttagttatagctggaaaaataaaaatttaaaagcctctttaatagcaaaaggggaggggacacaaggtgccgagctagcaaacgacagagtctgtcagggaggtggctagagaggcccggaagtggcttctgtgccccgccctgcgggtggtttgctagtttcaagcactttgtgagtatggggtgaatcggcgtcggccttccactgtggggttaaatctcatcccgcggctctcctcctgtcggtcctgcagttcttttgtccccgggtagaggtgcgtttgcaggagtatgtgtgtgtgtgtgtgtgtgtgtgtgtttgtggagagaggcccttccctccccagttcctgcagcctcggctcccaaggagggagacccctgcgagaagccgtgggggagggaagggcgctctgcggcggaatgaagtggtcctcggcgttcctgcgtagagcccaatatgggtgtcccttgtttagggccgttaccgagtgtccgggtcggttcttgagggtatttggagacgggatgcatgggtcacatagacaagcctcgagaatgggagccgttacatttttgcactgcctggtaacaaggtcagtttcaaggtctttaaattattctgtggtactggccaagagccagaacgttggagtcagattacctggttcaaatcctgcctctgccacttactggctgtgtgacttttcactagttcctaagctctctctctgcctcattttactattttgtaaaatggggataatattccctaactcactgggttgttgtgaggattgaatgcattcgtatgggtaaggtgcagagtaagcatgatttaaagatttgcttttattagtggtactattattatttataactatgatgacacattagtgactggcttttgtacggttgctttcaattttactgtcattcatcaattcactttgtaatggatgatttctatattttaggagggaaaaataagatactctgaaaaagagcctatcccaaagcaaagaccaaaactggtttgtgttggacgttgtgatactcaaactctcaaaggctttaagactcgggggtaccttttccttggctggagattaggaggaacaatagaagtttttaatagt

SEQ ID NO: 46180 - DNA, 1204 bp, Homo sapiens
ttctcatttggtcctaaatgaaagacaaatggaataaaactaacatttagatcaagtaaataataataacaaaaggttaggacatccttgattagttacttttatcttttgaatgtccagatgtctggtggaaaccatgaaatcacaaaagctacagtcatgtaaatttatttcttcagggacttaatctttctgctcctcattcttcatttataaagtgagaaggctgaagaggttactctttaaggcttccctctaacctcgtggtctgtgattataatctgaagtgaggaaggcccaggaaagggtccctaggacgccggcgagcgtctgtgacccaccactgtccagaaatgtcggtaagcgctgaacccaaggatacacagcccgaagcaaacgcggaaggtatgggccttacagcctggaattgctgcagagactgggagccaaaccctcatcctaatgtcccaacgcactttggggagggagagcttcccgcggatccgcctgggtttgggaggaccggggtccactctgcaccggccagggcctgaggggcccagcagctggaatacagcaatctcccgcccacctgctcgcagcgtacagagcacaacatcgctcacctgcggcccccagggccagaagagaactccctcctacggagcgaaggcaagaggcctcgaacccttttgggacccggaacccatcaaaagtgacccacaaaggccggaagcggccacggggggtctaagaaccagcccgcgcggggcgcacttccgcggccgctctaggaagggagcgaaaggggctttcaactcggtagtgtttccgcgcgtctacgtgagaggaaggttgatggctttcaggcccgctggtaaatggaacgggtttatcttctcctcttctttacccagccattgtccacacttcccccgacccgatgggtggtcgaggcttgtagaactgatcttaagacagggaaatcccttgcgtctccattcactttgggattctgtgtctctgaggttagagatgcctcaaagggatgttctccgggggaccttcccaaatccgcgcttagcggtggcgaagggacttcttccacacagacttctcaagggccagccggctggtttctgccggctctttcgccatccacgattcttttgatgttctcttttatgtgctgatgtatgattat

SEQ ID NO: 46181 - DNA, 756 bp, Homo sapiens
aagacatcggaaaatacaaacatttcttcatatccgaatctatttgaatcctaagatgcagatacggagagttcagagtgccatcagtacagggcagagaggttgaagagctcaggaacagacatagggtgggggaaaggggtaggggcaacgacgctgacttttggttaacaaagcccttccaggctgcggagcaacctcctctgcccttcacctgcccggcccatctctggccaagaagaccctgccgccaaatccccacacccagtccaggtcgcagtgcacagactggcccttccgaagcccctcagcggtagcccgactccgaagctcaccgaggcatccgtgagaggagatgccacctagcgcagatcacatctgctctgaatccttgacaaccgcagcccaaagaatgataaactacaaaggccggaaatgcgtcaccgcggcccgctctccgcgaaacagcggttccggctgtgttccttctaggaaggccggaggtttccacacctctgtggtcgtcactctgaatcccgtctgtagtcttaagtgagatactaggtgacacattgtcttccacgcggcaatataataacggccaacatagtgttttaacacgtattaattcattaccccgcataacaaccctgtgagttaggtacaattatctccatttaacaggtgaggaaactgaagcacatttctacatttattagttgccatttcctgcaaagaataccctttcttttccct

SEQ ID NO: 46182 - DNA, 909 bp, Homo sapiens
cttccggtcaacgaccacatccacctgaatcatgagcaggttttaaggcgtgtgtttcttcagctcctctaaattttagaaagggggcgatatttaaactgacctcaaaaagacaaggctctcaagttacactcttttgtgtgtctgcgagtcaaacttgtagcgcctactggggaccagtggaaacgtgatggtcgccccctgcgggaccaggtgaataaagctccttaagatgcattcaactgagttccctgagcccattcaacaggcgggaagaggatactcccggaccagggctcacgctttctccatcccaccccggactccaggcacctgtgtgccagcctggccaagcgtttcctccaaagtacaaacagctgaaaggtggtgtgctggccccacctgaatcactcgcaactccaaagaggtgtgtgatgcaacttcccatttccacgggaaaggactgcagagaattcacgttcactttcggaaattaattggatgctataattttgtggtgtgggaggttgtgcagtcttgttttagagtgaaaaagggagaatcaaccacgaagggattcgaaccctcaatcttctgatccgaagtcagacgccttatccattaggccacgtggtcccatggcttagcaactgcaaaaaatatgagaaatgttgtaagattggctattaacctggattttatatatatattgtatggttctacttatatgacatgatttctgttgttaacctaatttcaaagatagtgtaaattatacaaaagctaaataacttgccagtgtcacacaataacaaggtaatgcaaagtgagtatttggattttctccaaactcctacccttaacttgacaccaaatgttacaccaaattttgcacatgcaccacgttgc

SEQ ID NO: 46183 - DNA, 2059 bp, Homo sapiens
ttaaatgattcttgattgccaggagtttgtggggaggggaggagggttgaaaaggtgaagcgcaatagattatcatttaattcagtaagctcatatagaaaaaagaggaggagagtcaaggtgaaacacaaagttttgatatcaaagtggaaaacgaagagagagggagataaaggaaaagagggtgagatagtgaaagaaaaggacacagagggacagtgagagcgatgactggagccagagtgcaagggagagaagaaggagaaggcggggagctagagagagaaggagggaaagggagaacaaagtgagggcgagagggatgagacagaaagaaaagggaggaaagaggaacaaagggaaagacagtgtgcccagttatcaatgtattggctgccagctccaaatcgccccttccgtgccctgctctatgatactggaggtggaccctgaaaacatttctatttggcaaaatggtaatgtttaagctgtgctaggggagtacactgcaagaggaaggggcctctggaccccatgatttttctgcttgttcctgctgaaaccaagatgttaatctgagcgggtatgccaaacttagcctgccctgcttgcttttggccgctgtctttttgtgattttttccccctgtgaagctgagggctgctccgctgaacattagaacttaaccctcaccggcgaccttgtagataacgtctataagtcaccatggtaacggtcgcttcagttgtttttcaggaacctggggcaactcctgtccagtttaaaccggttgagactaccgacctttcaactggacccacgcaagtgcccaagaggtggccaaaaactccaccctcaaatcatactaacggcgccattttctgtacattatgtccaatgcaataccatgaacttttgcgcagaacgaacctgttacttcattttccctaactgccaatcacttttccccacaccttagaccaccccacttccctaactcgtaattatccctaagacttctcttccgggaaacggatctgagagctgctcttctgccttctccctgggcagccctgtgaataaatcttttctcttttgcacaaactgcttatcacagtgattgattttctgtgcgtgggcagaacaaaccaggtcaataacactgctgtgtgcggtggggctgtgggacacccaggatgatcatccccagcgagtttgtgaaactcccggctgacgactttccaacgaaccttacacaagccctagcaggcggctccccagagagctcattccacactctcataatgggtgattgcctgcatgccagctccagcctctggcacagagaacttttcagccagtggcagtgggaagtgctttttccgctttgttcctgtcttggatgctctgcctcaggcctagaggcagtggctgctctggagagttctctactcttactagacagtatcctgctactagttaataattctttaagttgaacatttcttgttcaaattgccatgcggtttctgccttctgactagatcttaactgattaaattaagtagtggataacagagaaggaagctgggagaaaaggaaaaatgaaagggagggcaaaagaaatagagtagaaagttgaagtgattagtgtgggtccatacagcttgatggaaaatgttctgactttggatcagaatcaagtccgtagaaggaatctttcagcctccttctgagaatacagccacagtgtgtgaatctgagttatcttagttcagctccttaactttacaaaggataggatcattttctcttttatttgatgcccatggagatgaagtcctctttttgtgtgtaataggtgatcagtaattttagagtgaaatgaaagaaagtagctcatgaaagagagttgtcttgctgatatgccacccccttttcagatgaaacacacaggagctggtaaaaacgacctctgaatcagctggcctgccctatgaggataatgtgttgttcttttttcctcctgagcaagcatgaccctagttctcccacactc

SEQ ID NO: 46184 - DNA, 1646 bp, Homo sapiens
ggaactgctccagcaccaacaattccaggatctgctccttggtatgtatctctgggttcagccactgacggcaaagttcccgcagttgactcagagcctccctgggcccaggtgtctcctgatagcagaactgcctgaagcgctgacgagagagttccctggtataagacaaattcctacgtagggctgattcctgatcccaagtgtggtcttcttctttaacctttactttgataatctccccttgttcttctggagcctggccagccaaggctgggaagaccctagagactgcttccatcccgagcttagacagctcaggcaaaggttctctccagttggggtctaggcaaatgggtgattttacttgagctccttttttgttcttggtcaggaaagtttttgatataagaaaacactcaacacaggacaactacagactcagtttaaaaggacttgtttacgtgacaacacagggcagttactcgggcaattccattgaaagtgaagccatcctctgaaaagaccagaaatagtgagcacagagcgactcactaaagcttcagggtcacaaattgagcggcaagatacttgcgagacagaaaaccgaggttatgacggatactttggccctaaataaagcctgggtgtatgagcctaggcaaggaaacgaagatcggagcagcctgggcgagggcggagagggagaggggctcacaagctgcctggggaagaggcccgattgtcgccgcgcacatgcacccttccctcggccgcagctcccacctctgaggagctcagaccctgtggaacccagactagtgggtcgagggaaacactctacagctcaggtggaggttccgcagacacacccgcagctgtgcccgtaggttccggccgggcccggtgagccacgctcacttccggtccgctctaggattccaggtggtgccgtcttctcactggttgtgcaaacacctacggtaccagtaattctggggaggcaagtactctggaaacgacggagaattaactccggaattacctagttatctggcatcacggtgaaaagagttccacagtgtgagtagtgctggagtagatgctgctggtctgtgttttcctgtcaccgtgataaaccatcgctggcactcagacccgtggtgctcaccgcagcgacctgaaacaaaatggagaggagcatccctaaggactaccacgtcagcgaatctgtaggatcgtcccccgcctttcctcgttaatttcgggccactttcacctttccctttcaccctaaatcagacttaaaaagaaatgtaagagttagtccattgtttccattttacggattagaaaaccaagaccaccgagaatgagcctcagttgtttagtcacggagcacagagccgtgactaaacaactgtgggaaactggtcccagaaatctaacaaaatctggacggctgatcagcgcctagcgaatcactggagtggagtaaccagaacattcttttcaagcagtcactgggttcctccatacctctggtagcgcagagatgcccaaggaatatttgttgaattgctgcctggttcccttctccattctctgtttccttctgctgtggtcctcatgttgatttctcacat

SEQ ID NO: 46185 - DNA, 751 bp, Homo sapiens
gtctcagctggtaccctggctgcgctactggctttggcctcctggggccttatggttgaaaacagcaggaaatgaagctggaaaaagcgagagacaacagattgtctgctttcaggctccttcctttgtaatttcactgtgttgctttctttggacgctgcttgtgcaggacccagcctagctgtttcacaaattgcggagtttgcattcatgatttcattgcaatttaccgaatctttgagaaatactgattataaatcatgaaagaaatgcaaagcaacctgtctgtggttgggggtgtagctcagtggtagagcgcgtgcttagcatgtacgaggtcccgggttcaatccccggcacctccaccagttttgggagtgcgcactttctcctctcaatggaccgcctttccactttcctttctccctcccgttaaataaacctagtctcattcattcaattttctgcttgtctgtacagcctttgcagtgttaagtatctgtatcgatagcattgccacaccaggaaggtcttgaaccctttgtaaaagcattttcgcaaattaatcagcctggtttctttggatttcatgctatggtattactgaaaaacagaaaaaatataaaaataataaaagaccctttgttttattcactgttttttttttcttttcttttttgaattctgaagagttcttagagcaaagaacagcatggaggtggaatagcagaaacatatcttattgatgtct

SEQ ID NO: 46186 - DNA, 928 bp, Homo sapiens
gctttcatgcagtttgcttgtgaatggagcttgaagcaggctaacaggaactggaaagtccgaggataagaaactgcgtcatttggactataatcttagtgtcttagtatactgttataagtatattaggatactgttagctgccaaacagtatccagttcagtgatttcacgaaagtagtggaatttaatccagcgatctttctccaaccaacagaaaatgaaaccaacaaactgaaaacaagtgatattttatatataagccaacagaactctcatgcggtcagggggtgtagctcagtggtagagcgcgtgcttcgcatgtacgaggccccgggttcgacccccggctcctccagttgtccattttcttcattctcctttctggttctttgcatgcgtttgtcactttttctcctactcctataaaaagaggacagtgtcaaatgtgttgcttttaatactatgctatttattctggcactcatctgtggctttttataaaacttagcttgagaagaatgtcttgctaacgtgagtgaaacaagcagacattgaaagggggacacaaattaccccacaaggagttcttctttatattttttccagacgcaaatatcttttaaattatgttgattaaggttaaaactttctaggcttacatcaaagctgtgtgtgggtcatggcatcatttctaactgtatgtagatatcgacttgtagcccagcgtaaaaaaaaaaaaaaaaaaaaaaaaaaaaaaaaacctaaatagataaattttccatcaagatctccttggcaggaagcacgaaccctgcaatctcattacggacccatgcactttgagttccgtttggcggtatcgctaaagagatagactaaaaaagaatggaaataagaaaaaataggcagctcagagaaaattttcc

SEQ ID NO: 46187 - DNA, 557 bp, Homo sapiens
tctcattaatcatagtacaaaatgggagtgaaagcgagccgcctgtgaatgtgcacgcttttgtttgggttcaagagaccgtgttgcgatcccgttcttctttccccctcatttcttgtttgtctcccttctgctgtggcaatcgcctttggtgatgtcgaggttcacagcataaccagtggagatagttcaaggctgaacattgggctacacttttactgtctatatgtgcagaaataggatagaaaaacgtgaggaggcagaagtctgtcgcttgaaaactaccagagcaaaaccatcgcttggaggtgtcggggatcgaacccgaggcctcatacatgcaaagcatgcgctctaccactgagctacaccccctcactataaggtctctttgtaataattttcaggaggtaactttcatttcctgagactccgtgagcatgctggtagtagtggtcagtattatggagtgcggagagctgttctgagcaggagatacttggtactaatgggggatacagattctttagaatactgtgtaggacttgaaacgaaaa

SEQ ID NO: 46188 - DNA, 1930 bp, Homo sapiens
ccttactccatccacgtcaaagcacgtcatattgcttcttaaatgtgcaaaagaatctcttgtggatcttgttaaattgctacttctggttcagtacgtctgaggtgaagctgagatttcgctcttctaacaagctctccggtgccaccaactcttgtgtggaccaagagtctgaaagatatccttacgatagagggcgcacctgtcttaggtaaaattacttctgtaacgtcatctaagggaagtcaaattatccggcaggagtgaagacagaataaaactggaaatcagtccgtgaactttgagatcttcagcagagcatgcttcccagtggagctatttcggcagaagtgtgacgcctctacattcattgatgaaaataactttctcaatttcccagtttggaaggctttgcgtttgtcagggctcagcctgcgatggatcatggctaaacaaggaccagaaaaaaaataaaggaaatcggctgggagcggtggtggcttactcctgtaatcccagcactgtgggaggccgaggcgggaggatcacgaggtcaggagatcgcgaccatcctggctaacacggtgaaaccctgtctctaccaaaaaaatagaaaaaattagccgggcgtggtgacgggcgcctgtagtcccggctactcgggaggctgaggcagaagaatggcgtaaacccgggaggcggagcttgcagtgagccaagatcgtgccactgggcgacagagcgagagactccgtctcaaaaaaaaaaaagtaataaagaaaattgagagcttacgtttttcttttattaaatatttccacatttatcttttatttcctactttttaaataacaatactccaaaggttaatgagctcgtcaatttggcgacgccattgaagttttggaatccggagccgtctttgtcttccagctccatcttttccaccttttgcttaggcagtcccccgagtcgtgtcaaggctgaggagtagaaatggaacagcactaatattaatggcaaaaccgttgtgaaatagggttactttctgtttaagcaaggaaaataaagtaaagcaatgggaaaaaaattaaaagcaaaaggaatggaggtgccggggattgaacccggggcctcgtgcatgctaagcacgcgctctaccactgagctacacccccgtactgaaacggttctctcgagagtatattcaagatcagaatctgacccttttgctaggtttcagaaccattagttgtaatcagccaaggtctattttatttagttatttctgatatctcaaatttaggttttgcgtccctctttgctgacagctgagcaaaccgcattctacaccgaaggccctctattgatggccctgggatttttctgctcgtcagtccggagtcacttaccgggcaccactagaagaacccgggatgaaacattttctcccgtgtcttgactctctcctttctttcaccgctgctttaaagggctgccagaaagccacaaagtacaaagcgaggcatttagagaccatagtagatgcaggtggcgagggaagacaggtggagaaacgcagacgggttcgtgtcggtgcagccactgctttggacccgagcctccgtcccgccgggggccggggtgctgagcccagcgaggcgcggactggggagcgaggaagaggagcacccgccagatcgcgccccctttcgggcagaatccgctcccggtccggtcccgattggcagaaaacgatacgagggcggtatacactcaacacgcgcatgaacgattcatcaagccctccgtgtgccgggtctggctcaccaacctcatcctctgagctccgggcttctgcctcccagcccaaggaacccacagggtctcagccaacactgggagagtagcttaaatgggcagaaagaca

SEQ ID NO: 46189 - DNA, 1406 bp, Homo sapiens
gaacaagaggacacctgatgggggaaaagaaaagagattgcgatgggaagagagtggtggggaaatccgtgggacagttttcctattttctgggtctgtcccttgaccaaggaacagctcaaaaaagaaaggatctaaaataaattgtaaaaaattacctgtggtttcgcatttgttttctgtctttttctttcttgcttgatcttcgataatactgggaaatgtaaccaatgtgattgggcttgttaatttggtgccttgcttgtttttcgggttttggaattctgccagtctgtgcttccgcggcctctttcattttgtctttcatctcttgacacagccacccagggtggtgtcaaagccttagagcagaaatgcatcaatattgaaagcaaaacggagcttgttttccttggtttccatgtgaatttgaagaattgagagagaatgaaagtgccacaaaaacaaaagaaaaaaaattgaggcgagtcgtggacatgatagacatgattttgcaaacaaggcacatctaggagaaaaggcgggagaaaaatgaagctggaggtgccggggattgaacccggggcctcgtgcatgctaagcacgcgctctaccactgagctacaccccccaacgctcaacgtgggccaaaatatttctatgacctgttactattatcggtcgtgccaagaagcatattttgtcgaacttaattttgaattcgctatactggatattgtttcctgactgcgctgagagaaggaaaactgaatgttatatcgaaagtcccgtgctgggcctgggatctcccgctgcaggtcaccctctcggacggccgctcgacaaccacctatcggggtttataagggagccgtcctgcctggccgccccccagagaaaggtctgtgatggggtgattctgcttggaaaggttgccaggaaaccgcgagcataacgcagaaagataaaacgaaagccctaaacgccgccgtgggaatttaagtccaaggggcagagaaaacaggaggggaattgcagatcggcttgtcccggtcgtagttactgcccctgcaggttcccgcgcccagcctcgggatggagaacctggcacgctacgtttcgcgggctctgagactcgggtggtgagagtcgccgagatgcgcactgggaagagaaaagagccaggacgcacctgcatttatggcgccatcgcccgggcggaatcctccacggaataaaaagtatgcagaagcaaggcgatttatgactgcataaaccctccgtgctcctggagagttcttagacctctccactccttggcacaactgacctctccactcttcgacaaactggcaagcgcttgccgccgttcgccaaaccttggtacgacagtcaatccagaaatg

SEQ ID NO: 46190 - DNA, 650 bp, Homo sapiens
agcatcagttcagaactgaaaatctccctatcccacttctcgaagccattaatcagagatttcaacagggttcaccgctgatgacccatctaactgctcgtcctctcacagtttctgacaactgtgtattagtatttgcaagttttggaaggtgttgtaaatagtttttaactgttagtgaattttaatttcaaacgaggaactttttattaagctggatctttgaagtcagcacttaaaaagcccccttccccaccatgttacattccctttgtgtgctatataagcatctgtctttggcggttggccgcgtggcctaatggataaggcgtctgattccggatcagaagattgagggttcgagtcccttcgtggtcgtcgttttgcgttctctggttcgaaagatatttgttgattcagagcattttcccttttcttgctccggtctggctgccaattaacaactaaaggtagaagtcttatttaacgagtatatacggtgtgcctgccctgtgacaactgctttataaaagaacaaagcagaaatagcacttggcctcaaagagcttactttctactggatctaacagttgaaatcaagcaaacgctgggaagaaaaaaaaattgtttccactcctgtgaaaaaaaga

SEQ ID NO: 46191 - DNA, 2859 bp, Homo sapiens
cagcaatatttcttctgtaaaagaaaagaataagtgttccacatggaaagaacccaagatatattaagtgaaaaatgtcatagcatgactacatttctgttaaaaaaaaaaaacaaaatgttatatatatatgcgaatgcagagaaaaaagaaatgtaaaaaatacaataaatttttcacggtgattacatttgcgagaggaacgtacagctttcatatttcattcaatggttaaaatggtactcaattttgactgacaaaacggtaatgatcagatgccaaaacgagtgtgaatgtgcataatttacgaaagacatttttgagaactggttacatgagttttgaaaataggagagcagaggacctgtgtaagatttttaaagagactgcactgtcacgagccacagcgttgtgagattggtaggaaagtgctccaggaaatatctaggggagggcttggatctgagacacagagtgtgagcctggtcgagaagcgggaaaagaacccgcccagagccccttctctccattccctcggcgaggcaggaagctatctgcgttccgaatcccgcgacatcaggattatctcgcactgcagcacagagaccaatcgctagtaacctctgcctttaattaggcgttttttggcccaaatctcgcggcttcgtaaaaatatcgcgatgcttccgcttttaatgtttttagtttggacaagccctttgagataaatttaaaagccaattctttttttttttttttttttttgagacggagtgtcgctctgtccccaggctggagtgcagtggcgcgatcttggctcactgcacgctccgcctcccgggttcacgccattctcctgcctcattcccgagtagctgggactacaggcgcccgccaccacgcccagctattttttttgtatttttagtagagacgaggtttcaccgtgttagccagaatggtctcgatctcctgacctcgtgatccacccgtctcggcctcccaaagtgctaggattacaggcgtgagccaccgcgcccggtacctaaaagccgattcttaaaaatatacgttggtaattgtttatgcctactgctgagatcaggatatctctaaagtaaggagaggaaaaagaaaagtatgtgtcagaagtgggattcgaacccacgcctccattggagaccagaatccccaccgcggaggaagcttagcttgagtctggcgccttagaccactcggccatcctgacacactgcataacagccctgatttttgcactaaaatagagatcaacaagcaatgattctgtgtcgtgcacgcacgcagaaacgcgatgacgtcagggttgcttggtaacagaagggcagaaagccacttgtggattgaaaaagcaaaagggttcgcaggactagaaaatgtttctgcataaaactggatcaagtctcttacgggccttataactgttatcgccatctcgaaaaacgtgtgcgggttttttttttttttttttttgctcccagcctgcccagatttcaggaaggaaagaagatcttttgcttcttcggtcgctgggtcggctctccagtgtctgatgtttactgaaatcttgatcgtggttagcctcccccaggacttcattgtttggaagatggtgaggaacaaaacaaaaccctaacaaaagaccccggttctataggaaggtccccttttagcccctctattttggttccatttgtcactgccttgccactcgtcgaagtttgtcttgggctctaaaagtggtagccgggaacggctgggaaggtctccacagggaccaccacatgggcaaggctggtgtccgcgccgagggatcggcgatcccaggtccggggaaactccgcgagcgacgcgctcgcccgcggccttccttgtcgctctcggatgttcccgattaatgggctccaagtgaccactgccaggtcggggaacacagcggtagtttttaaggggagtgcaccacatcgcctgatccacttttctgtttctcagccttcgccaagcaatctgagctccaggccgggaagccccaaggtcacaaattttaatggagccctgaaactaaacagaaatcatccctcccactagaacaagagcccctagaggccagcgacaccgctaaaataacatgtgtagaccaatgccgtccaggtaacagtgcctggcaaacacggtagaggttcaataaatacattttaactcaaccgtcttaactcttgtatttggggctgtgaggttcagatagaggaaatataaagttggatattttaattagattttgtcctaatagcttactttttgtatttgttaatataaaaaaaatttcctttttgtaaggcaaagttaggtctcttttctgcatggagaaataactgagtttcagtaggctctatcttaatttccacagacttccttggtttcatatcctatttttgatagagagaaaattagtagtgagaagtacagtgaacactggttccccagtctccctccaatacatgagatttgtatattttctttcgattggaaggaaattgtccaggaagtgattcccaacatggcaactgtaatcttaccctaactataattatttttttctaattgcaaagtacacacaaattgtagaacatacaaacatgtcaaaaattaaaatcatccataatctcactagtcagaggtaactattaacatttttatatatttagtctttcatatggtatacattttccaaaaatggtcatgtgtagtaaataatttgctaacttgctttctaaatgaatatattatgaatatatacttgctaagtactatattttgcat

SEQ ID NO: 46192 - DNA, 3473 bp, Homo sapiens
tatacccctaatataaattaacacatcagccacttgttaaggccttgagactggaggaagagggcagagtaaaaaattcagaattaaggcattgttaagaaaggagaataagccaaagagaagcaacagtggggattacacaaatccactattagcaattgtctgcagaatggtaccaacgcaagctaactgtatccaataattttacctatctcagctttgccaaggatcaaccctggtctacgcagttagcaggttaaagtaaactgacaggtctgatttccaagggttccaaacttggcttctccatgctttccccaaaagtaagggaatcttagttctccgggtgagttcccactgccatgtgcggttgatccacctctacctacaagttctgggtgacatgctggacaagtttaagggaagtaacatcagctctacagaagaggagagcaccagcagaaccaactgtgaattccaacaacccttaccaagagttcagctcgtgcctgttccccctgggcccgacgtctcttctttaaatctttcactctttttaaatggtcgagctggttctggatttgctcctgagaaaagcaaaacagatgggcagttcaaaattaggtagaccttagcatcagcatggtacttcttatcacacatggagtccacacacctgatgccaagtctccagttggcgcttgtccttaggccacactgccacccacaagagactcagggcgcaggggcaaacaagccactcctttggcaatctgtgtctatcttagcagcctgtggcttcaaccactcagctacctcgtcaggactatttgtgtctatcttaaacaatgagtcatctacctgtccctggtaggatattgcatgacttagcggaactgtgactggagtaggaggcttagaactatgttgtattgtagctcttccatataggtacactgtgaaagtgacttatttccctcatgtgtgaaatgggcaaacaccatcttcccaacctactcaagagttctcaccagagtgagtgaaataatatagctgaaaggtccataaatgttaagtgattgcacatgaatgtactcatatttaaacacggacataattgtgtacgcattcctgaagccctcaacgtacagaaaatacacagtatcatggactccttgaaggtcaccttacaactgttttatatgtaatactttgtttccacgtttctgtttagctgtgccagttcacaaagggctctgtgagtcacatgattccacaatattcctcataactgtgttatctcctgagtctcagagtggttaagtgacttactccagcagcgaaaagctgttcttttctgtgagtttctagaccaggacggattgcaggaaagtgctggggaaatgcttatagactaaggaatgggcataagtcagttaacgtccaactgcgttttgtctgagagccgatgggagtaagagtgtctgcagcttgtcgatgtgtacgcggttttatgcacttcttttaaactgtcaaaaggatgtctccgtgtacaatgtgtccgtgagacaggtaacatgggggtaaacagagaaaagagagtgggggtggggacactcctggcttcctcgccagctacaggttttcctccaaatctgagtgctgaggctctggagcggacagagaggaaatgacggctgtgaaccacacgtccggctcagccattttctaggcggaaaaaaggaagcccctttggctctctcctccctttgtccgactcgcgctcccgccctcccggatccgcgccctcaccttgaagccctccaccgcctcctcgagcggcagcacgctgtggccgcggtgctcgcgggagcggtcgcacaccacgcagatgggcatctggtcctcctcgcagtacagcttcaggggctcgcggtgcttctcgcacacgcccatctcgccgccgggccccgacggccgctcggtgcgcagctgctttaccagttgggtcacgttggccaggtgccggttgggccgcatgtgcctctgcgggaaggtctcccggcactgcgggcacgacacgttagtctctgccgtgccccagcagcgggcgaggcacgcgcaacagatgttatggccgcagtcgagcatcatgggctctgcgaagtactgcaggcacacggggcaggtggtctcctgctgcaggcactcggccacactcccggaggccatggcgccggcctgcgggggcgcacgggcatgggccccggcgccgagctctgcactgagcccaactctccggcgctctctccggttcgctgttcctgagaggcaccgggcggacggagggcggcgcctcccgggcccgtatcccagacgcgcccgcgcaccgaaggcttggagtggccgggccgatgcctgcgcctgtgccccctaagcgagagcgggaatacggccggctcaccgaggctcgcggccacgctagtggggcaggaaagggtagccgagggtcagagtcccagggccaggcgggcaaagcgcgcaagacaacgtggccgcgtccgagcggatgccggcggcagcgtaaaccccaccccagcgcgagcggaagaggcggctcgcgggggcggggcttggctcgcgcttccagcgagtgacaaggtttcgtggcctgggggcctgagctgtttcctcttggaaaggccgaggaggctccgccactctcctttggactggtcgcgctgaagctctatcctagggcactggtcgcaagagcagatggtgccacacgctccgggcctacaaacttcagcggctgccgggcccgggcccctcgtcttttgttgggtttcctcttggtgccaggtctcagcccctgcaaaagaaagctggctttggccgcgcgcagtggctcgcgcctgtaatcccagcatttgggaggccaaggcaggtggatcacgaggtcaggagatcaagactatcctggccaacatggtaaaaccccatctctactaccaatagaaaaattggccgggcgtggtggcaggcgcctgtagtctcagctactcaggaggctgaggcagcagaatcccttgaacccaggaggcggaggttgcagtgacccgagatcgccactgcactccagcctgcgggacagagggagactctgtctcaaaaaaaaaaaaaaaaaaaaaaaagaaacgaaaaaatgaaagctggctttgtataggtgctggggagcgcaaacacctggcctccccaagaggctggaggatgaggagggtcaccgactgagcccacctgataagtgaggccttttattaaacagccccatttgtaggcacttgcagttttgtttagaaaaagaaaggtttaattatcagatggtaacatttctgtgtgtcaataacaagcccagttctgctacctctcacttgtgcccaagcaagttggtttaccattcatttacctca

SEQ ID NO: 46193 - DNA, 1947 bp, Homo sapiens
aaccacctgattatccttggttgtcgtacatattttaagtaaggcactaaacacctgattctggaagctctgtggacctgctccaagcctgtagactgcagagtctttggggattctatggagacccagccatttctttgggagatcctcaaataccagtgtttgtcgttgttttaatttttattttttccttgtaaattgacttggatatctcatctgtctttctttatctctggaaaactttatcccagtttcccttgacatactccttcaacctcctgggagaggtagggggaggggagatgagcctgtttgactagttctgggaatgtggtgagggaagagatctggggatttcggctcagtgctgacacttccttcatgctactctggtttagcacccctgcacttcaccctctttcaactcctgaccaagtcaactcctgttactcacatcgacagtcatttttcatgttcaagacccctgaaccgctctcatcccccactctccgctaactctcctgcttcgcttcaggtctacattgcctcgctcatttcttccctgctgagctctttgattagtttgctaagcagcatctcgggaacagcccccgtgctatgtgttctttcttgtcatggatatgtgttttttcttgtcatgctatgtgttctttcttgttcaaggcagagtcgcggctgggttgttaggatgctcgcgcccctgtacccggggcgtgcagggaagtgtaagaagggggcgaagggcgagaaacgctgaattctagcctgaattggtaggagagcctcgcaagctgagtcacggttcctgattccatttaaatagaacgttttgttcacttgtaggaatttccttttccatttctttcattaaatcgcgaacgtagtaatgacttaacgctggttacgcattcattacaatcgaagattatattaatttgcgatggtaagtgtcccaggtgtcaggatggccgagtggtctaaggcgccagactcaagcttggcttcctcgtgttgaggattctggtctccaatggaggcgtgggttcgaatcccacttctgacacaactatcttattctccttttactctactttctcagccatttctgtgttttcattctttctacctcaactttttttattctaactaaaatgatacactctcaatgaggtctgcccccttgcttttcagtcttgttcgctgtttagtagtgaatcacgttttgccccgctttggtcagttcgttaaaaggcgcattcatttaccacatgagcactcacccagaggcgtactgggaggaaactagactaggtaggaatagaaagacatgtatacagactccatcattacatactggccctgagctcataggttattgggaccgcagattacatgtttttcctcacggccagaaaccatcaaaaataaaagtgatgaaactgaaattgaaagcagcaaggttcacgctcaaggttatcggaaacaaggcaaaaggagagaaatgaaaggttccaccgagatttgaactcggatcgctggattcagagtccagagtgctaaccattacaccatggaaccctacttaacaaaaaatggatactcgatccacctggggtctctcttgtcttctacttactaattgatttaaagtaattttgcaggggcagtttttttgttttggatggccaaacgcagggatgggaggggtagggctcacacactgtttccaccgcgcctttctcccagatttctttccatccttcggggcagggcagtatactgatctgggaatatggttattcctggagatttttattttctttcgtttccagcccacgaaaaggtgaattgaattttagtctcacggtttgaaagggagaaaagagagaaaagaaaaaatatactatctactttctacagtcttat

SEQ ID NO: 46194 - DNA, 1287 bp, Homo sapiens
aattgaatatcaggttttcatctgtctattcattttttcaataaattaagttgcaccagtagaaggatactgtcccacgagggaattgaggtcagaagaactcggagaaaacagcaagcccactggaaagagatgatactcataagaagaactaaaagagatttactagaacttgataagccgtcgggacaaagagagctgagacttcgtctgtctgacaacatatgccgggcccggcaattatagagataattgtatactgaacaaatagggttatttgtggaagttggggacaaaatggcagctgccccctctgaggttcgaactcaggaccttcagattatgagactgacgcgctgcctactgcgctaaggaggcagacaactagtgctcctcagcaggtgttttcaacactgatttttaccttatttaaacatttttgtctacattacctttattttaaatttctaaaataaaatattcttatgaaacttctcaaagctcaccagcttccaaaacctgaatcagatgaagaaagtcgctgctgatcccgctgcttttgcccctcttattctgaactgatgaccccccacttctcaccttaggtggaaaatttccaaaacgtcctgtccagaaacctgacaattaacctgcacgggcgtccatccattttgtctggagagatcaggaaaacggcctgtttttctctctccctccataccggttctttcccgcaggaaaagtgatccggtgtttcccatccggaagcattgaagcgtttactatcttaaacaacaaaacaatgtcctttgacaggcgtctccacctgtcgctatctcatgtgctcaaacgtcttgtaaggccgtcttaatgtacagcaaacttcttgtaaggccgtcttaatgtacagcaaactccttgtaaggccgtctgttttaaaaaaatacctccctaagtcccactggcttttcaacccactgcagtcttccccaatcacgtctccgtctcggtcttgaggaagtccaaagggatttggacaaatgcaacttcatggggtaaagaatatggcgctcttggtgcaaactcttgggcatctgctaggatgtgagaacggtagtaatagcaggaaggggtgaaaagcttgtcttctccactgtctttgtttgccaggggattgtctggagtttagcactcaaagacccacttcccaggaaaaccctacctgggatgtgaaaagtccgggctttcggtttttggcgataggttggagagaatatatacacacaa

SEQ ID NO: 46195 - DNA, 2324 bp, Homo sapiens
aaaaccacaaaagaagaaaaacagctcctgtcttagctgattagccaaccttgcgaccttctaccattgtaacatgctctaccctaactgatcaatcaacttcgtgacactgtgctctgtgacccctcccaccttgtgataatgtaccttgtgacattcttcccttgcccgcaataaacgggcccttattgtatctttccactgcttactcctaacctataaaactagctgcaatcccaccaccctccggtggtgggactcccttttcggactcagcccgctcggaccagagtgaataaacagcttgttgctcacacttagcctgttcaggttgtctcttcagttagacgcgcgcataacactaacaattcacttaataaatatttattgagggaacagaggtcgcaaataaaatgtaattagtattgctcaagattaaacttctttcagcacgtttgccttttcttcttttatctagtgagatgttgaaacccatacctagagttctgctacagaaataaacgtatcccacagtgttcttgcgatttcctttatgaatttgagaaaaatatgaccccattttaggttctaaggagtgtttctgtattgtagaaggaaaattccatatttgtattgccgtgggcacaaaaaaccgagcgctctcatgccgaaacccgggatcgaaccagggacctttagatcttcagtctaacgctctcccaactgagctatttcggctccgcccacgccacttaaaaataaggcttaatgaatttattacttatgttttttatttactattaggtatttattaaaaaaaaaacccacaatgacaggtactccgaaggaaccaaagacaaattaaaaaattatttcgttcttcaaatggctcaccactttatgcaaagaaaagcaagaagacaattacaaattgatgctacaatttattctcggttgaatgcacacatcgaaacagagcacgttccatcatccagttacgaacttcccaaattactcttatggcattgccacgccctctgccgtccagattttattggttggtgcaaaacaggaggtcagtgaatacgagagcatgaccgtgcactaactcgtcggaaaagtagaagtcaactgtgtgcgtatgtgttgagttctcgcttcataaatatgttttaataaacctacttcagcttccctggtggtctagtggttaggattcggcgctctcaccgccgcggcccgggttcgattcccggtcagggaatgaggtttttctgttttaacctccaaattctttcatccaggaacgaaatctctgagtaaacagcaaattgtggataagttaactttcaattttcataggaggcattttctgcatagaaaccctgttcctgttttagtattccaggtacaaaatgacaagcaatgtaattttcaattattttaaaacatttattaatgaatacttaatctagcgtagaccgagtgtccggcattgttctaagtaagcgctttaacatttttaactcaattgggtgattcagtaagcgggaaattccggagacaatccattaggagttagttgagattagcataaccttttgaaaagacagttatgaagatgacagagaagaaatggcgaagtcatttctgggagatttgatcgctgtgttcaagcttctgaagctgctagagcctcggtggtttagacacctactctatcttcctcggatttctctgtaagtttcacgctgctccaactgggcgctaggggatagccctagaaatacctacacagtaatttaatattctgggccaaagcagtttcaggactgcttcatctctccagcgcttcaaccttttttcccctatgaaggtacaaattatgtttttttcctaagagaggataggagaaggtcataaacatgaaattaaaacctgctgtcacaaaactgagaaacaggcaaacaatgaattcagcaccatctctgaatgcacatttggtaaatttaccgagagctactggagaaaaagcagactttttgtttctctcctgacaaggtttggtgaccctgtgctaactggttcctgtctgacaatatcggggcatgaatctttgtttcttggtctgtctaaagagcagctattgcttattatttctttcttatatctgctaagagtttggggcacgtatgacttctctacaagtttccaaacaaagatcgtggtgctcctgatcttatttcaccaacaaatggaatatgtgattttttgtttgttttttgaaatggagtctctctttgtcgcccaggctggagtgcagt

SEQ ID NO: 46196 - DNA, 1455 bp, Homo sapiens
tgctgagattacaggcgtgagctaccgcgccccgccaagtgagtaaattttctattgggcacagagttacctgctaaaatgaagtgtggaaaaatacaatggggtgtgtgtatgtgagagagagagggagatttggaggtggggtggggaagaccctatttgaagtgggctttgaagaatgaacaagatttttattagggaacaaaatggaaaccagcattccaggacaagcgtctcaggagaagcaaaagcgcagagttgtgaaagctcttagattttcagaactttgaattctgaactatatataaacctggaaaatctcggttaactatgggatggcatcaagatttcaatttcaagctttctggtcatgcacagtaaagctggaattagagtctcttacgtatggcagttgttgacaagtccgtacaggtacctaagtgcttcccagaaaattcctcaagttggtaggtcctgggggaatcagtttagttctaaagagaggactcatcagagatctgttcaacttccaggaatctgtgaggatagctccaaatctcactctcatgcccagcctatcaaacaaagcaaaccggttggactgaagctgtgggatcgggactgaaatagaaccagcgagaaaggcagtcctcctcgattcctagagagaacacattcagccagcagttggatagaggatactagcaagtccctcgccagggcgggggagcagagacacattcctgtcccgtttacattcttcctctggcggaggcgggagggtcgcttgaagcctcggatttcgagatcagccaggacaaaaaagcgagacccccgtttctaccaaaaaggggggggggtgggcggggggaagagagagagagagagaaaggaaaagaaagagaaagaaaagaaagaaaaactaggcgcggtcacgtgtacgtgtagttccagctgctcggaggttgaggcgggaggatctcttgagcccagaagttcgaggccgcaatgagctctgatcgtggcagagcgaggccctggctcaaatacatacatactttgttctgactttgtgtgcccttactctttcctcaggtgcacgcttgggctcgttactgctcagaattttagaatcacagatccagcagtgatcaggcagctgcagctgtcagggaccaccaccacctacgcgattgatccgtgggagaagccgtcctactcttttctttctcctttgtccttctcattcctgaccccttcaggattctcagtcttccctccgggaggtagggattctacggagagagaagggttgtggggcttgttctgttgcgggttcaaacccaaattgtctttttcttttcagacttttggccagtcttgtctcgctccaacctcctacccccaccccattcctcagtgcattcgtgaatttctccaagcaggcctttccag

SEQ ID NO: 46197 - DNA, 592 bp, Homo sapiens
caatgcaattgaatgggggaggaggagaagacacaagaaacacattacttgcaaaataaaatactaagtagtacgtttcatgcctttctatttcgttctttttttgttctattttcctacaagctccaccagtgctttcagtcccaacaagatttctaaagttttgagacagaaacttcttgatcaacttatatgtacccctatactgtaatatggcaggtcttggttttaattgcttctgtctctctgtctcagcatgaccactgttgacctgtaatgtgactttcactatccaatgcaaagtgtttgccatgccaaagtccacatttactgctctctggtgctgatactatgatgagtgtgtgtgcaagtttctcagtttgagccttgatattctgggcccccagttataggaatagacttctgtgtttttcttcattctgaggccttattgtaacaaaatggttatctttttatcagacccaattattctttcactttatagatatttatggctttcctattatatacctattatgtttcagatggtagttatgtaatagtagataaaacatataaaataatcaacatc

SEQ ID NO: 46198 - DNA, 643 bp, Homo sapiens
aaaatctagtattttatatatgcaagtacatataattaatttatcctgttgactcataactttaaattctcttcttaataactttaaattttggggcaccttgcctttacctcacctctactgagacaaaaacggcaggcctgcagccttccaacagggccttttccctcatatctaataggcacttgactgttgctggagataaatatataaatgttttgaacggcgcccttaaacacccctggtctttctcaacttccaatgggctctcttctgtccagaggtcattctgtgtgtatcctgtttgtctcttgcatcaccatagcaaatgttcaacaaattcttaaatcctccaatccagtgtcccacagctctccaagcaggttatcttgccctgacttccaagacaaaacagagggcccagggggaaattccattaacttcctgtctgtcacctataaatgtatatacattcatactcttcctttatgattttttttcaggtctcaatagaggaagtgaacctctatttgtttaaggcaaattctataaatattttagggtccaagaaaaatctaatgcatattcaagtacaagcaggtgatatgaatgactgagtggataaggtataagaaaaacaatt

SEQ ID NO: 46199 - DNA, 1008 bp, Homo sapiens
gaagcaggagtctcttccatagctccttttcatctgagatgtccatgactggctcaagtgaaccacagtgtcaggagaggggcacggaagctgcaccctaaattccccgggacctgtggcaggccttcctggtgacctctgccttctcaggtgacttctgccctcctgggtgacattagttctcccctctcaagtgatctgtgccctcctaggttacctcagctctcccaggtgacctctgcctttccagatgacttcagtcttttcaggtgacctcagccctcctaagtgacattagtcctccctggttatctctgccctccctggtgaactcaggtcttccaggggacctctgctttcccagatgatctctgccttctcaggtgacattagttctcctaggggatattaactctcccaagtgacctcttcccttccaagtgacctgtttcctcaggtgacctcagctctgccaggggacttctgcctttccaggtaacctctgccctcttggtgacatagtgtgctcaggtgacattagccctctcaggtgacctcaaccctccaaggtgacgtcagccttggtgaagtctttccatgatgactttggcttttgccagaggtaggctactgcgggggcataagccatatcatgccatgagccactatcctgctcatgttccagaatgaggagacatctgggtgctggcccagctgctggccaatgagaggcttgccaagcatggtactctccaaggtgacctctgccctctcaggtgacacagtcctcccatgtgacattagctcacagtggacagctacccacgaggcatcacacagccaggacaggggacggccacactggctgggtaattgtgacttacagacaaggcaccttctgtcccctgctcattttgagcctccagggtatcccctgctgagagtcccacaggagcctgtgactggccagggacccgacaccccaagtcagatgcctcttgtccccat

SEQ ID NO: 46200 - DNA, 1246 bp, Homo sapiens
ctcatactccattcagaaatattttcccaatctagatattgcagacatttcttcactggaagatctgtgttaagcattgccttaattccaggttctctccatagtgcatattttcttatataatgtaatgtgttagatcattaacaacttcagatgaatgagttttgtgaagctctcctttgagaggagagggaagattaagtttaagaaccttaaaaaatgttaccataatttcaaatctcaccagccctgtggaacacaaagctcacccccactttttcttctaccatttatccctaagagtagctagtccaatgttttatttaaaaaagaacacagaagccagataaccagcttctcttcagacaatccctcttcccattctgcaaatgtcaatgccagcctcttctcctgaaggatgcctgcccagccccccagagccctgagtactgcccagcccccgtttctaagatctctccccaactcttgaaagtgcttttcctttccccatcccctttatcaaatcccaacttacacagaggcaggaagcattgggagccatctctgcagacaaggggccagaaaccagagacagaaaaaggactttgcatgcagcttatataccagagttgagttggaaatcccctgcctggattgctgtgtttgtccagctttgctgtgctctttgttcttgcatgctcccatgaattttctttcacttttgctgggcaggagttaatagacaaagaatgctttctgatcacatacttctctcctcaagcaatctatttgcaaacctcattccaaacatgggatggtctttctgtgttgaaaacttttcccttttctcaggaaagatctttgtctgttgaagccacctggatctatacccacagcccaaacctaagctgcagatctctatgtctagctgtgtctgtgtctatgggaattctcgttccttgaattcccggcatatccttgaacaccccaatctctctgccatctccacgccactgagcatgccttttcctccaactctatccccaccaccatgaatttataagaacacacggtgtaaacagtatcttcgtcaaaaagccttccctaactcttttcctccccatcctgggttatgtgtccatcttctatcctctacacttccttcaaatgcctctcagagcatgtttcttcaacaatagcatcgtctgcttgtctgtaatctttagaaaagagtaggaatcttggg

SEQ ID NO: 46201 - DNA, 936 bp, Homo sapiens
ctgaaagtgaaaagcagatgattttatgggaacttgaagtaggtttctactgagtatgtattgctttggtatcactattaaataaaaaatcataaatggaatcattgtaaggaaccacctctattagtatccccgttaataagtaagaagctacctcatccacaatcatattagtagtagctggtaagcaagggttcaaacactaatctgtatttctatagtccttgtattcttcctatattattatgttatttcagtgggaaaaggcagggagaaaagtgctactggagttgggtatttccagcatggggttactgtgagggcaaatctaatatactctcagaaaaaactaattcaggggattccctacccagagatgacctggattctgggaaatagtgccctttcaagaaaacatatgaacaacaaacctggactctgacctctctctctctctttactcttcccttcctatgggaaattccctccctgcccaaagccagggccaggactgtcccagacaccttggtgcccctttgctgaccacaggcaggacttcatcttgggacctgacctccttgcttcttacccagtgtcaatctgacttttttctgtctctctctatgtcacaataagttctttcagagacagatctcttttcatttgctgttttagtctcttttgcatactataaaggaatacttgaggctgggtaatttataaggaaaaaaagtttaattgattcatagttcctccaactatacaagaagtatggcaccagcatctgcttctggtgaggcctcaagaagcttttactcatggtggaaggtgaaggagagcaggcgtgtcacatggcaagagagggaggtaagagacagtgggaaaaatgccaggctcttttaaacaaccagctctcttgtgagctaatggagtgag

SEQ ID NO: 46202 - DNA, 1071 bp, Homo sapiens
agccgggcatagtggcgcatagcctgtaatcccagctactcggaaggctgaggcaggagaatcacttgaatccaggaggtggaggttgcggtgagccgagatcgcgccactgcactccagcctgggcaacaagagcaaaactccgtctcaaaaaaaaaaaaaaaaaaaagagagatttctttaagctctttgcctagggtcacaggtctttccacaggaccgtagactagagtcagatgtgttcctcaatcaattaggaaagggtggtgctggaatttgcatctgagtattccaagcttctatattctcatattctggaatgaggatattatgagtcctgaaacaactctagaaattctaggctacataattatccctccataacgtgttctctgccagaataataatgaaaaaaaagtactgtggtggccagaccccaagatgattggcgaagtgaaagttgcccagttccaaaatggccaccaccgcactttcctggcgtcggagcgactacgtagtgacagaaggaccatcagcaggtgggtgctcacagggactgtgccagttgccaaactggccacctgggcctttcttctcctgagcaacagccaagcaacattataggcttcaggcctacctagcccaggctgggttaaagcagataaacgaagcggacagcggaggaaaagcacgtaaccaagtgcagtgggtctgaagcgaaaggcaagaaaagctctgcccttaggaacggggtgtcactgcgcggctcgcaggcacctctctttgacctatttataatctgcgccttattctccgcccccaaaggctgctggcaaccaattctcggtggcgaagtcgtgacgtcagctgttgcgggtcagattgggagagcttcctggtccttacctagcaagattctgccgctaggtggcgaaaagcgaaggggccaaagaaatggaaagaaggcgaggaaaagcgggagaagatggggaaggaaaatgtatattcttgtatcatcctacagctaggcaaaaatattaggataatgtggcctaacctccagttctatgt

SEQ ID NO: 46203 - DNA, 862 bp, Homo sapiens
accaagctccttggggtgaattttcttccaaaagagtccggggagtccaggtatggaatgggaggcagaaagttcaatcaagggactgggatttcggaatgaataatgaagggagatggactgggtccatgccgaaggtttctccctggtttctcagcccccgggcgaagactcagggagacattgagacacaccctgcacaggagggggagggggagggggagggcaaagtcccagggccccaggagtggctctcaagggctcaggccccgaggcggtgtctggggttgggaggctcagtattgagaattccccatctccccagagtttctctttctctcccaacccgtgtcaggtccttcttcctggatactcataacgcggccccatttctcactcccattgggcgtcgcgtttctagagaagccaatcagtgtcgccgcagttcccaggttctaaagtcccacgcaccccgcgggactcatatttttcccagacgcggaggttggggtcatggcgccccgaagcctcctcctgctgctctcaggggccctggccctgaccgatacttgggcgggtgagtgcggggtccagagagaaacggcctctgtggggaggagtgaggggcccgcccggtgggggcgcaggactcagggagccgcctccggaggagggtctggcgggtctcagcccctcctcgcccccaggctcccactccttgaggtatttcagcaccgctgtgtcgcggcccggccgcggggagccccgctacatcgccgtggagtacgtagacgacacgcaattcctgcggttcgacagcgacgccgcgattccgaggatggagccgcgggagccgtgggtg

SEQ ID NO: 46204 - DNA, 879 bp, Homo sapiens
cggccgcgctggaagggccctcgaatgccattcacaggagcagcccaggaacccaggggcctcagaaagactggtttgtccgaaaagtgagaggagacggaggagaggagaggagagaaagtgcaggacaagaccagaaaatgcagggggcgggtgatgagcgatcccgaggaggactgaaaagagacgtggaagcagggttgaggtgtggcgggaacgggccgcgtccactccccgcacccccgacagcgcacctgagccccgcctcggccgcacagcgctcgccgctacccacccggacccccagaaacgccccgccgctgccgctccgccgaggaccgccaggaaccccacttaccagcagcagctccctggggtgcaaaaagggcagtgcggatcaggaacagcaggactaggctcatctccatggcccagactttgctttcctcgcagtggctcaagcggctgccaacccagcggagccgcgaaggcccaccagaaatttcctgtcacctggccccaccccagcgaccgctcacccaatgaaaactggcgcccgcagcttagggccaatcacgagctgggagggcggggccacactcagaaggggaaggttccagcggtcaggagacctggagaactttggctggcgggacctggagcccagaaaagggggagcgcgcggaagcgccgccaaatgcggggactggctccgagcagctgagagtacagccccaaccgcatgagcacgacctgggccctgccgccctccctgtattgcgaccaccccatccccgcacccccacccctaggatagcgtgcctcaccaagaccgtttcgccagccaccccatcaagctgactgtcattcgcttgttct

SEQ ID NO: 46205 - DNA, 1579 bp, Homo sapiens
attatttattttgatcatcataatctattgcgcacagcagggactggggtcctgtccccaccttagggggattatttacactcctaaagattacaagagtagtgaggggcagagaggtggtctcagctctcctgacacaggtctcccttccctccacagtgtctaccctccctccaggacgaccttcctccctgtgccagctctagcaaagggtctcattcagctcacctcaaaaaatacttttaatacttaaataacgacaataataataatatacaaggttagttccaaggcatgtagaggtgatggccagcagaggtgaagccaatccaccctttctgggctaggggaagcccagatggtcttccgctcgctcggggtgaggcactccccagggtcccggcctggctgcccatcccccaccaagtctcccaggccttctgtccaatgccctctccctccaccccacctccagccccttctgctctgccccatcaactacgttttcttcctcaggactcgccttagacctctgaactccggggcacagaggcgactttctcctcacagactttaggcgccactgctgggtccggaaaagaaagagaaaggacccagtgcggtcgcttacagaacccagggcggggttgggctgggcgcccgcgcgcgttttcaagcctgcggcccggagttcactgcgaggactgagatcacccgttaccccgccctggtctacaagtgtttgctgatatagaaacggaataacggcgctgtgggctggggaggacggagttgccttcaggcttctggtctccagccgcggggcactcacagctgccgctatgaaaatgcagacctgtggggcaggaattccgagtccggggtggagcgcgatgtggaatctgactcgcttgaaacagcaccgcggtggattcggatccgggtgagtagggaaatgcgcctcagcccctcccacgggccgcccacggattccaggatccgaaaacgcttccagctgctccgccaccccaggaaggcagcgcctgcctctgggcggttctgacggaaactggctcctccgcctgcaggaaaactcacaactaaggggccaggagaaagcctctcagggtcccgccccttcagtgaggatcctaaatttacatcccgagtgtggccccatcaaagactggagcgacgttcactgaaatgatacaagaccagcaggggcgcagggcgctgcggccctcagaatgcggtgacagcgccgcctcgcgtcccttccccgacctgccccaggcggacgcggtgacgtgtgttggcctcgaggctggaatacaccggggatcaagtgcagagaagggagaaagtagggaaggatggctggggggtgggggtggggggagcgtgttgaagaaaaaagggaagagagaggaaggaaagaggagaaaaaaggtgaagaagagaataacatttaaaatatagagttttattatttctaacttttatttttggtttttatctagttttggtatgtatgaatattcttaacatagctttatctctgtctctctctctgaat

SEQ ID NO: 46206 - DNA, 427 bp, Homo sapiens
accatggtgtaggggtccagggaccaggcagggaggtcttcctagtggtcagtgcttctcacagttgggagatgaatcacctttcgatgaggccaaagacctcatgttcctcactagctgacttgttcccactcagtggaaaaagaacccagaacctttgcaaaattttaggagagaaggactttccctcttgtctcttagtgccagggttatgcatgactcatacttgaattgcaatgtgtacacagcttaaagtcttaattattagaacataagaggcccaaaccactgttgttatagatatgtaaaactatgcagtacaaaattaaacaacccccaaccaattaagagtggagataaattatcaatatttgtaaatttaaaacaagatcgacagccctttagaaaaacaacaaaaaatgagact

SEQ ID NO: 46207 - DNA, 1547 bp, Homo sapiens
aaactggtctctattctatctcatgcactcaggcacaacttttccagatttaaaaaacaaacaaacaacaacaacaaaaaaccctgtctctacacctccattcccagggcaagctcactctctggcaacaagctccctggggtgatttttcttctagaagagtccacggggacaggtaaggagtaggaggcagggagtccagttctgggacggggattccgtgatgcaaagtgaagagagagggacggggcccattccgagggtttctccctggtttctcagacagctcctgggccaagactcagggaaacattgagacagagcgcttggcacagaagtagcggggtcagggcgaagtcccagggcctcaggcgtggctctcaggatctcaggccccaaaggcggtgtatggattggggaggcccagcgctgggcattccccatctttgcagggtttctcttctccctctcccaacctgtgtcgggtccttcttcctgggtactcaccgggctgccccagttctcactcccattgagtgtcgggtttctagagaagccaatcaatgtagccgcggtcccggttctaaagttcccacgcacccaccgggactccgattcttcccagtcgccgaggatggtgtcatggcgccccgaaccctgcttctgctgctctcgggggccctggtcctgacccagacctgggcaggtgagtgcggggtcgggagggaaacggcgtctgtggggagtagctaggggcctgcccggcgggggcgcaggaacccggttgcggtgccgggaggagggtcgggagggtctcagccccctccttgctcccaggcttccactccttgaggtatttccacaccaccatgtcccggcccggccgcgcggatccccgcttcctctccgtgggcgacgtggacgacacgcagtgcgtgcggctcgacagcgacgccacgagtcccaggatggagccgcgggcgccgtggatggagcaggaggggccggaatattgggaagaggagacagggaccgccaaggccaaagcacagttttaccgagtgaacctgcggaccctgagcggctactacaaccagagtgaggcctgtgagtgacaccggccgggggcgcaggtcactacccctccacatcccccacggaccgcccgggtctccccgagtctctgggtccgagatccacgccgaggcagcgggacctggagacccttgacccgggagaggcccaggagccgttacccggtttcattttcagccaaaatccccgcaggttggtcctggcgagggcggggctcggtgggcggggctggccgcgggggcggggccagggtctcacacccatctagaggatgtctgtctgcgacgtggggtcggacgggcgcctactccgcgggtatcaccagcttgcttacgatggcaaggattacatcgtcctgaacgaggacctgtgctccttgacagccgcagacacggcggctcagatcacccagctcaagtgggaggcggcccggggggcggaggttcatcctc

SEQ ID NO: 46208 - DNA, 1493 bp, Homo sapiens
tctggtctcgaactcctgacctcaggtgatccccccacctcggcctcccaaagtgctgggattacaggcatgagccaccatgcccagccaagggatttttttttatagtgatgttttacaagcacattgtctctgtgcagaggtggcccttggagttcctatgccactatgttctctgatgtcactcctcagccacctttgaattgtgcttatgcatcagaattcctgatctgctaagtacttccaggaaactcattcaaatggtaaacatcattaagcacctaccttattctgggtactgtgctctatggagttgagcctcagataaaagactcaaacttccttggacttcatagaagtcaaaggtgggggtgggaagataaataaagaaattatagcacagcatgttatgtattttacatgacttttttctttgaaagctacattattaatattttatgacagtactgagttacatataccaaagattacaaattaaaatttatgctttctttctctcttttgttcttacatatttctctgttcttgtagatattttgaaattgggtattatggagacagtgcaacagtttcatttatatgataatgttttgttttacctttattcatcaaagagagatttgtcagctgcaaatttctagtttgacattggttttctctcagatctttgatgattatgttgcttctggctgctgtggctgacaggggatagtcagttacattttaaccagttgcttcttagaggatctgtgtttctcctgtggcaaattttaagatatctgtttctctttaacatcttctgttccagtgcagtatgagtaaatgtggatctctttttattcacagtgctatgatactgttaggtatgagttctaaatttctcttaaaataattaacatgtcagtatgttcaattctttgccctctacttttaaacttaacttcctcataaagcaaccttttttgatcacctgttccaccctgactcatcctgattacttgctccagcctgactcattctggttacctgctccaccctgactcattccagtcacctgctccaccctgactcattctgattacctgctccaccctgattcatcctgattacttgccccagcctgactcattccagttacctgcaccaccctgactcattctgatcacctgtttcactctctttaaattagccaatctgaattagtttagcctgtgcggtctaaccctagccaataggggaataacacagcagcaggggccacgtgcatcagggataagaaccccttccccttccttgtccaggggtgtgctcaccattgctccatctgtgagggcacacccttgtatagaagtaattgccttgctgagaagaaaaaaagaaaattttatatttgagtgctatttctttgtggcatcaagactttatttacaataatacatttccttaatattttaagataacctctttctgga

SEQ ID NO: 46209 - DNA, 1879 bp, Homo sapiens
cttagcagtggatacttcctaaaaacagacagtgcatgagcactagtgaggggcattgcgactacattgaacagttgcaactttgaggtgaataaagcctgtactgactcctggttgtaacgtacctggttgcaaagtacacagtgtgctactttgtattgaggagatatcctggactcacacagaaactcaaagctatggaatgatggcaaatttaaaatatgacaagcgggagtcacaggtacactgcaaaagtgaaacttagaagctttgtgagtcctgttgtaacgcttttgggcacatttatacatcatggggccaaagtcacattttttaccgattagattcctgatcattcaggggttaccaaggttctgctatccaatgtatttaataaacaaataaataaataaactggtctctattctgtctcatgcactcaggcacaacttttcccaataaaaaaaaaaaacaaaaaggaaaacaaaaaacagtttctacacctccattcccagagcaagctcactctctgtcaccaaactccgtgggtgagttttcttctagaagagtccaggtggacagggagtccagttcagggacggagattccgggatgaaaagtgaagggagagggacagggcccatgccgagggtttcttcctggtttctcagacagctcctgggccaagactcagggaaacactgagacagagcgcttggcacaggaggagcggggtcagggcgaagtcccagggccccaggcgtggctctcagggtctcaggccccgaaggcggtgtatggattggggatgccccgccttagggattcgccacctccgcagtttctcttcttctcacaacctgcgacgggtccttcttccttgatactcacgaagcggacacagttctcattcccactaggtgtcgggtttctagagaagccaatcggtgccgccgcggtcccggttctaaagtccccacgcacccaccgggactcagattctccccagacgccgaggatggtgctcatggcgccccgaaccctcctcctgctgctctcaggggccctggccctgaccctgacccagacctgggcgcgtgagtgcagggtctgcagggaaatggtcgggaggagcgaggggcccgcccggcgggggcgcaggacccggggatccgcgcagggaggagggtcgggccggtctcagctcctcctcgctcccaggctcccactccatgaggtatttctacaccaccatgtcccggcccggccgcggggagccccgcttcatctccgtcggctacgtggacgatacgcagttcgtgcggttcgacagcgacgacgcgagtccgagagaggagccgcgggcgccgtggatggagcgggaggggccagagtattgggaccggaacacacagatctgcaaggcccaggcacagactgaacgagagaacctgcggatcgcgctccgctactacaaccagagcgagggcggtgagtgaccccggcccggggcgcaggtcacgacccctccccatcccccacggagggccgggtcgcctcgagtctctgggtccgagatccaccccgaaaccgcgggaccccgagacccttgacctgggagaggcccaggcgcctttacccggtttcattttcagtttaggccaaaacccccgcgggttggtcggggcagggcggggctcgggggaccgggctgaccgcgggggcggggccaggttctcacaccatgcaggtgatgtatggctgcgacgtggggcccgacgggcgcttcctccgcgggtatgaacagcacgcctacgacggcaaggattacatcgccctgaacgaggacctgcgctcctggaccgcggcggacatggca

SEQ ID NO: 46210 - DNA, 1391 bp, Homo sapiens
cagggtaaattcctgcaaggccttggtgccctgctgtgaggtcaaagagggatgggactaagactgcagagccctggctcccccactacctgccaattgccagccctttgtggggtctcttctgctttctctggcctgggagatgctggggtgtttctgatcctggggttcctggggggtggtgcacattagttccaggcatggagggtgctgtgggcactgctgggaagcttggctgtcccctcccaggctctctcctcccaggctctctcagtgcctcctcatctgtttctttagcttttggatcttgagcaccagggcccgggcccccacccactccttcccttccaggagggcctggtccaactccagctgctgtgcaagcaactcctcggcttgggccagctcagctgtgtggggggctcagggccctggtcagagggagtggaggagggaacatcagccagggtagaggggttgaggcccttggaacctgtgttgcaagatctcatggtaagtgaggaattcgacgttgttttctctttttccagcccattagcttaagtccacctgtactgagaatcccagggagcaacctgtcctgggcataggcctctggagggcagatacagatccctggctcaggggctatatctggatgccttgaatgaggatgtggggtcactggaaagagacgaccaggtgtctgtccccactaataaatgattaactgttagatgagggggaattcctgttcaaggactctggactgtgctgctctgggcagagggagggctggagagagggagcccggagggctgggttggggtgggggtggaaggagctgagagttggaaataggcaaaaagctgcagaggtgagggtagtgcagggtgggattgagagaatttcccccgactactgtactgatcccttcatctcctccacccgagcacttggagccacctagggggtggcctcatcttcccactgtcccagaagctgttctgcccttccatacttgccttggagttttgggagcagcatgtttatgagccctggggtgccagggaccaggagggcaggaggaggtgaagaaaacagcaccgagagagccaggggagtgggaggactgtggcaggtgaggcaaagagctgtctgagccgctcagcagccttcaggaggctctctccaggcctgtcttcactccagtgcctggccctacccaggcccccactcctactctgctctcaacctggccccagacaggatcccaaacaactcctgttcctaatgtgaaaaatgtttctgccgctttaggcagaacttgctttagagcactggcacagccttccgccggtcgtgtgtctgattctcttggcactgtgcct

SEQ ID NO: 46211 - DNA, 643 bp, Homo sapiens
caggcagaagtggctcagaagggagtggatggccccggttttgatcatctggggacaagaaggtcctgagataaaaacccatgttttggaaaacaaaactgcctgagactgaaaagtggctaaccaattcgctatctgggacatcactgcacactgggatggaagatggcttctgccatggtgtagggtcctggacctagacaaagaggccttcctatggctcagtgcttctgaagcacctttaaatgaggccaaagacctcatgttcatgattagctgacttgttcccactcagtggaaaaaaaacccagaacttttgcaaaattttaggagagagggatttccctcttgtctcttagtgctacggttatgcatgactcatacttgaattgcaatgtgtacacagcttaaggacttaactattagaatacaagaggcccaaactactgttgttatagatatgtaaaactatatggtataaggttaaacaacccacaactaattaacagtgaagataaattaactacattgcaaatttaaaacaagattagcagccttttagaaaaaaaaacaaaacacatgggaggttgcaaaggcaatctaaatgatactctaataaaaatccttcatgaaaatgacattt

SEQ ID NO: 46212 - DNA, 3115 bp, Homo sapiens
gtgttgtttggccaggcgtggtaatgcacacctgcaatcctaacatctgaggagctgacacaggaggatcacttgcatccaggaatttgagaccagccaagatcaaacagtgagacactcatctctacaatttctttttaattagctgggcgtggtggcacttgtctgcagtcctatctattctgaagactgaggcaggaagatcccttgagcccaggagtttgaggctgcagtgagccatgatcatgtgactgcacttcaccctggatgacagagggagactctgtctctaaaaacaaataaatcaacaataattgggtgttgtttaaagtcaatgtttgtgataatttgttatgcaatcttataaaattcatacacaggctcaacagactcggaatgaattgatatgcacactagttacataaaataaaatatttcttaatttttcagtgttttacattttataactttctgtgatgcaatttaatacattcatatttcattcattcagtcaacaaaaatttagtgcctaagatgaaccaggtatgccctcatatgctcacgtgcctgacattctagaagcttcacaagaccgaggtggagccactggagtgttttaggtgaggaaatgacacactctgactcacaggagcaggaccactgtggagagaacagtcacgtagcaggtaatgggacaatgctagagccacaatttagaagtgacagggtggtggggactaaggggagaggagggcctgagggatgaaagggacagagggaagggctggagaagcaggaggttaggaaaaggagcagagggaaggaattggaaagcagtagaattcttaggtttaaacacattgttttatagatttttattacatccatctacagagcctcgctcagtgttctttgcagttggcctttaatacctaatgtaggactgcctaaaaactaatgttttttatgttaataaggtttaaaaaacacttagtgttccttctttgcagttggcctttaatactatatttgggactgcctagaaactaattttttttaattaatcaggttttaaaaatactaagtgttcctataagatatacacaccacttagacgtgaatacttcctaaaaacaggcagcacatgagcactgctgaggggcattgtgactgcattgaacacttgcaactgtgaggtgaataaagtctgtactggctcccggttgcaacatatagtaacgcagtgtgctactttatattgaggagatgtcttggactcacccagtaactcagggctgtggaatgaaggtaaatgtaaaaaacaagcgggagtcacagatacattgtctgcgaaagtcaaacttagtagctttgtgagtcctgttgtaatgctttcagacacatttatgtatcaaggggccaaagttacatttttttaccgattagatacctgatcatttaggggttgccaagattctgctacccactgtagttaataaacaaagagaaaacttgtctctatgctgtctcatgtactcaggcacaacttttccggatttaaagaaaaaaaaaacaaaaacctgtctctacgcctccattcccagggcgagctccctctctggcatcgagctccctctctggcggcgagctccctctctggcggcgagctccctctctgtcaccaagctccctggggtgagtttttttctagaagagttcagggaaataggtaaggagtgggaggcagggagtccagttctgggacggggattccgggatgaaaaatgaagagggacggggcccatgacgagggtttctccctggtttctcagacagctcttgggccaagactcagggagacattgagacagagcgcttggcacaggaggagcggggtcagggcgaagtcctatggccccaggcgtggctctcagggtttcaggccccgaaggcgatgtattgattggggaggcccagggttggggattccccatctccgcagtttctcttctccctctcccaacttatgtagggtccttcttcctggacactcaggatgtggactcagttctcacccccatttggtgtcgggtttctagcgaagccaatcggcgtcgctggggtccctgttccagaagtccccgcgaacccattgggactcagattctccccagacgccgaggatggggtcatggcgtcccgaaccctcctcctgctgctcttgggggccctggccctgaccgagacctgggcgggtgagtgcgggatccggagggaaatggcctctgcggggaggaggtaggggcccgcgcactggggcgcaggacccggggagcagcgcaaggaggagggtcggacgggtctcagcccctcctcgcccccaggtacccactccataaggtatttcagcaccgccgtgtcccggccgggtcgcggggagccccggtacatcgcagtgggctacgtggacgacacgcagttcgtgcggttcgacagcgacgcggcgactccgaggatgtagccgcagtcgccgtggttggagcaggagggaccggagtattgggaccggagcacacggaacatcaggcccgcgcacagactgacaagagtgaacctgcccatgccgcgccgctactaccaccagagctaggccggtgaatgaccccggcctggggcgaaggtcacgacccctcctcatcccccacggacgtcccgggtcccccccgcgagtctccggctccaagatccaccccgaggctgcgggacccgccagatcctcgacccgggagaggcccaggcgcctttaccaggtttcattttccgtttaggccaaaatccccgcgggttggtcggggcgggggcggggctcggtgggcggggctgaccgcgggggcggggccagggtctaacaccctccagataatgtatggctgcgacttggggctggaagggcgcctcctccgcgggtatgaacagcacgccaacgatggcaaggattacatagcccggaactaggacctgcgctcctggaccgcggcggacatggcggctcagatcaccaagcgcaagtgggaggcagaagaatttgcagagcagatcagggcctacctggagg

SEQ ID NO: 46213 - DNA, 1734 bp, Homo sapiens
aggagatgtcgtggactcacacagaaactcagagctaaggaatgatggcaaatttaaagtaagacaagcaggagtcacagatacattgtctgggaaagtgcaacttagtagctttgtgagtcctgttgtaatgcttttggacacatttatacattaaggggccaaagtcacattttttacctattagattcctgatcattcaggggttaccaagattctgctacccactgtagttaataaacaaagagcaaattggtctctattctgtctcatgcactcaggcacaacttttccggattaaaaacaaaaacaacaacaacaaaaatctacacctccattcccagatcaagcttactctctggcaccaaactccatggggtgatttttcttctagaagagtccaggtggacaggtaaggagtgggagtcagggagtccagttcagggacagagataatgggatgaaaagtgaaaggagagggacggggcccatgccgagggtttctcccttgtttctcagacagctcctgggccaagactcagggagacattgagacagagcgcttcgcacaggagcagaggggtcagggcgaagtcccagggccccaggcgtggctctcagagtctcaggccccgaaggcggtgtatggattggggagtcccagccttggggattccccaactccgcagtttcttttctccctctcccaacctacgtagggtccttcatcctggatactcacgacgcggacccagttctcactcccattgggtgtcgggtttccagagaagccaatcagtgtcgtcgcggtcgctgttctaaagcccgcacgcacccaccgggactcagattctccccagacgccgaggatggccgtcatggcgccccgaaccctcctcctgctactctcgggggccctggccctgacccagacctgggcgggtgagtgcggggtcgggagggaaaccgcctctgcggggagaagcaaggggccctcctggcgggggcgcaggaccgggggagccgcgccgggacgagggtcgggcaggtctcagccactgctcgcccccaggctcccactccatgaggtatttcttcacatccgtgtcccggcccggccgcggggagccccgcttcatcgccgtgggctacgtggacgacacgcagttcgtgcggttcgacagcgacgccgcgagccagaggatggagccgcgggcgccgtggatagagcaggaggggccggagtattgggaccaggagacacggaatgtgaaggcccagtcacagactgaccgagtggacctggggaccctgcgcggctactacaaccagagcgaggccggtgagtgaccccggccgggggcgcaggtcaggacccctcatcccccacggacgggccaggtcgcccacagtctccgggtccgagatccaccccgaagccgcgggaccccgagacccttgccccgggagaggcccaggcgcctttacccggtttcattttcagtttaggccaaaaatccccccgggttggtcggggctgggcggggctcgggggactgggctgaccgcggggtcggggccaggttctcacaccatccagataatgtatggctgcgacgtggggtcggacgggcgcttcctccgcgggtaccggcaggacgcctacgacggcaaggattacatcgccctgaacgaggacctgcgctcttggaccgcggcggacatggcggctca

SEQ ID NO: 46214 - DNA, 4341 bp, Homo sapiens
atgtagatgatgagttgatgggtgcagcaaaccaccatggcacatgtatacctatgtaacaaacctgcatgttctgcacgtgtatcccagagtttaaagtataataatgataataataataaattggatttgtaagtgtgcctttaacaagtactgaggttaggaattttaaaaaggaaatgaggccactctcggaagatcccctcagtttagcagaacagctagatcaatttttagaaccaaatttttatacttgggctgagataattcaatcatgaatattctgtttactgggaaaaagacgggaataattagaagggcagccataatcatttgggagagacagcagcatcctcctgggtaaggagtcctgccagctaagcagaaattcccaaatgcagatcctggatgggataataatgaccccagggatcgggtccaaatgcaagaccatagggagctaataattagagggattatgcagtccactcataggacacaaaacgtccccaaagcattcaagatccaacaacaagaagaggagactccctctgcatttctgcagaggctcagggatcaagtgaaaaaatattcaggattaaatccagaggacccagtagggcaaggccttttaaaggttaattttgtaactaaaagctgatgtaatattactaagaaactgcaaaagattaacggatggaataaaaaaccaattaaggaaatactgagggaagctcagaaagtttgtgtgtgtgtgtgagagaaagagagagagagagagttaagctgctatacctgaaggaagagagagccagcggcacagctgtgtgtggcagctggcttctaaaagctgttgataaaggttactgctgagtcatttccgcagagctgcctgtttttgcagacagacaaggggagccagggcacagcacggctcggctcatgcccagagaaagaggaagaagctgagtgtgagacagaaaggaaatgggatggcagagagagaatagaagaggaaaattagcaagagagactaaaagagacagagatcaaagagaaacacagaaggtaaaactggggagacaaataatgtaaaaggaaaaaagagtacaagacaaagtgagagaatgctgagaggttggcagggctgggggaagtttctggggacttaagcaacaaggaggtgcaggggaagggtgcatgcagtgcgtggccactgaggaacgacaaaacccgggaactgggggatggatgcaagtgagaaagggatgtggaggagagtttaggatcaggctgcctgaggtgtaatgggttgcctacagcaaaaactagatggctgtttatcaggaggtggtcaaaaggattcaagttatggaagagtaaatgaataagataacattaaggttttgttgttgttttagtgagaggctggaaggccaccaggggcagttagctgtcagtaaggcagcagaagggctggggtcgctacataaggaaaatcagtactagggctgtaaactcaaatgactacagggccagcaaataataaaaaggagggctgcagggctgggtgggaactgtggcggctgctcagctcttcttacagtgctggcactgtgttttcagattgtctgctttgtcagaggacaaaattctgactttttatgtaaaatataattttaaaatgctgatattctgttcaaataacttaaaaacccaaaacaggcaaaagaggatgccagtttgcaatccctgaagtagagagagctcgtgctggggaaaagtctgccaaaatgctttaaggtggaatgtgtaaaagttctgtttcccagagtcgggctgggccaggggaggatccttgcagcccaggaggaggaaaagccactaagtcccctcccagggctggacaaactggagaccctttacagttgctgggtcaccagtgggggttgcttgaaacacaaacagtgcacctctaggcctgccacggagaggaacggtgcctttgaagcacaaaaaaaaaaaaaaaacaggaagggagggcggagccagaaatgccttttctaatgagagtacccatcagggaaggctccataggctggcagatcttcaaaccagcagctcttggcccaaagccaaacccagcagggcccggccaagggcactctgggatgccagctgatcagtcccttgcctccccaagacctcctggggtcaatgggccctcgggaggtgactaaactaacaccagccagtttcttatgaaaaggagaggagaataagaaggcgtcagagtataactgtttagatatcacagagtatcaaactaaagttagtaccaaaccttaaaggaactctactacataatgggatgaggttgtttatgaatgggtcatcctgagtaataaatggtaaaagacacaatggctgtgctgtcatgaacaaaaacaaacaatccttatgtgaaaaagttaaattactcaataactggtcagcccaaacctgtaaattttatgcttttaaccaaaccctaaagctcctagaagatcaagaagacactatatatactaattccaaatatgcctataaagtagtacacacctttgaaaaaatctggacagagcagggcctagaaaatagcagggcaaaataattggtacatggggaacaagttttagaaagcctcctgtttccagcagagacagccatagttcatgtaaatggccatcagaaaagaaacactatagaagctgtagggaacaggcttgtggataaggctgctaagcaagtctccctggaggaaaaatttaaactgtttagcccagatatccctaaggtgatattaaaaccccaattttcaaaagaggaggaaaagctaggcaagataggagccacttaaactaagaatggaaggtgagtgctccctgatgggagagaaataataaacaaacccataataaaaaatctaatgttggccgggtgcggtggctcatgcctgtaatcccagcactttgggaggcggaggcgggtagatcacaaggtcaggagatcaaaaccatcctggctaacacagtgaaaccctgtctctactaaaaatacaaaaaagtagccggggcgtggttgtgggtgcctgtagttccagctactcgggaggctgaggcaggagaatggcatgaacccaagaggtggagcttgcagtgagccgagatcgtgccactgcactccagcctgggtgacagagcgagattctgtctaaaaaaagaaaaaaaaaatctaatgtctatattgcataagggaagtcattggggtccccaggacatgtgtgatgaaatactaaagaattatgggtgtatagaaatgtatgccctggctaaacaagtgtgtgggaattgtgtgaactcccaggaaacaacttaaggttaaaagaacttgtaacacaaaccccaccccttgagttcacagttcaccacttccagcctggcaactcagtgctaattaagacttggaaagaagacaagctccacccaagctgggaaggtccttatcaagtgaggcagctgtacaaacagctgatcaggggtggacacattacactcgggtcaagaaactggttaaaaaaaaaaacggaaggtaaattggaagtgtatagatcacctaagaaaccctttaagctaattctaaggaaaacctaaaagtaagccataagcaggctccatcactgggggctgatatggttagaattaatcctaacacaaggggtgaaaggaaacctaagtattgtataagaaccacacgccacctaactgtaaaaatttaaagtgcaatcctatattaattactataaacaacccagctactctaaaccagaaatcttgaaggtataaattaaaaataaatatctcagaaaggaatcccgtgggacggttagcttttaggttagtcaccaactctaccccaagcccacccagaattactagaactcctggtcccattaacttcctttaacccaccaaacaataaacctaagagagtaaaaataattaaagtaactgacttaaggcagactttaaaaattaaaacaggatatagagacataaatgcctgtgttaaatgggtgaaattttcagcacaagccctcgataaaagtaactgttatgcatgtgctgctggtcaacctcaggcacaggtggttccatttccccttggaggggatactaatcccaaaggaatgtgttgcgtgttggctgtataccaagacaaggttgcatggggaaataagacttgtaaaagtctgtcattgctctttcccactttgcagagatcagatcctaaagcaatccc

SEQ ID NO: 46215 - DNA, 1758 bp, Homo sapiens
tcgagcattatcatttattgagcacagcagggactggggtcttgtccccaccttagagggattatttacactgctaaaggtcacaagggtagtgaggggcagagagggagatggacccagctctcctgacgctggtcccaagctcttccctccacagtgtctaccctctctcgaggactttttctccctgcggcagttccagcaaaggatctcattcagctcacccccaagaagacttttaatacttcaatgacgatgatactaataataatatgcaaagtttgttccaacgcatttagaggtgatcgcgacaagacatgaagccaatccctccctttctggggcaggggaggcagtgatgatcttggactttggatgagtcgctccccagggtctaggcctggctgcccctccccaaccaaatctcccaggtcttttctgtccaaagccctccccctctaccctacctccagctccttctgctctgagccatcaactacgttttctccctcagcactcgccttagattcctggacttaccagcacaaaggtgattttctcctcgcagactgtaggcgccactgctgggtccggaaaagaaagagaaaaggcccagcgtggtcgcgtgtgtaactcaggacgcggctgcgctgggcgcccgagcgcgttctcaggactgcggcccggagttcactgcgaggactgggatcacccatcaccccgccctggtctacggaaaatgacaagtgtttactgatatagaaacggaataacggcgctgtgggctggggagggccgagctgccttcagggttctggtctccagctgcgcggcactcacacctgccgctgtgaaaatgcagacccacggggcaggaattccgagtcccggctggagcgcgatctggaatctgactcgcttgaaacagcaccgcggtggattcggagccgggtgagcagggaactgcgcctcagcccctcccacgggccgcccactgattccaggatccgaaaacgcttccagctgctccgtcaccccaggaaggcagcgccggcctctgggcggttctggtggaaacgggctccgccgcccgcaggaaaactcacaactaagggaccaggaaaaagcctctcagggtcgcgcgccttcagtgaggatcctaatttacaccccgagtgtggccccgtcaaagactagagcgaaggtcactgaaatgacacaagatcagcgaggcccagggcgctgccgctcacagaatgcggagacacggctgcctcgcgtcccttccctgacctgccccaggcggacgcggtgacgtgtgtttgcctcgaggctggaatacatggggatcaaatgcagagaatggagaaaggagggaaggatggggggacatttcgaggaaaggaagggagagggagaaaaggggagagaaaaggtgaaggtgagaataatatctgaaagatgtagttttattatttctaattttatttttgccctttatctagttttgttatttatgaacatttttaccaaagcttttttttctctgtgtgtgaatctgtaaatatacggcttattattcttatttcagagcctgcgaggtcaagctgcagagaacatgagcttctacctccagatgtgccagggtgcatctcgtgggtgcaagaacaagggttttgttttgttttacaaaatcaaagtacaaatctcaaatagaataatatttttaaaccattattgggacatactttgcacaca

SEQ ID NO: 46216 - DNA, 685 bp, Homo sapiens
tacacctccattcccagggagagctccctctctggcaccaagctccctggggtgagttttctttttgaagagtccaggggaacaggtaagcagcggggaagcagggagtccatttcagggacaggaattcccggatgaaaagtgaaaggagagggacggggcccaagctgagggtttcttcctggtttctcggacagctcctggaccaagactcagggaacattgagacagagcgtttgtcacaggaggagcggggtcagggcgaagtcccagagccccaggcatggctctcagggtctcaggccccgaaggcggtgcatgggctggggaggtgcagcattggggattccccatctccgcagagtttctcttctccctctcccagcctgcgacgggtccttcttcctggacactcacgacgcggacccagttctcactcccactgagtgtcgggtttctagggaagccaatcagcgtcgcgcggccccggttctaaagtccccacgcacccaccgggactcggagtctccccagacgccgacgatggggtcatggcgccccgaaccctcctcctgctgctctcggggaccctggccctggccgagacctgggcgggtgagtgcggggtcaggagggaaacggcctctgccgtgaggagcgaaaggtccacctggctggggcgcag

SEQ ID NO: 46217 - DNA, 1286 bp, Homo sapiens
gatggtgaaattggctgctcttgtattttatttaaaaaatgatttttttaacctttatacaaataagcaaaaatactttaactgctgtaaaccttcaaaagttaatagaagtgagatcgtactgctttcttattttgattggagagaaattaaattgctacattttgcagtgacccatttacatggcattctcagcttagactgcataagaagaaatatatgtggtgaaatgttggaaccatttctctcttggtctctgtttaatgatgaaagagtgagctaataggaggcaatttcaacttcactccctcacgctaccccttccccctccagactggccgtttcaaggatgaaaattgcattgcaaaatcaaactgactcatgaagcatttgggccagtgcactgtttacttccatctgtttgcagacacatttgtgcccggtgtttgggagctctttgtatcaatgttccgacaagggtcccaataaccttaacctactcgaaaccagtttgggatggatatgatggggcttctgtgctattgctgggattgggagaaataaaacatgcaatttaagtggaagcaaaacaattaaaaataaaataaataaatccattgcctgattccatgtctccctccaattaccgccccatttctctgacactccttatagaataattccttagtcaattgtctcatgatgtttttaatatatcaaatggatttatggacagtgtttcaaaagccaaatacttctacaaggcttgttatgaacacagatgtccccaatctttcatgtacaccatttcctgaatcctagaggcaatctactttattctgcctaattttttgatcgttacatctgtgcctccaaatagtgtgttatagtgccgttttgtttttcactcttatgtatcatccttagtgtatagctccctttcatatacccctctcctctcaatatagttattttataattttggttagctgggtgttcactatttatattattatgaccacagaaatgctattcacagctagactaggaaatgctattcacaattagattaggaaatgctgttcacaattagattaggaaatgctattcacaaggattattttccttcctggaattgactttttaatttccctggaattaataaatgttttatcccttcatgtgcttaatttctgttgtactcattataaaatctcttccaaatttccctccaaggcctctgctatagtttgaatgtgttccccaaagttcatgtgttggaaact

SEQ ID NO: 46218 - DNA, 457 bp, Homo sapiens
gaataggcttaaagctacatagctagaagcagcatctataatcccatcctaggtggagtctcacataggaatcactgcccctgatgctgggcacagatgtcactgttcataccaatgacactctaaagctagacactggaccttgcagatagaactgctatcacgactgctcctggcaactggacattgctgctgcaactcacaccacacttactaaaatgtgtgcacagtaccagcttatgtcaccaggctgagtcagaatccagcaagtggttatctgcctggtggaacctaagcctcatcccatatccagctgccagaatatttggaaaagtgagtttttctttcgtggaagaagttggtgtctgcttcctacaatgactctttaagtatgaaattctttaagtatgaaatcatactctttaagtatgaaattctccctaacatggagagggtt

SEQ ID NO: 46219 - DNA, 2258 bp, Homo sapiens
acagagaaaggcagatgggagcctctcccagcgaaaagactacagcttgtgtccttcataggagaaaacagtgatggctccagaacttttatatgaatgaacttagcacagctatcagagtggatggtggtgggagggctagcaggaaactagtaaacaactacaagctgccccttcagggaaagtttctacttggaatataagttacagattaatgaaaatagaaagatttcccaaagatacttattctcatgttttataaaagatcagggaaatgtcagctgtccacttaacggatgacataatgaattaagagttcgataggcggcaggcacaactaaaagccaaactcgacctaagtcttatgaaatcctacttaatgagctttcttgactactgctagcctcacttatctggcaggagtcgaaggagaggaagccccaagctcctctgttccaccacctccaaagtcctgaaccccttctcaagtgtaccacttcatccctgcttcctttcgtcccgtgggactaagcattcctcgggccttcactctcaccacttgctgtccctcaaaaagccgactcacccctttccaagcgcagtgaaccgtccgcaaagcacgaggccggttgcgagctgcagaaagcccacgctcgccagcgggacccaaggaacgctagaactatacgtcccagaacacttagctttgtttttaactacggtgcagccgcaaaagggaaataccggctcaggacccaggggagttgtagttctctaatccaaagaaatcattatttggcaacgtacggttttcagggggatataccccgcgactgcgttcctgtaggatgtgagacaaagagaataaatatcccaggattgggtgctggtgggaaaatttgctggaagcgcagcattggttaccaattttgtgctcaacctctcagtaccagggtgaaagtggagacgcaatctcccttggaagacgttagtctccatctctaacgctcccgagacacggttcgcaattaattatgacgtcacagccaatcgtcaacgcgaaagcctgacgctctagccggctctatctcgctgccccgccgcgggcgcagagctggcgctctagcccacggagttggttaactcctctcaccggcccctggaaagggttccaagtcctttagtacccgacgctgtctgggaattccgggcgtttcggctccttggtcgcagaggcaggaggcgtgcgtggcaggagggttcgggttatatactcctaggtcctgggacagaatagttacgacctctgggacaggaactcttctctcttttgttaataaacttccaactccctcctcagacccgaccgcatgtctgtcatggacctcgccaatacttgctccagctttcagtcggacctggatttctgttcagattgcggctcggtcctgcctctgcccggggctcaggatacggtcacctgtattcgctgtggcttcaacatcaacgttcggggtgagaggcttgtacgcaggggtcctggcggagggcgcagggtcggaagcttggggaactcaagatcggttgggttgaggaggggatcctagagcaggacatcaggcggttgtacatttggtctagcgatgaaaactgagggaaaggatgtagggcctcctggcctaaccagccaggggaaaggggaggtttccggtgtcagctctctctggttgtctccataaccagttcttacttgcctgtgcagactttgaggggaaggttgtgaagacttcggttgtgttccaccaactggggacagccatgcctatgtcggtggaggaagggcctgagtgccagggacctgtggtaagctaatgagatcaagaactggctccataaggtgggtaggaaagaaatggaggagtgattgcaaagctctggagagttttgtgcccaattccaagagggaaaagagatgtaaaccatcgacgtttgagaggcgtgatcgcctgattcctgtgggaagtaaggggatatgaccaggcctccctaacccaccagtttcttcccaggttgacaggcgctgccctcgatgtggtcatgaaggaatggcataccacaccagacagatgcgttcagccgatgaagggcaaactgtcttctacacctgtaccaactgcaagtgagtattctttcccctccctctgctcagtctgtttgctaactaaacaaatccagtgatttatttttttgtacgaaat

SEQ ID NO: 46220 - DNA, 1840 bp, Homo sapiens
cctttctctggcccataacagtgattggattaagcttaatttcttagcaaagcatacaggttcttccatataaccactgcctacctgtcaagcttcatctggcactccctcagatccaagcggtacaaaactccatttcctgtagtgcacacatctacaactttttaagctgctcttctaaaaaaacctacttgtcggccttcctggttcttgttttaccactttcttttgctctctaagaaacgtgcatatatttttataaaatagcctatactgtaatttacgaccatttctctgcttcatcctactcatcaccccagagagaacgaatatgttggcagtatgtaactacattcagatttacaaatcagacatggcatttgttaatgccccagtgtttcatatttttgttagttttcagcatgcctgtctttcctactagagctaaaaggcagggtctgagcgtcttacgcgcctccatcttcaaggcgtagcacagtgactgaaaaaaactgacgttgaacgtgcactaaactgaactgctcaaacacctacaggcacagggcgaggggtagaaccacatcgcttgactcttaagtgtgtttccaactgctcccacttcccgttttctttagagaaacccagaccaaacaaggaaagggaaataggccacggtagggtcattactattgctccttaagcttcctcgccggtccacctacccagacaaggcaaacggaaatctgcagcaggactcagcttggtgcacacaactccgccctcgccacacccactctgcagcgtctggcccggcaatacccatctgggcgcccctcctgcttcctctaggctgtgagtacgcgtgctgccccagactctccctcctccacccacacccgcagtgacaccccttccgccaaatttgtttctctttctttcagcgcctgcgcgctgtcacgttacggcggaactaatccagcgacgcctgcgctttgacgcatttggtgccgtggaagggaaaaagggggactgcagtatgcgtcacacccggaagcggcgagccggaagtggggttagccaggttatccccaggggtggagaagcggaggcccaggaggagggggaataaagaaggtggaggatcctggctaccactctgaatccgataccgcttctcttagacctcagcgacagaaaaagggaagggtgtctcatcccccttcctcctctcctccctgtcctgagccttagccatggccgaggcaggggctgggctgagcgagaccgtcactgagacaacggttaccgtgacaaccgagcccgtgagaaaggcgggggggcggtgctgtttaggggtctgggagatactgggagggaggggacagggattagaagagttgttggaggagctaggcctagggatatgggaggtgtggggttgaatatctagggctgggagaatcggaaggtattggagctatttggagtggcagagatggtgcaggaggcaggtcaaggaacttgtaatagggaggtacagttaggatataggtgttgctgcttggggtggttatgtgtgtaagtaataaacgaaagggaaattgaggattaaggagccaggaagatgttgggaggaaatcaaaggtagtgtaagaaagcatggttggaggccaacttatcaatattatcaatattgatattcgaataaatatttattgaatggatgaatgtaaaaggaagtggcaggaatgaggaaacaagaaaaggagatgaaaagaggtattttgagaaatcagagagcaaagatgtaaatggagaaacaagaagtatttatccaaaa

SEQ ID NO: 46221 - DNA, 852 bp, Homo sapiens
agaggaaggcaaagaacaactctagcgacccagggtgatccgggtgccggaaaacagaagctggaaaaaggagatctgccccggaaaggaggcatggaaagtgtagatgtgggtcctcgaggtggcgtcgtagaagactacctctccgccctagtaatccaagcggacgcccactttgttcggacagatcgggagatcctcccgggaaccgctctcgatgagcgcctggcactgggagccgctgctgtgcagctccacgaagccggtcaagggctccacctccaggaagccccgcctgggaaccagctccaaggccaagccccggcacgcaggccccgcccccgggccgttggagctccgcctcccaggcgccgcggccggagcaaaggcccagcgagcccagcactcagcggaacctgtagaagcgtcgggggttgccccgcttctgcgaaccgccctgggatgcgaggttcagcgtcactatctcatcctgggaaaggatgagatccgggtgggccgaggctgcgtccagtgtcacaggggctgtgtgaagatgaggagaaagaggtggccaaccccgggtcaagttgtccaaaccccctaccttcctctgatacccccgtcccaccacccgccccgctcgatgccgccagagaggctttctcttcccagtcacagcctttgtggtccccagagaagtcttaggcccggcaccgcctcctcctcctcaaagttaatccctaaatttcacaatgtgttgttctgtgggcgcagagagaagttcttcattggtggtggtggtgagatcatttcaacacccgaagatgagaccatctcttccttgtccatttc

SEQ ID NO: 46222 - DNA, 1973 bp, Homo sapiens
agtcagcagttccccagactcagctctttgaacccactgtgcctgactgcgagctgcccactcaagcccaaggggtgggggcaatggggtgcaaaccctcagtgggaaggtagcagtttccagggcctcactgaactcctgggctgatgggggaacagggaagaaacctcaaatgcctacctgataattctgggcagcttcttcgatcaagctgacattatgggatttgtggtccttggattcacgacacacaaaacagaggaacttcccatcatcctcgcagaaatagtggaacatctcctggtgcctcgggcatgtagcctctttccttttggactgcacctcagaggcttgtagagcttggattttctccaccagattccgcaacagcgagttgaacctgattgcgttcttccttacggaagttttgcagaggggacatttgaaaaatccacatgatgtttccccaatctgagtgatgcatttgaggcagaaattgtgcccacagtcgatggtgacaggtttctgcagaatgtccaggcagatggggcagatcacttcctcttgcagtttgttcacaaactgcccactggccatgacagaacaacagggctgtttcaagactgtaggaagctgtgccaagtctgtaggagccccggagtccactgtggatactgtttctaggaagggagaagggagtcagagaaagtggaggtcagagattctgccaattagttagaagagcagagagagaggaaaagaagagggagaaaaaaataaagaaatgatagaaaagcgtaaaatttaggatctagaaaatattataaagagaggaaaacagatgggcagtcctaccttgctacctcttgagaacaaatggatactttgaatgtgtaataggctgcttataaagtgaaataagttgtcctgaactttggactaaaggtatgtttgtatggtggttgactaagatcagaatgaccggggcaccaaacaccacttatgggggatttcccaatcagctctgagtagggagtggaggggtgggtggtgatgcctactgaaaggtcacagccagttcactgcaatgctttgggcatcttgtatgcaaagttcaagccttggtagagcatctggaaagtaggggaagggcaattctctacctcaggtgctttggctcctcacagaattttgtgaaaatgtggaggttatcatcacctaccttggggaatttccagtcacagggtcaaccaaccactccctagctcagtaggataggcaaggaacttcctttctaaagagttgttctttgtttttgcactttgctcttgcccctggtgatcttctgtctccccacaacacctgtagtagtctgtcctctgttgattttttctctgtatgtctccagtatgctggtgtctccgtgcccattctttgctttgccaattctgtctatatgttcttcttcttccttcttggtgcttctctgatccctgacttgccttctatggcttttgttatgactaggaatatatcaaccagtgttacatacattcccttctgtacattcatgtcctaaccttccctccttgcctcttgtcttaaggaaaagggtgcttcctccctaccccttctcttggtatagcttccaccctcacctcctcactctccattatcagccgtctgtccccagcaagaagtacaccattaatttttgtctgatcttaatcttaggtcaaacagggcttgtggatgattattataataatagccagagtgatcatacactctgctttgcctggaaccatcctgggtttcactttgtcctggtgtaattattaatagcacctcctttcactttcagaaatgtccagtttggactataaattatgtggctccccttatagcaactgctgtaaaccaaagactttcagaaatgttatacctccagacctttctttttgtttgtttta

SEQ ID NO: 46223 - DNA, 865 bp, Homo sapiens
ttttctgagaactgcctcatcaaacatagagcatagcaactttcctgagatttctctaaatttcctcttattcaggtcactgtgcatgacagattgactgcttgattcctggaagtctagggataaaaagtattgagtgctggtctaaaggacaggtttcagcagaggacacaatctcagagcagacaacttaagtttcagtattaggcatttccgttcttaaacattccttcactatttctgcccaagacatttctcactggtaaactttccttgttggttacctgccttctgcagccctgcaggctctgtctctctcctgggccacccctcttcctcttacacagttttatgctccccttcccttctctttccttccatcttcagtctacatatttcacggctagctttccacagccagatgtttcttgccctgaggaattatgctatcagtttttaagccaccgtttaaaagacggttgccagtgccctagagtcttggcaacaatgctccaccttccggaggtgaagcgaaatggtgtcctgtcttgaaagacagcgccacctactgtccatcaagagacagctgccgaaaacagctgaatgaccctgttcattgcctgttctggggagggtggcagataatccaggcaagaataattcgaaggtacattgaacttgaggtggtgatggaacacttaagaatgcacagaagtttaaactcaatagggatagtaataccaagctggcatcgggcctcagggaggttacaggatctgcatagtgctaacaactgtgcatcggtagaatgggaatctgaatccggacactccgcctgtgaagtccacgtagctccacctcgctg

SEQ ID NO: 46224 - DNA, 853 bp, Homo sapiens
cgtaaccccatcataagttaaggatcatctgttcaagggttttaggagctctgtgccaagactaattatatatatatctcacaagatcacacaacccacagcaaacagtggcaaagtgggattgagggaggaggctctgaaatgaggttttcaacaagcgtcttggacccttagaagtttcaagtgacagcccttattagtggcaccccttaggggctccctcaaactcaatgccaagactagcctgactggagggaacttagacaatggagtgggcatttgatgttccagcatcttgagtgggtgccattattctgtgacacctggatcctggggttccataagctggggttctaggatgtccattcttagttgagtctcatttcctgtcatatcgacgtcaaaggcccaagaccttcctcctccccttgagcaaacaagccacgccctgcaccaaagtccatctcaccttccagctaccctaggtaattttcctggtaattcagtgtttctaggaaagcatgagtctttccaccccccgccctgagatttactgacatatgaacacatatgattggcatgatataagaaccactcatctgctggccatctctccaggtctggagccagagaagatgatctgaaattgtagcaggagaaattgaggtaggatactaagaaagcttttcaggagtggggctaggcaagaggtgcagcatgagggaataagagtgaatcctcagtatctaagggaggtggcaggtggcgggggacttctttctttgggtcatctttggtggtgatttgacaggaaggaacaaagtggcttcaaacattatacaagtctctagtc

SEQ ID NO: 46225 - DNA, 2685 bp, Homo sapiens
tgggaacttgttagatatacgctctcagaatctgcatcctaacaagatgcccaggtgatttgcacacaggtaaagcctgaaaagcctgcctcagaggatgtgaaagctctcgtttagttcagtgtggtcctcgggaaagctcttctgctcaccgcaagttggctggtttccaaagctgtgcgtgccagcttggatctcctggggctgatataccacattctcccctcctcccatctctatcccacagtgcagcgacatttctcccttcagtccaaacttcatgattcctccctgttttcctcccagggcactggtgactcatttacagtcttccctcctggcaggctctctggctcacccctgggttattcactctgcctcagtaattctgaaactgtcagagtctgaggaccactttttaccaccaaaaactgctgcagagccttgcgttttgttacttttagtattcataaattgagaagcttccataaatttaggtccatctgtgggttagagaaccccctccaacaactccgtgactcccagggtcttaggctggttgattgagaaatgacagccttgaaggggtccattctgttcatttttttcccacccacaggccgccctccttctgtcatctgtgaaatgacatctgagaggaagcaggggttccttacgttctaaagaggtgattataaacccagatcaaagtcccctttatccagaaagcattcccagatggactttatcccattctgcattaatctttctatctactcgacatgcgcagatcaggatgtgagcttcataccacgaatgtagtatgtgtatgtgcttgtcctttcttcatgtttctcctgagagccttacaaacaatgtgacacacacacacacacaacctatatatacacacatgtattatatacacacacatatgtgtatatataatatatatgatgtgtatatgtatccatgggtgtttgttatgactattgtcatagtcataacatagtcatagtgcaaatcctgcaaaattttctctcctttccgaggacttctcattctctcccatcctgacataggctccttacctggctcatagtccaactcaaagcatagtttttctgtaaagaaaataaaccaggatgagattttattagtcttacaaaaccatcagacacttaatgatgagaaaactgaggccaagaagagggaagggacaagaagaagaatgtaagctggaatcctctagaccagtggttccaagcttgcatcagaatcatctggagctcttgttaaaacacatctgtttcagattcaggtgctctggggtggagctgaacatctgtatttctaacaatttcctgggcaatgcagctgctgctgctggtgggagccccactgccctagccctgatcaaacagggaccatgactgccttgctcacctctgtacccgcagagcccaggacatagtaaatgctcaagaaatatctgcttagtgaatagagaaatgggttcatttatttattattccacttggaaataattttggggagagtcaaaggtcagcctttgattagagtgaaatttccttcactgacaggtcactggaagtatttgcaggaaatggaattatgggaaaagtccttctagggtgacataactgtgggtgggtcatttcaaaattggtgtcatcattcattctgtcatggttagtgaggaggtggttggcagagagccatgtcccattcctgactctcatccaaaccctcccccacaccctaccaccactccctgttccggaaaaggaagtggagcacagtccccgtaggaccgtctaactctgagccagactaacagaaagaaagtgagaaggaaggagggacgagccagataccacagggtcaagataaatactgttgttggctattaattaacaatgttcatcatcaaaaacttatcacatattacaaatgttgctgtgggattttttaacttattaagaatgatatattgttaatcattatctttcatattgcttaatgaccactaatcagatttgttgaattattttaaaatcagtttaactttttcaccagaaatattcacctttattctctttcttcattgtcacaatatcctaataggcagattttataaaaatctgcaaataaggaaatcaaggcacaggaaggaataaggcttgccaaagtcacacctttcagcagtggagcgtggaggccactcctaaacccaggcttcatggccacctgcgctctgtggaggcctggggttctcttacccagaaacatcttcatctccctctgcagcgggagggcctgctggggaaagtcccgaatcctctggcccagctctggcgacacagccaccggtttccggcactttctggtttcacatctaggggcacagaaatggctgggtctgggaattatcatccttaataatgtctccagactcagctggtcatcttctaatagggcatgatggcgctagttcctgcaggcagacgtacttcctctaggatgaatcccactgcccatttttgggcatctatggatatacctgagaaggcatttgggtatatagaggtttatatgtaaatttgtatccttaagtgagaatgttatatacctgtgtggcaataactaggcatgcagtacatg

SEQ ID NO: 46226 - DNA, 2384 bp, Homo sapiens
ccggtatgtattttacatatacagcatgccgccattcagaccggccacatttcagtgctcagtagacacatgtggctggtggctcctgtattggacaaactagttcctgggctgcactcgtggcaggaagagcagagattggatgggaaggggaggtaataaagtgattagagtaaaaagggagcaaccacaaggggctaggctgatcacccagtgggagaatgggggaaggcctggttttatccacagatgtgtgcatgggtgaaggaccgtggctgcagatcttggtcttggcatgaggtgtgggaggagcgtagggctttaagccaggagactgggatcgtccttaacgtgatactttctagctttgtgacctttggaaagtcactttacatttggaaagtcagtttacatttctttctctgtaaaatgaaggtaataatgtttgcctagagggttattaaaattgaatgtagtaatataaaaatactaaaccctagataaatgtggttgaaactgattatctgactaatcgttttctaatgtgtatcaacataaatcatttgcattatggtttcttgccttctccccgctacagtaaaaataaataaataaataaataaataaataaataaataaataaataaaatagtccagtgttacccgaaccccaaaggggactgttgtgccaggtggtgggggatttgggaccgtaggaggggccaccatgggcagatgtggtgagggaggaaaggagagcagaagaggggacccgatgagcaatccttacaccctacctgcagtgtcgaaacagcgtcccgcccacacacttccggcagaatctcccgaagtccacacctctcactccagcctggactttgatgctgtgggcacgcctcagagccagaagtttatggctcccacctgctcaatctgacaggaagcttctgctccccagttctccccagccactgtggtctacagattccaggaaacccatccccctgtgacctcatggtgtgctctgttctccaccctagggaccagaaggagccaggagtaaagaactggcttacttggccgccactgggaaattctgggtaattcgagacgccctggaatttggacccactccgctgataggtggtggccagggttctagggaacacaagaggcggagccaggtggcttccctgtgctggcattcttgcctctctctctctttctctctctctgtctcttagccttgcagccgtttccctctgcgattcatgtaagtgtgactcgatttcagggaaagggaactcgcgtgggctgaggagaccggagtggacgggctggggaaggcaccgtgatgcccgcaaccccgtccctgaaggtggtccatgagctgcctgcctgtaccctctgtgcggggccgctggaggatgcggtgaccattccctgtggacacaccttctgccggctctgcctccccgcgctctcccagatgggggcccaatcctcgggcaagatcctgctctgcccgctctgccaagaggaggagcaggcagagactcccatggcccctgtgcccctgggcccgctgggagaaacttactgcgaggagcacggcgagaagatctacttcttctgcgagaacgatgccgagttcctctgtgtgttctgcagggagggtcccacgcaccaggcgcacaccgtggggttcctggacgaggccattcagccctaccgggtaagaagtgtagctttacctagggcctgtttggggcaggatgatgtcctgttatgaggggaggaaatcgggcggggatctggatgaaaggcttccacatcagggaaccctaaggttacagggactttcgaggcattcccagactgaaggcagatagggctccacttggatgtgtggtagttcctggtctggggggaacttcagctccagctctcagaggaccccacagaggtggagtgcaaagaactgtagccttggcttcactcactatggaaagaaagctccaatgccgagtgggatcttctgcagattatgggcagggtaaacttgttctcccaggatccagactggaaatggggtttatagggccctgactgccagggcgcagaggggagggaggagctgggaaggggaacctgctagcactgctcttcttcttgagaaagggagggtggcagtagtccagaattgtgagaattccccatctggccttggggcactttcctgtcagcctctcagatctctctcttgtcatccagtcaccaggtctggaagtggttaccttagaaacatctcccaaatctttaattctgccttatcctcacagccaggttctccctatctcttgcgcagactttgcagtctccat

SEQ ID NO: 46227 - DNA, 1326 bp, Homo sapiens
actgaggttctttaccaaaactcgagaagcatcaggaagcttcaggagtctgactgtcagcatttccctttgtgagtatttccctgggctgttctatagtttgggtttaatttgcttcccctagaaggctggactctaaacacagccctccagaggagcacagcttagcctcagtggacttgttcttggctgtaactgcctcgtctagatggcaggaatcctcaggtggctgtggctgctatgtgctgtgaggccttggcttgtacagggagcggggacacacagaaaggactctgcttctgtttacctttgtagtcctgacccagttccaggctgaggttatgagcctcagcacatctaacccaagagcagcctcctgcccctgactctgtgtgacaatacagaagtcacttaagtactgagcctcagtgtatccatctgtaaaatgggaagagtgatacttacctttaagggtttctaagcaggtcatgtgaaagaattatgggaaaagtgctaagcacaagcctggtacacagacggaaatctaggagagaacccacaacccctggtttccaaatccagtgagtgtccaaaccacaaacaaagagttaaattcaaaagtggcagcaaaagaggaagtgagcagaaccagccacagtgacacacgtgctacagagttcaacaacatcgtcacagggcagtacctggaggacttgctctcctatagatccatggaaggcaactacagcagcgctgggaagacaaccagcagggcacagaggtgactgcgaggctggaatgaagcaacctgaattacaggcaaatcaatactattaatgattatgtatggtgaaagtccatcacaacagagttcagtggcctctgtcagtagtgacattaatgggacagaaataaaacccccagtctataagacccaagagtaaacaaaacagggatataacgtccactcattgagggtctagtacaataatacataaaaagtgttttataacgtaaaaggactacataaatataagagattcttatagtgctgataataaattccaactggaagcactaatggatctaggtatgtgtgactttaagagacataatgaggggaaaatcaagcaccttcaaagctcaaatgaaggattcaaggaatttaactgtcaagtgaaagtaatatcaagttcctacatgttagtaatgctggtagaaatgctaggaattggccgggcacggtggctcacacctgtaatcccaacactttgggaggccgaggcaggtgaatcacaatgtcaggagattgagaccatcctggct

SEQ ID NO: 46228 - DNA, 2522 bp, Homo sapiens
ggaggactgcctgagcccaggagtttgagaccagcctgggtaatatagtgagacattgtctccaaaaaaagaaattagctgaattagctgggtgcgatggcacatgcctatagttccagctacttaggaagttgaggcaggaggatctcccgagcccgggaagttgaggctgcagacagccatgactgcgccactgcactccagcctgggtgaaactctggcctgcctccggctcctagatgccacccagagaggtgccctggtagacagtgaatcccaaatgtggactctggggcccaagaaagtaaatggagaggcctgggttttcatcctggcctccagggtaccagttcaggcctctcttgagtatcccaagctgcttctcaagcatatgtctggacctccaaacaagagcaaagcacctgtaatcccaaagcacttagcctagagctccattccctgtgggtactccatttaagggctcctgggtcccagattaatccccatattttaatctgagataagcaaactctccatggggtaaacttccgtgagacacctctaacaaacctggagaggccagaattcggggcaaaaagcaagtgatctggatgtgcatactaggagtgactgcacccctactggccaggccaaaggcctggatcccaggctgtcccaggagatcccagtgactgtggatgatgcgttcttgtggtcacacttggcttactttccccacggagccgagcatcagtggtgctctgaagcacagtgcaggccacaaaaactaccagggctctgaacgctagaaatccccacagggctcaaagaggggcaggaggtagcagccagctgggaggtggatgagacaaggcgttaaattgccctggtcttgtggctgacccacaggggaaaattgagggttcttcatatttgtgccagaatatctgtctaatgttgaatcatgaaccaagctctcttgtctaaaatattcctaagtgtcacttggtgctttgcaccaaatataggaaggaatcctttatcatcttgtggaatggttcaaaccttgactacacatcagatttgtagtcttcaaactggtgagtcttcaaaacatacctagaccaactgacttaggatctccagaggtggcccaggctctggtattaaaaaacaaacttcccaggagattctaaagtctatccaggactgtgaatcactagaaccccttatttacagaggaggacagtgagtgccagagcctcggactcatttgcccagcagcagagctggctggcagcaaggccagcactagcacgaggtggggtgaggtgcacctcccagctctgggctccttccattccaccatacactgcactttggtgcctggaaaatgaactcttccctgcccatatggagtgctgtggagggttagcctcacaggcagaggaaatcatccgccggagaaagggtagcggtgaatttgaggagctgacaattggccacaggtggagtgcagtgaggcgagcagaggaagggtggagaaacaggagggaacagattatgcaagactgtgacccaggttaagaattttggactttatcctaacagccctgggaagccattgagggtttaagcagcaggatgttgaaagttattcaacagctagcagatgtttattaggtgccgactatgtgtcaggcaccgaggttacagcagagaacaaaagtggcaaactccctgtcctaccagaacttacatccagtgacctgaggaatcctttagaagctgaaatcagatccaactgtgggatcatcaaaccctcaagggtttcctgatttacataaacctcctctcccctttgctgccccagtgctgcagccactctggccttttgatcctcaaacacactcggtcacgtgttaaactgccaatctgcccgggtgaccaaccaggttaaacccctcaatggctttctggtgctccaggaataaagtcaaaactcctgtccttcctttcttctgtgaggaggctgtcccaggagatcctagctggattcccagataatcatggcccagcctgtgtctccaggctcatttcctgccactccccacctcaaactcacagccaaaccaaaccgctctccatgcctcaaagtgctatgctctttcctggctaagcccttcgacaatgtaattccttctgcctagaacaccatccctttcccacttagcaaatgccttttctagcttgaagtctcagctgaaagccacctcctctggcaattctttcctgacctgtcagattgggtccacatgtagtctagttatacagccccaaaacaccccatgctgcaccctgtacttctctgcagttttaagtcctgacttattagtgtaattactcgcttaacaccagctttttccatgaaacaaggagagagattgtgtctgtcttatcaccagaatctacatattacttggcacagagtagacaataaaaactgactgagaaaacaaagc

SEQ ID NO: 46229 - DNA, 3081 bp, Homo sapiens
ctgaaattaatgattgaataaattaataaattgggggaagagagaaacaaatcttccatgcagaataactgcaaacaataatatgtagatacttgccctcaagaagggggaatataactcttggctccctaggtatgggctgcacttagtgacttccttctaaagaggacaatacacgcaaagagtggaaaagagactaactgtacagtggagaaacctgaaaaacactatctcacccaaatcaatattaagtcataaatcatgttagtacatgcccttgatacgatgggatgataatggcaatctacctctgtggtcttcctcccagttacccataagcccagtcttaggagaaaaacatcaaattccaatagaggggcatcctacaacatacacgaccagtattcttcaatgctgtcaaggtcatcaaaacaagtctgagaaactcccacagccaagaggagcataaggagacatgacaactaaatgtaatgtggtaacctccatgggatcatgaaacagaaaaagtactgaggtaaaaactaaggaaatctgaacacactatggactttggtcaataataatgtattgatattggttaactgcaacaaatgtaccacactgaggtaagatgttaataacaggggatccggtttggagcatgtgggaagtttgtactatcttctcaattcttctgtaaatctaaaagtgttgtaagaaataaagtctacttaaacaataaaattgcaatttttgaaacataaaaagcctattttttttaaaggtgatttttttgaacttggggaaaaacatgttagggattatgatttcagctaagagttaaaaacaggaggttaaggcatgcataaacgaatgtcattctcccctcttttgaagtacacacaaatcgtgggtcaaaatttgaaatctactggagatttggaagtgtgtccctcccatttactccacagagttaaatttacactttttttctaaggccaaatagggagaaaatcagtaagaaaaatgctaatgagctggaaggagtgaaagcacagctccaagtatttgtggctaaaccggtttactccgaacaaaaaaaaaaaaaaaaaaaagaaagagaaagaaagcatgacactttggtcagggagctggattagtcgcctatctaccaggctccaagcaaccggacggtcatccaggccccgcttacttctggttccgcagactagaatggatgggagtctgagtaggataccagaaagcgagaaagacccaagaggagggggagaatgtaaggacaagcaaacaggagggatctggctggcagggaggacgcagcgaacttgaccccctcctgagcccgcccgggggcctggccccgttttgaacccgggcccggcggctgcgttgggtcgccccaaacccggtgagcgtacgagactgttgcttcgctgtatgtctcatgtgcaccccctactcaccggtcccgagctccgggccgcgaatcccggccggcacccctcctctctcacggcggtctgttccgggtcccgctcctgcacgagcaaccagcgcgacagctcgtccccgccccgtaatctcccggctattcggggcccttcgccgagatttctcccggaccagccccgggattggctcctgccgaacttcgccatccaatgggaaccttagtctcttttacgtcactgatcaccgggcaaatccccagacagccgcgggcggtggggcaccaggggcagcgaaatggaaactgaaatcaggcgggaccgaggctgcgccaagagccgcagcctgagtttggcgcgtaattggggtggcctgttacacggtctaagggagtaaatgctaaggcttaggagtcacctacgtaggactcttgagagggcaataatcccctttccacctctcgagacccctcactgcccaactctggccttatgctggatcagggtccgagggcgctttgaggcgaaggtggcgctcgccaggtgctcaacatcaaatacgaagtccccgcccctaacgtggcctaaatttgcttccaggacaaagcaggattttagcaagcaaatactctcagagacctatttacgaaaattattacttcctaggtaaaataacgttcaaccagacagccattgtcgccattcgacggaaggaaaaactgaggttccaggagcttaagggtctgggcccagttcaggggggttgttttcgctcctcgacgctgaatttagaaaccagaggctacaaagcgggccgagacttgggttccccaggtccttggtggggaggtttccaggaggctcgggcgcgcccccgtccacggccccggaagctgacgtcgccgaagcgtacgccgctgcccagcctgcgctctcttcctgctctgcctgcagccgccgcgtccggtccagccgcagggccatgccctgtgctgcggttgccgtgtcccaggcgccgccgcgtcaagatccccgtctttcccggccagccaggcggcagcggcattcagctcgtgcactgggctggcagcaggctgagaagaggcggcgcaggttctccgggtcagccagtgccctgctcctaagggtagagatctagctggggacactggtcgtccgcctaggcagtggtgagagggtgggctacagttgtttgggtattcatgaatggaggagctcagggtcctagaccctaaaacctgctgaatcttcacccctcctccgctgggggtagggaaatttgcactgcatttaagcaatgtatagtggagtgggtgggacattcagaagaaaccacgcccacatttaacacccgcgtccttcccttctaccccagcccagcattttgtctttttcccctttgtccagcagtataactcacgctgcccctccgggctgagaggagtgtagacctcacctgctgagcacaactctggcgggcctgtgctctggaggtggtctcagcacctacctagaccctcttgatacctgcttttttagttggtggtgtgggaagaaagtgtgtttaacatgctccttaaataatgctctg

SEQ ID NO: 46230 - DNA, 2347 bp, Homo sapiens
ataccttagatactggattatattttcagcaagtaaatagtttctggctcccaagatgagaggttaaataatgcagggtgtttgtaaacagcagcacaatttacaccggaaattagggccctttctcaccgaggagagtacagcaaaatctgctcatctctttcaatgaatattctccatgactagtgctggcggcggggaggcggagcaagctatcttttctaccagccgtgtcacacccctcctagcactaacccctcctcctcagccttttcacacctctacccactactagcccctccccagccccatcacctcttcccgggcccctcacacctctcccagcatactcttccccagcctcatcacctcacccacttcctccaaaatcactgacctgctaagcttccagcagcaggcgggcaaagcagggaggctgtaatgcaaaagtccgcagtccctacacaaacactatctgctcctgcggagaaactcaagtcacagccccagaagtggaaagaacaggccttggctctcacccagttaacaagcgtttatccagcgcacgtgttgcggtcggaccccatgcgaaggagctaaggacacaaaggtgagcagcagagacgcggttccagctctcccccggctcccactccagcgggataggtagataatttcggtaaatttcgccaagcaggggcaggacaaagagtatttgaagtctaccgcggggagaacttacctaatccttgaatgttaaaaggctaaaaactccactagtcggaagtgacgtgccagcttagccccgcaggtccgccacgtaattggccgccgccacagctagccaccctctccccagactggcccgaagagaggaaaagtgtggaagtccacaagccgcccccgccccgccctcttcgtcgactttcagctgcaccgggaggcggcggcgcctggccagagccggggcctggagcctggactagacagcctcgccggccggggcgccagtccagcgccctgcgggcaatgggcttcagcgctcgagcacgcgcatgcgcgggcctgtatctccagaggattcctcgggtcacctggacgccagcatctcagccacctgcccctctgggtcccttcttgcccttgattccccctgctgcttctcatcgccagccctcctcctccttcttccgcaggcaccgctagacccggccgcggccgcccgccgacaccccagcttccactgacacgagcctcggcgcggcttccgcttccggcgagtattgtgtgtcgcgccgcggggcgggggcgaggggaggaggaaggagggaggcagcgctccggcggctccgcgccccgcactcccggacccgaagccgggaaggtaggtgctgtcccgccgccgcgcccgagcctggggcctgcgctcgccggccggctccgcaagccgcgtcccagcgccccgcgactgcgtcaccggccccccgcacgtaaccacagctgcctccgcccgcctcgggcccgggcggacgttttgccgccccggcgacgtcagcgcgtccggcgttgcttggctaccccgccgttcccccgtcccgctgctgctcacctccccgggtgaaactctgacgcagtcaccgcgggtctcggcagcgtcatagcggcgggcatcccatctgcacgtcacacctctttctcacctggacacgcatcccttcctaccctgccagccacgacgtttcctctttcccctctccaatgccccagccccagatctggcggaagaagatggagaacgggggtgggacagagttgtggacaacctctcaggagagggtcgcaaggtgggaccctgaacagtggtagaaacaaaatgagattgtccctgaagtttgcccttcagctgagacacaaggagtagaggaagaggaaggactaacgcagaggcactcaaggtctcactatgactgtagttgagagtcctctcccttcttccctaaccctttccccatttctctcaccacttctttgccagtctagatccgtcctggtgccttactgtgcatacagttctactcgtctcaggtgaggaggccacttaatttgtaaaagactgaggaaggggtaggatcaccacaagtcaaagttggattcccacagatagaaatcatctgactgaacttctctcctattgctgacagaagaaattcaaatccaaagaagttatcagttcctactccaaatcaaacacatttgtgtgtgccaacaatatatacaggaacaattgttgttaacctacctcattacatggccacttatctctcagcacatagatctaccaaatttc

SEQ ID NO: 46231 - DNA, 1278 bp, Homo sapiens
cactgcataacaggaagtgtgtttctttggtaggtggaatagtaggagtaaactgtgctttctgaggaccgggagtccttttccctccctccagcaccctcatgatccttcccactttcacccccactggcaccagtgcttttttttaatgtattacctctgtgccttccgtctgtagatcttacaggcatctgcctcggacctcaggagagtagggcagaagctctagctgggtataaattgcacataaccatctccccaacgtagctacataaagagaccagccttctgtcctgaaaatggccgatttaagatcctcacctgctccactaggtctctaggtgatataattggtcatgagcttgaggaagacaaaagcactgaaaattcataaagggaccctgggcatggattgctggggttgtgtttagaaaccgatgagtttgtgaggcctccgggaggctcccgagggcgcggggactacgtttcccaggaggcctcgcgcggacgcccgggcggggctgtgcgaggggtggggctgcgggaggccctggagcgcggcggtgatggcggggccggtgaaggaccgcgaggccttccagaggctcaacttcctgtaccaggtgagtctgcgacaagggccccacggggacggtgctcggcgtcccagagtgactgctcccctcccgcaggccgcccattgtgtccttgcccaggaccccgagaaccaggcgctggcgaggttttactgctacactgagaggaccattgcgaagcggctcgtcttgcggcggtgagacagccacggggcgggcggcgggcgggacgcgggaggaacgcgagagggagcgcgggcgccagaccactatcctcctccgcccccagggatccctcggtgaagaggactctctgtcgaggctgctcttccctcctcgtcccgggcctcacctgcacccagcgccagagacgtgagtgctccaacggaggtggaagactgcggagcattgggggcgcggaggggggcggggtggggggcgggcactggaggccaacagcgcctttctcactgtagatggatgttgggtgtgggattcgcaggagtcttccttcttcgggtttggattaagttcctaacgccacttgcacaaactagggtttgggctcggctgttttttttttttttcttccagtgtgggcaataaataataacttttaagaggcaaccccacccatgcacaataatagatgttgttcggctttgtggaggacgattcccat

SEQ ID NO: 46232 - DNA, 808 bp, Homo sapiens
gagcccctagggatggagaacagaaggccacttttcctaaacacacacgtggttctgtcctggccagatcagtggacttccagtgtccttcctgagtcacaccgaggtgaattgcatagaccagaaacccacattttaaaaagaataaaataaaataagtggcctgtagtgtgggggctggggttggtgcgggcttccggcttggccgcgggtgtctgcatcgttcagccccggggcttttgtgtcgggtctggcctggctttctgtccgcaagtttttgccctgctccgcggcgctcctccggggcgggagccgcgaggcccgggcgagctcgggcgggaccggaggctgcgaaggctgccgggagcgggactcgcagctcctggatatgccagcgttcctggaagactcctgggtcctgacgaaagacaagttgatgagtgagttggtcgccattaaagtgaggctcccggcccggagcagcgcagagaccaggacgcgcagcctcgcctgcagcactcggccctacctctaccccgccgctacctctaccccgccgcggcgccgacagcgagggccccgcctcccccagctggctccagagccaagccacccacagcaggaaagccacgaagaaaacagttcaactcagaccaaaagataaagctgatctcgaggtaaccgcgctcactaatgaagatctcgtggacccgcttgcgaggtataaagagaaacctagtcctactggagaacaaccaggaagcgatgtgagaaaaaaaccttgaaaccgaaggaacgaggacgatct

SEQ ID NO: 46233 - DNA, 1534 bp, Homo sapiens
tattaatattctcttaaatgaattaatatttttaatattttgttttaatatcttttaatttatatatgataaaaattgatacaatccacagaaacaaaatttatttgggtcctcactaatttcttttttcttgttgcccaggctggagggcaatggcacgatcttggctcaccgcaacctcctcctcctgggttcaagtgattctcctgcctcagcctcccaagtagccaggattacagccatgcgccaccacgccggctaattttttggacttttagtagagacagggtttctccatattggtcgggctggtctcgaactcccaacctcaggtgatcagcccgccttggcctcccaaagtgctgagattacaggcgtgagccaccgcgcccagccaggactaatttctaagagtgtgcagagataccgaaacctaaaagtttaagaactgctgattgctgggaaactctgcagtttcccgttcctctcgtaacctggtcatgtgtccttcttcctggatactcatgacgcagactcagttctcattcccaatgggtgtcgggtttctagagaagccaatcagcgtcgccacgactcccgactataaagtccccatccggactcaagaagttctcaggactcagaggctgggatcatggtagatggaaccctccttttactcctctcggaggccctggcccttacccagacctgggcgggtgagtgcggggtcgggatggaaacggcctctaccgggagtagagaggggccggcccggcgggggcgaaggactcggggagccgcgccgggaggagggtcgggccgatctcagcccctcctcgcccccaggctcccactccttgaagtatttccacacttccgtgtcccggcccggccgcggggagccccgcttcatctctgtgggctacgtggacgacacccagttcgtgcgcttcgacaacgacgccgcgagtccgaggatggtgccgcgggcgccgtggatggagcaggaggggtcagagtattgggaccgggagacacggagcgccagggacaccgcacagattttccgagtgaatctgcggacgctgcgcggctactacaatcagagcgaggccggtgagtgaccccggccaggggagcaggtcacgacccctccccatcccccacggacggcgcgggtcccctcgaatcttcgggtcccagattcaccccaaggctgcggaacccgcccagaccctagaccggggagagtctcaggcgcctttacccggttctttttcagtttaggccaaaatgcccacagggtggtggcgacgggggcggggcttggtgggcgggactgactaaggggcggggccagggtctcacaccctgcagtggatgcatggctgcgagctggggcccgacgggcgcttcctccgcgggtatgaacagttcgcctacgacggcaaggattatctcaccctgaatgaggacctgcgctcctggaccgcggtggacacggcggctcagatctccgagcaaaagtcaa

SEQ ID NO: 46234 - DNA, 1343 bp, Homo sapiens
tcctcaccggcagcctagatagatagatagatagatagatagatagatagatagatagatgatagatagatatatagttttttttttttttttttttttgagacggagtttcgctcttgccgctgcccaggctatagtgcaatggcgccatctcggctcaccgcaacttccgcctcccaggttcaagcgattctcctgcctcagcctcccgagtagcttgtattacaggcatgcgccaccacacccggctaattttgtatttttagtagagagggggtttctccatgttgttcaggctggtctcgaactcccaacctcaggtgatccgcctgtcttggcctctcaagtgctgggattacaggggtgagccaccgcgcccagccgggagcccctattttaaggacgctattgctgtggaggagtaaccccacttttaggaatccttttccgtgcgaaaggctgtttgagatcaggcgcaacaacttctcccgctcaggttaccctcagaaaggctatggaccccggactccgccccagattgcataacaactgaggggtgggtccctatttcctctctgggatctgtagccaatcattcacgaggtaaacagaacgaccgagtttctctcagccgagaactgtggctgcccctccggtgaaaacagaggaagtgggagcggcaggaagcgctttgggaccagggcgacccctgaagcgtagaggaaccaggtcacaagcatacgtgaatgctcacattccatagttatcaaatgtattcaggtttaaattttacttttctagaaaaaatgtaaataatccgttgagaatatttaatgaaaaatgttggtcgtatctttatctggtctgcggctctgtccctgtttcctggataggagactacgtctgtatcttgtatcacaggaggcaccttcttcctgtttcctggcacagacttgtaagtgaatttcctgcccgcctccgcccacagcgtaagccgcgctggaacagctcacttattgccccagatgtatgtggagtaaccgccttcagtttcctggttctgagtttccgtgttactcaagcaatgcttctgctgaatttgtcttttttttttttttgagacagagtcttgctttgtcgcccagactggagtgaaatggcgtggtctcggctcactgcagcctccacctcctgggttcaagcgagtctcctgcctcagcctcctgagtgtgcaacttatctttttattttatttatttataattttttggctaattttggctattttgtgtctgtgtgtgtatttttagtagacatggggtttcaccatgttgggcaggctg

SEQ ID NO: 46235 - DNA, 3081 bp, Homo sapiens
gcggaggttgcagtgagccgagatcgcaccactgcactccagcctaggcgacagagtgagactgtgtctcaaaaaagaaaaaaaaagaaaagaaaagaaaaagaaaaaagaatattttgcccttataacattattaattatatactttcaagtgagagcaatatgactaattatgcttaattatttttgaaaatgatgctttaacaatttgtaatgcagacatttgatggtctggttctatgttgagttcatgttgatacttggtcttaaggacagttagagctgataaaaataacttgtgcatagaccaggcgcggtggctcacgcctgtaataccagcactttgggagtctgaggcgggcggatcacgagatcaggagatggagaccatcctggctaacacggtgaagccccgtctctattaaaaatacaaaaaaaattagccaggtgcggtggcaggcacctgtagtcccagctacttggaaggctgaggcaggagaatggtgtgaaccttgcagtgagccgagatcacgccactgcactacagcctgggcaacagagcgaaaccccgtctcaaaaaaaaaaaaaaagaaagaaaaaaaaaagaaataacttctgcacacatcataacattcatacataatgaatcattgatatactcattaaaatgtgactcatccaggaaaatcccatccctaaattatttaaagtttttgttttccctcagctactatttctgttctaccttatgcaaactaatgagaaaccattgtcccaagactggtggcctcctggcatggttgtgcaacagctgttgtcaaactccagagtctaaagtgcaccacgaaagccagatggcaggccagatccagcctccctgctaaatgaaatgttcactggccagggagaaacaaccacgtggaaaattaaataaacccatgacatttgtagccagcagctcgggtgttttgtagggttttccctgagaagtggggactaatcgcatgaatcactttttttttctttttagagtcttatctatttgtgaataaatgtttccaattaaagcattgctactaagcctcagttttctcacctctaccatggagttaaaatgtctacttcacactgtccataaaagaattaagatggccgggcgcggtggctcacgcctgtaatcccagcactttgggaggccgaggcggacggatcacgaggtcaggagatcgagaccatcctggctaacacagtgaaaccccgtctctactaaaaatatgaaaaactagcctggcgtggtggtggacgcctgtagtcccagctactcaggaggctaaggcaggagaatggcgtgaacccaggaggcggagcttgcagtgagcctagattgtgccactgcactccagcctgggcgacagagcaagactccgtctcaaaaaaaaaaaaaaaaaaaaaaaaaaaaaaaaaaaaagccaggcatggttggtggctcacacctgtaatctcagaactttgggaaacaggcaggatcacttcagcccagaagtgtgggaccagtctgggcaacatagtgagatcctgtctcttaaaaaaaaaaagaaaagaatcaaaataaaacaagaaaacaaaaacacagaacaagtgcatcatcatagtggtgacaatttttaggaaactttttttgtttttttctgtgtgaacctaactcatctaataagggagtgtgtgaacatttccatgttggtccattttttatgtgcctaaatggacaaagtcacccaggacctggctgctggactcatccttaggaagaataaagaaaaaggaagtttatctctagcatctttctcttgcccttgttttcttcctggccacagtcatgccctggatttcagtgtctctaaacatctagcagcctctcacccagcataacccctgttgaggtccagggcacgatggtgggagtgggtgcagaagagacagagagaccactggtttgagtgtctagggtttgggtcctcaggaagaacttggcccggcgcggtggctcacgcccgtaatccaaacacttcggagaccgaggcggttggatcacctgaggtcaggagtttgagaccagcctggccaacatggtgaaacaacgtctctactaaaaatacaaaaaattagccaggcgtggtggcaggcacctgtaatcccagctactcaggagcttgaggcaggagaatcacctgaactcgggccgcggaggttgcagtgagccgagattgcgccagtgcactccaccctgggcaacaagagtgaaactccgtctcaaaaaaagaaaaaaaaagaagaagaacttcttgacttgactcagcaggactttttccatgggtctaaagctaggtgtgaagagagtgagctcgtggtgagaggaacttgttcatcaaaaggagtccatgcccagtggcagaagtggagaggtgggtatgggacacacagggaagctgctctcttctgttgtctgtggcttctgttggaggatgtgctgtgggaatgcaaggaggagatggaaggaaggtgtcaatatagctttaacaaaggaaaaaaaaatgaaaacaccgaaaccacccttgcaaaaattgtaacagtgagaaaattatgacattgaaagatatccaatctaacccaactccttcttgcctttaacctccaaattgcacttagtcattcctgagcaaaggccaagctaactttgggagaaatttcgtttacagtttaaatgataatagcccttcccaaaactaacctgtctttgtaaaaatgatgaaaggccaccaggttagggaggatgagaggggcctgaatgcaggcttagataaacaattacccgccattgtttcagaggtcacaagatttgtaacttccccaattagtcctgtaaaatgatatcactgtggccttttgagatgtctttgcagttattttttgttttgtttgctttgagacaaggtcttgctctgtcaccaaggctggagtgcagtgatcatagctcactgcagtctctatctcctgggctcaagtgaaccttccacctcagcc

SEQ ID NO: 46236 - DNA, 1056 bp, Homo sapiens
ggggagtaccagaatagttaaagtaggctgtgtatatacaatgaaatatcacagtatcattttgtaaagatctatatgtattgacatgggaaaatgagcacatcataaataaataataaaagttgcagaacaatataaactggaagaaacatttttttcaatcttcccctccatccatctttgctgatatataaacaggaaaaagttgggggagagaatacaggaacacggaacaaacagtaaacaatggttatctcatagacgtgattggcggcatttttggttttggttttctttttgagacggagtttcgctctctcacccaggctggagtgaagtggcacgtttttggctccctgcaacctccgccccccaggttcaagcgattctcctgcctcagcctcctgagtagctgggattataggcacctgccaccatgcccggctaatttttgtgtgtgtgtgtttttttcagtagagacggagtttcactatgttggccaggctggtcttgaactcctgacctcaggtgatctgcccgcctcggcctcccaaagtgctacgattacgggcatgagccactgcaccctgccatagagggcatttttgctttctgagttagtcagggttctccagagaaatagaatatacatacatacgtacatacatacatacttgcagagagagaaagagagagtgtgacttattttaaggaattagttcacaaaattgtggaggcttggtgagtccaaagtctgataggagagcccagcaggctggagacacaggaaagagttgcagttcaagtccaaaggtggtgtgctggaaacttctgaccagaacaaaagagagaggacagccttttgttctaaccaggtcttcaactgattggatgaagcccaccctcattacatttaaagttcaccaatttaaatgtaaatctcatccaaaaacaccttcacagaaacatccagaataatgtttgactaaatatctggacaccatggcccagacaagttgacacataaaattaaacatcgtaatgagatctgctgct

SEQ ID NO: 46237 - DNA, 2816 bp, Homo sapiens
gtggcccgctgtggggagccgagtggctagcggagaactgtggcatcccaggcccaccgtcttcaccagtagcagcccgctttcccccaaagctctgacttccgggtaggcgggaaagccgggaccagcgccccctcccaccctcaccgatttgggtcgtagcctcgtggacccagcccctgagaaggctgctggttaagcctgcggatatgatgggtcacagactccccgtccgaggtgtcggtctgttcctctcgccgctcccggctcccgctgcggctgttggaactggagcgcagcccatcttgaagccctgcggggaggggccggtgacgccagtgctggccagctctcaggggccataagaccctctcccccatcggcctgactccctttcatcccactcaacttcttccgatgttcagtcctcccagacaccctatttgggaccctcccggatgtgcgtggggggagtcactccttcagggagcagtggggacggcgccccgtgctagctggagggattcccctcccccaactctccatccttccccaccccttccagatgtagggggggtgggggatcccctccgcgataggccgcgagggttgacgcggtcccacgaccccctcccacgatccccagaggtgcagcgggcacacccctccttccagatgtgcggaagcccgagccccgccccctcctcccgctcccgcactgacctctcttccgctcccgtttgtcctgcaactgcttcttcttctgcttcacgctgaatggcttcttcctcggcatggcccggaccagtcacctggcccgccctccgccgagctcccgccgcctcaactgactgccccccggggcagcccccgccgcaggggcccgggaccctagaggaggcggggctagcaggtgacgtcagcgggcgggcccgacagaattaccgccgcggcggcgatggaaggcggacgggggagatatagtcacttccctccaggagcgaggcgagaggatgatgcggggtgggctactggcacgtgagagccagtggcaccgagagggcgccccggcggcgaggaaggaggcgcgcgtgggaggaccaggctaactccgtcacggacgctaccaactcgcgttcggaggagggggggcgcgtgtcatcactaccttgcgctcccgggagaacctaccactcacctggagggggcggcggagcggagggcggggcctactacctaggggagagggggcgtggacacgctgaggctatactacaaagccccgggcttgaccttagtggaaagccgagactgcgtccaggttgctggactacaccgggggcacggtcagaggtctttaggggagggcggcggtctgagagtcctgggtgccgacctgttgggacccaaattccttgtgggaacgatgataaggagcaggtttacagatcataagtgcaaaagcgggcgagaagggaaacccaagcgggacaaggacttttggggggaggtcaaagggcacgaagttgtgcctgcagctgttaccatagtaaccgaggaccggatgtggcgatcttacggtgcgacagtcctcttctcaggccctctggcccgagagcctgttgactctgtgacacactctgaggagctggttgtggtgttttccagcgagggaagaaaagagtaattttttcaaagcatttatagaaacgcagcaaagggaaggtgtgaggttgccgccatgcctggcagagacggagggaggcagttggctccggaatgcggccgccgcagatgttctccgcaaccttccggaagtggaatggcgggagcctcagcattgctgcccaccgaccccccggaagcggaaacagaatccccgcgtgccccttcctcactaccctccaaatcccgctgcagccattgccgcagacacgatgccgaaacgaaagaagcagaatcatcaccagccaccgacacagcagcagcccccgctgcccgagcgggaagagactggagatgaggaggatgggagtcccatcggtgaggggtctgggagggatgtgcacatgcctgtcaagcccgtccgggcaaggggctaggggctaataaggtgcgaaggagggggctgtaacggaaggaggaagggcgcacgcgctggggagggatggaagtggggctctcccaaatggagccttgaaccaggagttctcttactggaaccatcaacctcaatacggccccagacctttctggagaaggcgggggtggagagaataaagagctcttttgcgcagccgcagaacagtaggggaaaggggtagtagagatgttgcagattgcgatgactgggatgacagtttgtatccagactttgactgaaaaggtacaggtgcagctttctctaaactagtcctctggccagcagttaaggtgagggattggttcatgtctggagacacttaggttgttttggatagcgacggtacggtgaagaaaaaaagttgtcagtatcttttcctgcattatcccctttgattgaatatctactttttgcaaaccctgaaacagctttgcagaaaaaagggcagatagatggggtgagaactcccaagactgctgaaaatatacctgactttactggttgaattaagaaataagtaatacaagaaaaacacctaagaacagaatcatcagtcctttaatccattctgatgaccatattttcatgtctgctcttaggaccacccagccttctgggccctccccccatggccaatggaaaacctggcgaccctaagtcaggtgaggaggaa

SEQ ID NO: 46238 - DNA, 584 bp, Homo sapiens
aggaaacctctttggtgctgtttcttgtgcatctgtccacctgttccccagtattgccctcaattcctgagagccctggagcggtttcctaccattcccttcttttagctgcttgttttaagtcctttttatgtgacattccctacccccaatgttgtcagctgcttgtgaaactcagccaggttgtctaacctggggtcaagtttgggtgactggtgcagagttacttcctaaaaggccactctccctgcctttggatttcatagtttctctgtcagtagcatgatccccaccgctatggtctatctatgatcaccgtgctttgtgaaactgtgcatccccttgtagcctttctcagtgtccgtggcatttttgtgacttcccagcactagaataagttttcctgccaaaatgagtgaggcgcttggtgccctctggactttcccacttcccaacatgggagaattgtgaactttccatcagactgcctccctggccctccccattcttctcctgttggttattctgagtctgacacagacccatgacatgtcttataaagcctccaatggctttatcctacc

SEQ ID NO: 46239 - DNA, 2082 bp, Homo sapiens
gaagcccattagatgcaaaggaaacctatagagagtagtgtccctgaagaaaacaaaggagggagggagcgaccaagtctatcaaacattgatgggagagtgagtaggatggccccagatctgttgactttggcaagtgtgaattcagacaatggtggcaacaaaagcatgattgtagtggtttgagagctgacagaactacaggagcaccttgctcaagctcccatattaagtggtagagttagaagtgaaccaaagtcttgattgtggtgatagtttactgggtttatgcaggtcaaaacttatttaagtgatactttgcagtttattttgggtgccattttattttgtgtacagtttattgtatgtcaattatatctcagtaaagctgttaccaaaaaaaataaatgaaccgaagctccactgcaccgtgacttctgcatgttgggctccagttccctgtttacaattgtacacttcgggattttgtgacacatttcaacactggaccgatcagacctctcccttagccattggtctgcactgtcttttctgcccatgacccagtcagtctcgcgccccatgaccctctcctaaaacacgcgcagtctcctctctcttccccttcctctcgtgtcttccttgcctaccagcctcacctgatgggctcgtgttctctccgtccccgatccactcgggctccggcagctgctgcttgggcgccttcggcatcgcggtggcagaactagaaacgagttacagatagaaactagaatatgctttttaaaaaaacaaaaaacaaaacaaacaaaaaaacagtatgcctcaactccttcatactagtaggaaattattatgttcattccttgagtctcgcggcgtcgggaggtcacggcgtcaggcttcccagacagtcgtaaacgccatgtgtttacgcgactggagcaagcggacgccggccccgctccgtcattgcaggccacgcctccactgaaccagggccacgcccccgagatgacggcgaagctcgcacgtgcgcagcccgggggcggggttggccgcgccagcttggagagccagccccatcggggttccccgccgccggaagcggaaatagcaccgggcgccgccacagtagctgtaactgccaccgcgatgccgaaggcgcccaagcagcagccgccggagcccgagtggatcggggacggagagagcacgagcccatcaggtgaggctggtaggcaaggaagaaacgagcagagggggaagagagaggagactgcgcgtgttttaagagagggtcatggggcacgagactgaccgggcccctgcgggagttactgcgcatgcgtgccgtgggcccgggaggagtttgccggggaggagtgggtttggaatcggggttaaaggaaagagatccagatgtcgcacgtgacctaagtgagactgggcgagataaaagaaagagcatatggcaccgagggagagatggggagaaatgggaaaaccttgcttaaaaaatttggacatccgccccaccatacactgtattccaccaggaatatatgagccctgcctcgacctccccttccccctgcgcgcgcatacacacaccttgggagcctgtgatcccccttgtttctcaagagagggtgactccttcatggtttctttcttaagacacccctctcactcaactggagcaagagtgtagatttttgatgttggaatgagggttaaggtttacttaaaaagcagcgaaagtttgttaagcgcttgtttttaattaagcactctatatactgtgctttgagaggggaaggaaaaaaacatgaagatatcctcccagggttgaagtcagttttaagggggacataaatggacacaactaaccccagtaggtacacagtaactaattttaaaagcacttattggatgcctactgtataccaggtactgtgtggaggaagtgggaatgtagagataaaagataagactttccctcaagggacaacccagtatggtgaagggtcagagcattaaccagacagacagtggttgtcagagtatgatgaaggtgct

SEQ ID NO: 46240 - DNA, 4695 bp, Homo sapiens
ggaaaaaaaaaaaatgaaagttgtgaaatgtaataccagaaaggttttgcttaccagaaaccgtagcttgattccccctgccttgagtttacaactgccgcctcctttcctaaagattcacttcttatcctagtaccaatgtacaggaactaatcaagtgcagaacgtgatacagcactgaatacagtttatccccaaactgagaggtgggaatgagggcgatttagaagaaagtcctaaaagtacccaccttcccccgattctcattacacaaagcgaccaaatgcaggaggcccactggttcctaagcagaaatggcacacttcagtgtcattaggcccgtttatctccaagttactcttgcaagcccttgtgtctttcccatctccctctacacacatatatacatacacacacgctcacacacatcctcaaagcttcccagtcttaggtttgcctgttttttcacccctggcagctgaagtggggaaaaattacaagcagttgtgatgagtgaaggaaagtgaaaataaaaactggttctataaaaactagaactacacagagatggacagccttgatacttaattcctataagctcctatccctttaagatattttatataatgaaaataaggaaaatgtcttctccctagcagcaacgagcacaggcagtgcaaaagcatctgctcaggggtggagcttcaagagggtggagagaggaggaagaaagctgattacatcacctttcaaggctgctcctcccacttgaccaagtttctagggcggccctaagctcaggatggcaaaagggggagaaaaacaacaaagacggagggacgccattttgtaatggagaaagaggacttaaactaaaaagccacccggctctgccggtagcttcagttacattataaaacacctttttagtaaaaaaaaaaaaaaaaaaaatcaaaaaccagttccccatcgtgaataatctttgacctattttgatcagtaagagcgtagtgaaaattaaagcaattaaaatattaaaaagaacaattttctgcagggaagaactgaatttgcaacggaggttcaaccggctaccatcgaccacccccatcctccctatagagggaaagggggaggaaggacttggacccctctcaacaaatagggttgaggtgggaggacaggaaaaaaaatgggtcaagacacaacctgcaacgccgcttggaagacaaaaggacaaggaaagtcgccatattgaagcagggaagaaaaaaattccttttaacgacacaaatcttttagaaagctagcattcaattgcactaaatggcttttaaaattatactcctaaattccacatttcccaacctttccaccctctatttaactgtacctcccccaccaaaaaatatcaagttaaaatgttaatcactcttttgcttttaaatacctatgcaatctgcaacaattataagacattctttacctccccaactattatcttgtatgtactggcactaagattatattttgtcctaagtgtcttgcaatctttattcctagattgccacctattttaaccacacaaatataccccaagcaaattacattaaaattgagaggatttaacagtcatttaaaaagttatagcgagctattacttctctctgcccatctccttaccctgcaatctttatgtacagattgcttattaatctggcaaattgaaaggcaccctgcttgtctcacacacaaagaagtggtacttctgggccacaagatccaccatctcttgtatgtgagctcattaacccttttgaagactgctgctaaccagaggaaggtaaccattcctccttatataaacacatatggctttggcagtctggaaattggctggattaccaagggttaaccatcaaaatcctcacttgctggccctccctccaccctctctttgcctgcagcaaggcagggaagagataggtggtaggggagagagaacaagactgtttagacccacaggccctttttaatggagattaagtgaccagattggtccttctccagttctctatttgttctatggtctcatttcttcctctcattatttttggtttcacaacgggaaacgttgatttcttgttgcaaggctggtttttgaaaattcgacacttactatccaatttttttgcgacgtcagcacctcgggctcaggggggagggggtaaaattttggaggaaaaaaaataaaacaaccaaccaggacccaaaactcaattatttagggggcctcattggatcaaaaagtcttttaaaaaataaaggccaactcagtattcatttcccccccacccaactccatttagggaggggggtcgcagaaaaaagttctgagtggattcaaaaaagtaaacgctggatgagtgaatttgggtggtttgggaagggagggtggttgattatttttgaagttatgtagtgacggtccttcggccacagatttcaagtcccaagcagcgtgggctggtggggtgggcaagataggtgggaaggggcagaagacacaagtggttgggctggtggctgctgttttccctttcccccctctctcaggatcctttcaagggcttagatgttgctgcggcttgtttctgttttcctcgtggccggcctgtctttctccgagaaaattcaaacctgggataaaaggaacacaagggagaaagatgtaatcagtacgggttgcttcaaaacactcacaaatgccatctttgttgtccccaaacaaacctgtgtcccatcctgatcgcaaccgctttaagccgtggctctcaaatgaacccatccatccctatcccgcttcccagatccaacgctctccgcaaaattttacccactagacgacaaagtaggcaaacttacctctaaacgaaccccagaatggcggccgcccgctcgggtggagtcttttatacccggacgccgcccaacgcgcccaaacgtgctagtgaaacgcccttgtcgcgagacattatacgcgaggcgtgaactcattggtcaacccaaatgacaactcgccaactgattggctactctcacttcacctttgctccgcccctttccctggcactctcttccgcctccttcctgcctccctgtcgcgtgcgcgtgaccaggagcctagcacctccctttcctctgcttccgccacttccgccctggagaacatttctcacccaggattggtagaaacctaagagcgcatgcgcactgagaggataccgctaaaaatcgccttcaaaattgcttaaaaggcaaactttaacaatgcgatctaagagtcgtagtgactggccaaaaaaaaccgcaattttggggtctaattcgattgtgacgcagttgaaattagcttctcccccatgccttccctttcacgcttccgtcctgacgcaaacgtggggccgccttccgcactgcgggcttgtccttggccctgccctactcagtttcctgaagcatgcgcagttgcctttccgtcaattcctgtcctgggcgtacgtcaagatggcggcgtctgtattaaacaccgtgctgaggcggcttcctatgctatctctcttccgaggttctcacagagttcaggtaactcttcgaaagacattttgcacaacctcaagttggttataccttctcgaggttgtcgctccactgtcaggaatccacgagtggagaccttcccacgtgtgtcttagctgtctaggcagtacttcctgcaaccccccccccacaccccgcgcattttctaatcccgagccgaggactaaacgccagggttaggtatcatcctttttccaaaatgccatttcagtaaaataacttaagtgatggaattgacccctgtccaccctcagtcatgcataaccagctttttaaaaattatttaactaattaaggggccatgctaatctctgtatcgttgcaattttagcataacatatgtactccccaagcgagcgccacaaccagctgttaactatgcaagtggtgactaaatctgtgttgctctggaatgtccttggggaaattagggatcccaatttctaccaaccttgctatttctcaataaggtcaggatatattcttacgacctgaggacagtttctcagctctctttattaaatcagtttcttatcggagttatgagagcttaactccgtcctttgaattgaggtttccctccagtcttgtgtactcacctctctggaggttcttggtggggcacggtgagataggaaggcttgcccagctgccactccctaaagtgggactgaagagtggtgacagaggtcaacacagaaataataacagccttggtagctttaaaactagcgttaggactcaagtttgttctgccctgtagaatgttgaccttcagcttttatgaaaatgggcaactcagtgacttcattggattgatttggagactcacctgtcttctgcatcccctccccaccacacatcttagttccaagaacctagatatccttcctcttactttattcttccaccagagtcaatttatttccaaaaagcaagaataccttttatgtactagatttttttttcttttttctttacacgaaatctcactctgttgccaggttggagtgtagtggcgcaatcttggctcac

SEQ ID NO: 46241 - DNA, 1241 bp, Homo sapiens
tgggactagaagccggggatgggcagctgtgccactctgtcaagatgccttgtgggcccccactccacagcatggcccactgttcactgaggggataaaaggttggacagtgagacactgggccaaggaagactacgttgccatggcactcactgccgtgggatgcagggatggaaaggagtggcactgctaggggcacagctggtttggcaagaaaaacgggggccctgtcagttgccaggacgctagggggcaaggtctacaggcggggctcctggaaataaagactccgagaggcggtgcggcgagaggaggggcggaagtgacgtcgtgtggggcgggtccgaccgcgcacaatgggccatggagttcccgttcgatgtggacgcgctgttcccggagcggatcacggtgctggaccagcacctgaggcccccagcccgccgacccggaaccacaacgccggcccggtgacagctcaaacccaccctctggcccttttctcccggttcctctccaaacctggtccaggcaccacgcccccttctcactgactagtgatcgccccttttgatgtccaggcctgcctttttggtgacctctgaccctgggcctagtgggattgatcagcgcttggatctgtgacctttcaccccgggcccaaaatgtcccaatcaaaggatgtggttgacctggcctttctgcttcctcacaataaccttaagggaggagggagtgtgccaccttgaaaggtgtgacagaagtttgggtttcagaagggtggggtgggaaatcagattggaagactcccaggcaaaggcagggagccttcagtgttaaacctgggttggagttgtggcccaggttcccaggactgactgcctaggacccgctaatttagtgagtatctgactctttatttcttctctttctctagtgttgatctacagcagcaaattatgaccattatagatgaactgggcaaggcttctgccaaggtactggagagtttttagatggagtaaagggaggacctctgtggggatggtatataagggaggcctgggtccttcggagagacttgcagaaagtctgacttaatcttccctgcaggcccagaatctttccgctcctatcactagtgcatcaaggatgcagagtaaccgccatgttgtttatattctcaaagacagttcagcccgaccgtgagtgccacatgctcttccatcccatacttaatt

SEQ ID NO: 46242 - DNA, 1571 bp, Homo sapiens
tcagccctgtttttgctcagctttttgctcaaaggcctcagctgtgaatacagcgcttgggggggcgggggaggctgtaacttgcgcaagcgcactcaggcagtctccgagcccgcgggcgcaggcgcgcttacagccgacagagcgcttcagccgcttccctcgagcctgcagtgcgcaagcgcgggacatctccgtttccctccctcagccccttccccccctacccccccgccccggcctcctttccccttcacgaagccggctctggggcgcgctcacccctgtgaggaggccggaggtcggactcaggaggctccttctccactcccggaagatcatgtaccagcccagccggggtgcggcccggcgtctcggcccttgcctgcgcgcctaccaggctcgaccccaggtgagcggaggagaagagggagggaggagagggggcggggagagaccctcctcaaagccggtgcgtggggcggagcgcgcgctgggttccgcgcaggcgcagagacacccgccgccccttcccacctgtgccctgcagcgcgtggacaggctaggggtcgcgggagcgggagggaggcgctgccgggcctgtcgcgcaaggacgtcggtcctcccaggtttgagggcggtcaggcggggtcaaggccaggcagcggggcgcgtctgcgttgcgcccgactctccgcggttacctgtgcctagaggtgatttgaagggcaggggccgagagattcgtagccctgctgcggcgccgtcccggagttccccggcccagaccagacccgcggggcgccctcagcagcccgcccgtcttgcactcggagagcggtcctggcaggaaggccggccagtgtgcacccggttcgggcccctgcgcccgggctggcaagatggccacgcccccagcagagacggcgcctctaggacaccatcggggaccgaggtacccgagcggtccgcccgccttccctgcagtgagacgatcccctggggggttccttgggagcggagggactcgggtgaggcctaactttgggtgacctccccttgcagtttcaacgtcggtaaacccaggagagtgaaggccagcctttaactgtctcctgaggttgtgtctgtcattagaggggcccgaaatgataatagcttccatttatgtactgctttctaggtcgctacgttttgtttacattcattatttcatataggcctcataacccagtgaggctttattgttctcatttataggacatttgtaggaagcggaggcatagggaatgagaatgcctaaagttacatgatagaattcagattcctagcttcagctggatattcttttttctctgtacatttgcctcgcacacttaatcatggagatgtacaggccacagcatttaatccacagtacaataaaacctgttattcgttaactcatcaagtatgtattacatgattcttgcgataagagaggtgaaactgcccccagtgttggaatctttttttttttttttttgaaatggagtcttgctccgtcacccaggctgaagtgcattggcacc

SEQ ID NO: 46243 - DNA, 1201 bp, Homo sapiens
accagggaggtcgacgctgtagtgagccgtgatcttacgaccgcactccagcctgggcgacggggcgagcgagactgtgtctctcaaaaaaaaaaaaaagaaagaaagaaatgcagaaactaagatccctactgaatcgcaatctgcattttaacaagaaccttggatgcatgttaagagttcgagaaacaccgttctattgcgcttaacccgacacacctaagccctcctcaatcttctccactgagctgggcgtccagcagctagcacagtacctacgcgacaacggacaaagaataagtgcttgtgaactgagctttcttaacttctcgatggaccgttaggccagcctcaccgggacaaatcacagggcccctccccacccctgccgacaccttgttccagagtctcagggcgaagtcccgggccggcccactgagatccaaggtatcagtgtctcgtaggcgctgcacgaactcctcggcagaggtgcagcgctgtgcggtaccgatcagaaactgggcgacgtgccgctcgctcagccccaacaccgagtgcagctcgtcctgaacccagcgctccagacccgccggcgtcgccatggcgactcacgctccctgctcccggccctgaagcgtcgggcagccgcgctcactgctgggccggtcagaggcctggagccctcggctggagcctcagcttcgcaagtcagctaccttgggacctctaggatcttccgacatcccaaagctgtcttcccgtaccgcggagcccggaaggggctgtactttttcggcctctaagcactacggtggccgagcgagttcaaacctcgcggaaccatacctgaaaactcggggtaattcttttttcttcatttcgcctctgtccagtttctctgacgccccctgatggtcagtctgtgagtgcttcgctcacgcattcattcaacaagtgaaattaatttaatggatgcctaatgtgtgctcattgctttccgtccctgggatatagcagaggacaaatcaaaagttccttaccaaatttacattttgcggtgggggagggacaggatacataataaagaaagtatggaaattttatagagccaaaaactatacaaagtaagggaggaatgaaattctatttcagattggaagatcgggtccatgctcataaaacatattagcattgttggccg

SEQ ID NO: 46244 - DNA, 1737 bp, Homo sapiens
aggcatgagccacaggaggtagttattattaacttcatttcataaataataaactaaagcaagagatcagatggtttccctgagatcacacaattaaagagacaagctggaattccaactcaggcctgtcgacccaccctgtgattttgaccagattacagcactcaggaagagttctcgttttgaaacctgaagactcaatgtgtacttcactgccggggacctcagtttgcccatctgttaaaggagcatgttgaaccagaggacccgccaagccccttccgagtgcctacatgtaatcctccctcctctctcctggaccacagcgcccgctctgacagcagggggcgccctcgggccggcggagcctccgcttacccacaatcagggccttggtgcgcagcccgccctggagctctggctgcagcagcagcagctcttcctcatcctcttcgtcgtcgggttgggctgctggagggttgggggcactggggacctcaggctccgggcccagctcctccagtaccgaactctcggaggggtattggtacgtggtctccagggctgtctcgctgaaggagatcttaagctgaaggagggagaaaaagggggcaggaggcaaggtcagcaggggagaagcccgcgggggttgagggagagaaagcgggggcggggggggcggagtctgcaagggagcaggtgggactggcggaacgtgggggtgggggctggactcaggtgccccactcactctccccatccactctgggatccagttttcctttccatactggctctccaattctagagtttccctcttcgatcatatcatttcaaaacatcagactttgccctgtacgttggcaggggcttgggaggcagaagtgaataatataagaccaaggtccctgctatttcgagtgtgggaggcagaggggtaaaaagaaattaaaatacatggcgataagtcttgtgatcagaaccgagtctttgggcaccttgggggcaatcgagtgaacttcccagaggagcccagcagactggccagtggggaaagaactggctggggagcgagtctcagacaaaagcaaggttttcatacccacagccccttgctgtcctatgcaaaacccaggaccctgggcacctgttccctcctactctcctcattcctctcctatccatagcaaagggagtctagggcctaggaagagatgggagatgaacagaaaggccgagaggaaccaagagactccagcaacacacaggggaaagatgagccgctgacaccctgaaggctgggggagatgacaagggcagaaaggaaagtccacacaaacctggggtgggggtccacagtgtgcccaaagggacaggcacagagacaaaataccagacagggcacagaaaacccttggtaatcacactgtcccaagagcaggcgagtcccagctgttctcactgcctttctacccttcccctttgccctattaagaagctcagggggaaggggcagggtgggattaagtctaggagccaaagggattagggagacagcaggaggattccatatgaactacttggaaaggtccaaatgatctactcaggccttccctggcatctgtttgggaagacttggggtcagccgtacatccctgagtcccctaatgaactgaggtatgaaaagagagaagccagaagggtggctgggcaggtggttgttaagagctgcatcaa

SEQ ID NO: 46245 - DNA, 2260 bp, Homo sapiens
aagttctcagaagggaccgcttaggtttctgtaactgacagatttacccacatttctgggaacccatttttgttttcttctcatatcctcttttggaataataacctctgtactttattttctactctgaaaatgacttattttatttgctctcggtctatgtttatatctccccccctaccctgcctgtctcctcaccccccaccaacttctgactgggcttctcagaaatgcacagcctgcatgggagtgggggggtagagagggggtgactcactcgctcctctcccatcagctatataaggtcacaatggggctggtctctcagcccaaccaagaggcctctggggtagggcaccagccacagccatcccctgggctccagtggcagggctgggatttctctcctgatggcagggataaatttgatggaattagcctgcaaacgagttatttagggaaggtgaagcgggggttggtggcagggtcctcctatctcctattcctgagccagtgtgttgcagcagagctgggacaaggcacccagtccctgaagaacaggttgctgacagggggtagagggtggagggtgaggcgtctgggtcagaggaactctgtgctgcctcctccccacccccacccaagcagcggctgcttccttattctctcaccacatcctgagcacagatctggcaggcccagggcccagggcccagggttccccactcagccccaccagccttccggcccccaccccaggcttcctgtttgggcgatctgcttccggctcccctgctctctggcctaggtatggtcaccagcacaggtcctgccctgcacttgcttcctggctcccctgggatgctccctgggctttgggccccaaagcttcatgcttccctctgctcattcttccccagaggcacaagcctctctcagtaggaagtgacttttctgaacacctcacccgggtagcatttccggacttctgtttttttcatctgcccagccctgaggggaacaggctggtagcagtcagagggctgagggtaggttcccaagaaccatggcttagaggtgggagcttacgcttcatgtgaagatgaattgggggatcaaatgaacccccctccacccaaggcttaacccgtatctttagtccctgtggttccccactgacactgaggacacaaaaaaatcaaatctgaggatgttaacacatgggatgagaatgagactgggcttcccaggctctggggagatgtgtgtgactggagggacttcctaagtctgagatgtctgagtgtgggacctctgtctccctagagattttcaagctggaaacagatggatgtgcacagggaagaagtgaggccagggccagggggagtcatcctggctgcccccactttcctgcaggtctttgttgcaagtctaacctctgaccctctgctggcctcagccccaacccctgtccagaactcccactgtgctccctggccagtgcctgttctcaaaactgtctccaaattcacttctctcttttgctaccctaaggggagggaaagtccaggatggcaggaaaagaggggaaaaccgatccctgagccagttcttgggagggaggggaaacccagggaggaaggacaggggagtgaggggcgggggtattttggaagaggagaaggcttttcttgtcccaagagagaagggagcactgtctgaagcagtggcccagctgggggtgtgcaaccccgaggtcacccacttcaaatggcctctctgtgtctctcccatggggcagactcggggttcaaaagccttctctctgatctttggccggcccggttccatctcccctctcccctccatcctaggatgtccctattcagctctgccctccttcccacggggcagttggacctttctccattcacttctccctgcagtttctccctagaacacaaacccaccccaccccctccaccaccccaggctccctatcccttctccccagaaaaactgcaagtgctctcaccctggtgaccctgccctcactgattcaagctcgtcactttaggctctcccactggatgggctggggcaggtcacactcaggaaaggaaggaaagaaaagggggttggaaactcagagcccaagggaagggagaatgagcagcctggcacaccctgaaagagacacacccagagacagcctttgctggggcaggatcttttgggctcaaaatggaaaaggagg

SEQ ID NO: 46246 - DNA, 2722 bp, Homo sapiens
cagtctgggatggtggccatggtcgtcttgaggtgagggtagggagcactggggacagagaacaggaaggagaggctccagagagtgagacagcccgggggtgagactgagggtgggaggagaggaagtggagggggagaggtgggacacaaagcagggcagaggggctaaggatgaggacagagggaaagacggaaggcagagaactggggaaatggaaaaagtgaagagaagttgtgagcccaagttgggggtggtgggggtgatgtgagaggaagagtccggattggaggcaatgagggcaggagccagatgtggcagcacagggttaatgcgtattaaagaccgtctctaggatgtgagaaagagagagaagggcgaaaaggaaagttggcgtgagggagaagagagaaatgtggcaggggtgaggggaacctgggtgcaggccaggctgcctcagcgataccccagggaggctagtgtgggaaggaaggaccaggaatccctgaaaggaccaggaggcaacgggacctgagggggtgttggggaggcaaggaggggcggagagcgaacaggtctagaggagaagggaaaccagggaagaggggaaaggagggcggcggcagcagccgggcgcgtctcagcgcgggccccaaaggtcccggctccgcttccagcaccgctcgggccacgcctctccccagcccccacccctctgccccgcactccgcccccgaggcgggtcgggggaaatagccacccccgagactttcggaacccgggcgtcagggctgccagcgcgttcccagaaccctggcgtccacccccaccctgtcctgtcaccaccgcctgcctcccccaccgactgccccacgcgaccccagagtgccaagggccggctccatgtctcttctccccggcgcctgcaagtcctgcgccccgtccccgctctcatgaagccgtgacagagccggccgtctccaccccgctgtagccgcacagactgacaatctcggcacaaagaggagacagccaaggtccgggccagggacgggagcaaggacaggggcgaggagacacccactccccaagtctgagcccctcagtcaactcacaggccgcgggacccccgggggagggggtgcggaggagccgggcgtccagagagaggaagaggaggagagagggaccgagggagatccggagactggagggaggggaggagggagggagaggaggagggaaagaggcagcaaaggaggagggacggagacagagaccagggggccgggcgggggcggcgaccgctttgtctaaggacaatgaggagagggaagggggcgcagggcggagccgaggagagggcggggcctagatccctcccaccccgcgtgggactcgctgcgggactgccctcttctcgccccaaccactggtcctccgctctgtccccaggggccctcaccagcttcccgcccggacacgccaggtgtccagatcccttcccccagctcgccgacccagggcggtggcccgtgactcaggcccctcgtgggactttgggaggaagcggcagctgctccgagcggggcccgcccttcccatctcctgccgctcctccctacgcttttgccttctcatctgggtctgtaggtccagcctctgaagtcctttgttttgcggggtcgagggcagccgccaggctgtggggggctttgtggatgggcggcaggagaggcgctcagaagccagaggttttggatgctccctcccctaccagagctgctgccccgactctttctagcttcaacctgtctcccttgggtctacaggtcggctgccgggaaaaaggggatttgaaggaatgggaatggggacccggccgctctggcaaagtgggggcgggtctgcgggggtggccgaaccccagcggttgccagagggcgtggtggctgcccagactccagttcggtgctcccaggctccctctggctttctttcccaaactcagccctgtagcttgggagacactgacagactgcatgccatatgtagaaaaaggctgacttttattttcctgcagagcatcttcctcgggagagcagggagccccaagtcatcgagttaagagcaggagaatccccttgactaggttggggtctgagcccagaggcagggcctaaggaggtgcagagactagggccgggagtggtgaggcaaggttggggcctggagggacagctatgaccgttgaacttgcagaccctggtccaccttcttggagtggaagccagcggtgcagaaggggacccctgaggcgcagaggcaagtaacagtgccaggggagtggtcagggcagatcctttccttctcaggaggctgttgagggggagagtgtcatgctctaaacagtgaagggacagatgacttccataccccactcttccttgctggtgagaagtggaccttggagttcagtggctgaaactcagaatttagggtatggagctggacccagagaataaagtctcaagtagtagaaggggcatctccttcagtccatggatttgggcctctggcatgaagcagccagggcctggatgttaaggatttagaattcagtgggagaggaagaacagggcttgtaaccagagtgagctcctcactctgcctccccatcctggggccgagagagcaggtggagttttctttgtagctgggc

SEQ ID NO: 46247 - DNA, 526 bp, Homo sapiens
cacttagcaaaatattttgatattcatcctcaaaatattgtagcatatatcagtatttcatccttttctatggttgaataatatttgattatatggatatatcacaattgtttatccactcatttgctgatgaatatttgtgttgtttccacctttttggctattgtaaaaagtgctgatatgaacactcacgtacaagaatttgtttgaataactgttttcttttccttttttttttttttttttggagacagagtcgtgctctgttacccaggctggaatgtagttgcacaatcatggctcattgcagccttgacctcctcccacctcagcattccaagtagctgggattacaggcatgtgccaccacacctggctaaattttttttttttttttgagagagagtctttctctgtcacccaggctggagtgcagtggcatgatctcagctcactgcaacctctgcttcccgggttcacgtgattctgcagcctcagcctccccagtagctgggattacagccac

SEQ ID NO: 46248 - DNA, 533 bp, Homo sapiens
cttcattgacacataataattgtacatatttatggggtacctgtgctattttgactcatgcatacaatgtacaatgataaaaccaagataattgggatatccactatctcaaacatttatcatttctttgtcttggaaacatatcaaatctcttctagctattttgaaatacacaataaattattaactatagtaacactactgtggaactgaacactagaacttattcattcaatctgactggatttttgtattcattaaccaacctctttatgcattctgtccctctacccttcctagcctttggtaaccaccattctactctctacttccatgagatccatgtttttagctcccacatgagtgagcatacaatatttgcctttctgtgctgacttatttcacttaacataatgtcctcagggttcatccatgttgctgcagatgacaggatttcattctcttctgttgctgaatactgttccactgtgtatatatacacattttcttttttttttagattgagtcttgct

SEQ ID NO: 46249 - DNA, 1527 bp, Homo sapiens
tcgctatattgtaaccattactttccatttctgccttcacactcacccacctccaggactggattaggggaaccgtgtctttcccctagggtccatcatattcattcaatggttatggtatacctgtttgaagtatttggtatacatctgtgaaccaaacatgaaatcgaccctgccctcgggaaggctcatcaccgagcctactgatgaaggaacaaatgagatggaaagaaaatagcataaatggaattcacctgaaaatatgccactctagagggaaactgttgacaggtagggaaagtaggatgccccatggataaagtgtcaactccgtctttatgacaggccaactcagcgggtgcccaccacgcttggctccaattcaaagagccaccatctttggtccccacctcagtgggttcccttgtggcccgacgtctccctgtgtcttcatacctaaactcggagcggggcgccaggtaaggatgagtattacagtccgagaagcgaacttccaagtcacctccgcccagtcgcacccaaggtacgcccctcccgccttctgggggaaccaagatggctcccggggagccgtgggccaggcccctagaactcacctactttaagtccccgcgcgcgccaccagtaacggtcgcgacccaggtggagcgactgcgtgtgccgaaaaagagcttatttgctgattggcttctgccgctgtctttcacaaccgcagccagtcgagcggaggcacacccaaagccccgcccccttagagttcaaataggtggtgtctcccaggctgctgagatcagttaatgagacggtaattgaaggccgccgtgcgccaacagaataatgcacgtcgattgggcagctccaagggacaacccactaccgcttgcccgcccaccacccacttcccgcgcagttccaaaccgcgaccagagagtctggcgccagctgccggcaacggatagaggggctgtgtcatagacgtccgacgtgtctggtaaggccagagcgcctttcctcggtcctcctagacatggtgtccgctgactcatgagaaatgaaagtgggttgcgcgttgcagtcgtggctggaggctgcagtttggagaacagcccgtaggcgtggcagttcactcctgttgcattggaatttcatttccttttgatttggtttgtagtagaagtaatatctttcttcctgggaatacgtctctgacggacattttgaggtcattttcttaaatccaagatcctaaagatctgtagtcgaacagagaaaactggtttgctctctgtcttaaaggctgtccccacctttcgaggggcgagggaaggatcataaaatcatttatttttattttttaattaactaatttatctattttttgagatggagttttgctcttgttgcccaggctggagtgcaatggcgcgatctcgactcaccgcaacctctgcctcccaggttcaagcgattctcctgcctcaacctcccaagtagctgggattacag

SEQ ID NO: 46250 - DNA, 2938 bp, Homo sapiens
ccatagctcctaatttggtggatacatagtaactatcaaataagtgaataataaatctatgggaagaagcagatggactccgtcttgaacccactcaatttttcccccatcaattacccctctctcgtttttcaatactgggtctcttgcagagttgcagtggcggccacctggtcagtgaaatcagcgaattgaaaaaccactgacttcattaacatgtctaaagaggcaggctgaaaaaactgaaaatctatcaggcatctcattccatagttccctgtttgacaagaagaccaaggtgtcttcaaagtctgccctaaggtccagatctcctacccacgtaggagacttctagtttcacaaatccccgatgtcggtttctctaaactattttattctttgaacatactctccagacaacatcgctatcctgaaaagcccttgctgcaattttgtttctctttcaaaacaatggctcgaaaatttccaaggaaatagcaagagggcgattcccttcttgaagtatttgagggagcagaagcttactgaagttcatgccttgggtcaccaaaggccaggggaggcagagcacggtgccagacttctccccatttttcgctgaactaagcaatcctttctcccctagaggtactgcagctgggagctttcagggcgtgtcttccccaccacccaacttctggaaccccagacttctcaattcctgtacccccaagaactgctcactttttgtacaaaaacctcaggcatagaggaaaggaatcttgcgcaaggtcgtttttcatttacaaaacaaaaaccccatgaaaaccaaaccggtacccacccattcgtcacttcattttgcagcatggacaacaataggggactacaactcccaaagaggactgcgctcgtccactggctcagaggccaatggacgcctggtacatgaccggcatcgactaatcagggccaggctcgatgaggctttgtctccctaccgcgcgcggggccgattctcccgcctcccagccccggcgcacgcgcgccccgcccagcctgctttccctccgcgccctcccctctcctttctccctctcagaaccttcctgccgtcgcgtttgcacctcgctgctccagcctctggggcgcattccaaccttccagcctgcgacctgcggagaaaaaaaattacttattttcttgccccatacataccttgaggcgagcaaaaaaattaaattttaaccatgagggaaatcgtgcacatccaggctggtcagtgtggcaaccagatcggtgccaaggtaagaattttacacctcttttatttctttttacaaggaaaaatccaggtaagttatgaaaaaatggttgtggggcatttgcacccgctatccttaatcaagatttgcccctctcaagtttgttacatttatatatataacaattgtagctagcatttgcctttggaaagctgggaatcatttttcttggcaggcacattttggagaaactagtaaaagggctcttcgggtttgggggcgggaagaccgaggacttataagatgttacttaaaagggcttctaacggtccgagaaccgggcagggagagagatgcggaaacggtcgcagacaaagcggggcgaggttttgcccatgtgcatcccgcccaacccccctgcggggtacttagggccaaaccggagcgggaaggggtgaggccatcgggcggctgcagagagctccagcgcaagggtggggggcgatgcgccagggtgggctgcgctgggcgctacctttcacaaaagaccagggaccccaacgcgcccgcgaccccagagggccggtcctgtatttgttcctgggtggaaggagaataagaacgggattaattttacttgctttcatggcccctaagagagacttttttagggcgtgaacagatatgtcgagaaaatgggggtgtgtggttttctttaatgagtccctcaggacttaatgggagagaaagaatcctttaaatcaaggggtagaaatgtagcgaaggaataaaaattccgaggccaagggggattttttttttttgcgcgcggttacagtgtagcgggggaggggcgggaggaagtgcggctgctacgttgtagcagaagggcggggccctgcggggcggggccggggcgccgtgggcgcgcggggacaatgcggcgttgcccgccggcaggggcgcgctaccttgggccccgcccctcgcgcgcggaatttttgtccctggccccgcccacgcgcgaagtcttttgtcggcggctcgacctgcgcgtgcgccgcagtcacgtggagggcggggggggtggtcgactgcggcggcagctctttcctcagacccccagccttttgtgcgccgcgcggtggggcggtgcccagcttgggggaaggagagcggcgcttatcgaagtgtggtcgacctccatccgcccaccgagcacttgggacccgctgcacatatccagagcagggaaagctgtggctttctcgggggagcgagtgtctaggggaagggtgtggcaggcccacgggatgccatgccctagaacaacggcctgagcgcttgtggaattaaaatgggagatgtggggccgaggtgggcgaattgggatccctccaggtcaggggttcgagaccatcctgggcaacaaagcgagaccctcccccatgccacgtttctacaaaaaataaaagtaaaaaattagctgggcgtggtggcgcgcgtctgtggtcccagctactcgagaggctgagatgggaggatcggttgagcctgggagttccacgctgtagtcatccgtgattgcaccactgcactgcaggctgggcaacaggaagaccctgtcttaaaaattagaagaagctgggcgcggtggctcacccttgtaatcc

SEQ ID NO: 46251 - DNA, 5246 bp, Homo sapiens
ctcctgcctcataccccaagtagctgtgactacaggcccgagctgccatgcctggctaatgtttgtatttttcgcatagacacggtttcaccatgttgcccaggctggccttgaactcctgaggtcaagcaatcagcccgccttggcctcccaaagtgctgggattacaggcatgagtcaccacacccggctggccttttctttaaagcttttcagctgtaacgtctgagtcttttaaatctctcctcatatgggggagttggtccagagatggagagccagaataagaccaaagttaaagtatgagaaatagtgtagtggtgtcctgagatggacagcctgagaggaatggggaaggggcagagagtggcctggcagtggctctgacctgaagctgataggccaggtcagcctgtgctcggcgggtgttgacctcgatgtcataggcggccttcttcagttcgtaatctctctgtgccttggccatctcgatctcactcaggtactgagcagacaccttttcctgcttggctttagcttcctgtccaagcagagatcaggtaggaaatgtcagggcagggggagaaaggccacggtgacagcctgcttcccaccaaggttctctttctgcctcatgtattttccctgctcacccagcacccctgcttcttctcagttgtgccacttctatcccctttcccactaagcaacccccatctctctcacccggatcccagcatctctcttggcctctgcttctccaatccgtgcatctttttggacttgagctgttcgagccttccccaaagagtgcaaatagtcctgtgggagagatgtagaaattagtcctttggagggcttaagagatgggagcaaggaagtggggaaggatcaattgcctagttttacctggtcatcgtgaatgtccttcagagtgtagctaaccacactgatgcccatgttgaccaggtctgaggaggccactttgaaaacctgttctgagaatttctgcctgtccttatagatctcctgtgataacaggatggtggggagaagggatgtaagttttttttttttttttttttttgctcactgcaacctctgcctcctgggttcaagtgattctcctgcctcagcctcccaagtagctgggattaccgacacccatcaccatacccagctaatttttgtatttgtagtagagaaggggtttcaccaggttggctaggctggtctcgaactcctgacctcaagtgatctgcccaccttggcatcccaaagtgctgggattacaggcatgaaccaccctgcccggccgggatgtatgctcttggatccactgtctctcacagactagtgtgggccttgggcccccctcattttgacatccttccagatggttccctgcccctaggccaacctccacagtcatgtgggccatgatggccctctggtggccctctaacgtctccagggcaatgtgggcaatctcagcctccgtcttccccaggaacatctgacaggcggccgccaacatctccttgttctgcccctggatttttacctgtagccagagtaggggtaggaaaggtgtggtgggggtctcatgaagtcagagaaaaagcagagagagaagggagagccctctaagaaatgcttcttccatttcagggaaagaaaggaggaggaggcaagtgccttggggtgcctggaaaagatgagactagcagaggaacttctctgcaggcaagggttgagaagactgtggccagaagatgtcttaatgtctgggagagagggtgatggggaagtggactgtggggaaaaggctctgaaagcttcacctgggcaatgccagtgactgagatggggaccccatggcgagtgtaaaccttttcactcttgacattgagggtcagtgtgttgagagagatcctaggggaaaaagaagggacagacagtaagaagaggaggaaaaagagaaaacggaggtcccccttccctggttcccttcttgcctacctctggatctgttggatgcagggcaggacaaagacacgccctccagccaccatgactggggggcttcggcagaaccctgcaaggtgtggggcagtgaggaacggtggcagagcttgaatgtggaagactgaggaactggcgggggtgaggggacagcaacccacaggagagaatctgggagctggaggggaagcagtctgggccttggaatggtgggaatcaaactgggcagttcgtggccatcaaggggcagaagtctggtgctgggaagttggtagggagagggagaaggggcagaggccagactcacaggggttctggggtcactggctgggaagggaacaacagtacttaccggagaccaccatggcctcatttgggccacaagtgaaaaacatggttcaggctggagctggaggagagggagggaaagcctttgcggatggggaaggcgcgctgtggcgtccacaggggcccatcctttccctttcccgtcaggccctcccagtctgcatccgccacggcccgtcccttctacacccatgggtccgctaaggcttttccctacaaaatccttaagatccccagctacctcttctccgcctgcgtatggtccctcccttcccctcgccgctccctttgataaaggtcccccgcgcccagaggcctgcagacctttcccctctctccctgcttctcggcagccccaggctccatctcccctcccccactcaccttccgggacgcgggcggcagcccggctggggtctcgggaagggcggggtcgcgcagggacctgggagccgggcaggggccgctcgcagaccagctttcctgggagctggccccgctcccgcgttccccaccctgccgcaccccgttgctgcggcagacgcgaccccgccccccgcaacggactaagcacccccacttcgccccgcctcggcccagtgcgctcggcccgcccctttcccggcaggccccgctagagtccgcagcccgcccgcccgctggctctcgggcccagccgggctgcctggttagcccggggagggccacatccctgccgccccagtcaccgcccttcttgagccgggaatcccgcccacgccgcgccacgctccgcccccgggtgagggacttgacctccgcctggcaccctggcgtaagggtgattgccacatctcggattcgccgcggggcaactacctgggaaaaccgcagactgggcaatgaaagactacatccggcaaccggatgctgggttctgtgactccaggaaaaggggctcctgggcccagggaggtgcgcgggctggggactcggccacggcgcctcccgccggtccttgccatctgaaggccgggaggagtggggagtcggcgcttgcaaagatacactcaagactgcagacagtaaatcaattttatttgtgttcacagaacatactaggcgatctcgacagtcgctccgtgacagcccaccaacccccaaccctctacctcgcagccaccctaaaggcgacttcaagaagatggaaggatctcacggatctcattcctaatggtccgccgaagtctcacacagtagacagacggagttgagatgctggaggatgcagtcacctcctaaacttacgacccaccaccagacttcatcccagccgggacgtcctcccccacccgagtcctccccatttcttctcctactttgccgcagttccaggtgtcctgcttccaccagtcccacaaagctcaataaataccaagagacctgcatttacagcagggggaacatctcacacccttgcataagttaaaataaatattacgtacacatctccatcacctaggaggacgtacataaatacatataaatattaattaggagcaataagaaataaattaacgacgctctccttcccaccgggcctagccccagctgggctgtgcctcggtctctatgcgcctcggtctctgtgcgcctcggtcccgcctcaagcaccgggtggcgtctccgctgtagtgttctgagttcaagttgcctcggaagtcccagttggggatacgctctcgcgcaccaggtacgcctggtgtttctttgtggtttttcggattctttttggggagtgcggggagtcacagttagaaggcggccgggtgttgctggaggaaagtgctgaggtccagagcgtagtccgagggctccgaagtcagattaaagggctcgaggacggcggacacaggggtgggcgccagggatgcggcgttaggggcgtcctctggaggcaggggcgccggcacaccctcttcagccatcaggatctggcagaagacgatggtgagcagcagaaagagaagccttttggctgggttcggttcctcgactggcagctggcgccggacctaaggggagacaaaacaggagacaggtcaggtcgaggcctctggagtcgggtcgttccccagtgactccagggcagcgcaccccgcgaatgcccacttcggcgatactcaccactcgagggtagagaaccctgcggctgcgctttcggtgcccgcgagaggcgctggggcgcccggcaggggccgctgcgggctccgggagagggtcgaaggtgaagatctcaggaccggagccccgccggggtcccgggatggtggagggggccggggtcggggcctgcaggatggtcatggtcgggtggcagctgcgagagtgacacatggtgagccgagcggagtgtaaggccaagtgagggtcggctgccggcagaggtaatttatgtgctcctgaaaattgggcgggtccttctaactcctcctcccgcagctggggagcggttggcagcagcgggctggaaattccgacgattaaacaaagggagtgggtggagacttgacatgcacaatcctaggcgcccaactgcacgttgtgagtgtgtgagtcgtgagtgggggtgggtgagatcccgggctgcaggcacatgtcgaggcatgtggcacctggagaggggctcactttagccacaggatccctcacaggcctttttttttttttttttttggagatggagcagtctcgttcggtcgccaggctggaatgcagaggcgcgatctcggctcactgcaacccctgactccctggttcaagcgattttcctgcctcagcttcctgagtagctgggaatacaggcacgcgccaccacgcccagctaatttttg

SEQ ID NO: 46252 - DNA, 1399 bp, Homo sapiens
aatgtaaattctaatgagtcaaaatttaaaattcagtttctcagtttcattagccacatttcaagagcacgataatcccatgtggccagtgattaccatatttgaaaacacggaaatagaacatttccatcattacagaaagatttgttggacagcactaggctagatgacagatagggtgggggaagagaaaatgctgcattgggaaaatgcttggtataggctgatggctttaatctgcttttgacacttttaaaagagtcaagatcacttgtctctcattagattgtatcgcacactgcccattcagaggtccagaaaccacttcttcttcagaaatcttgtactgagaaatggaagcccatttctgatcacatacatgacccatgcttcttcagaaaggaaggcatgaagttgaagggggaactaagactgctgagttcttctgtcttcggccacaggaaactaactgattcatggcactttgtacccatgagctcatctagtcctcccagggcacaggaaagtggtgaaaataagtggccatggttcacagatttttcagctggtagaggctagttcctacacttaaaacatcagtagattgtcaaatgtgttccaactaagagcagtggaaggcagaaaggtgtataaaatatgggtcttaagaggtttataaccaagttaagggaaattaagagatcagcacataaatataagtatacaaaactgtaactgtatctgtagctatatgtgtgtgtgcatctatttattatctatctacctacttatctaataacataattaactaacatttatttgatatcttagagcttaacaagtacttttcctcatatgaagactcagcagatccccatgatgaatgtcaaacaaatggaatgttggtacagagagcaagcattctaggcattcgcagccgggtgagatcactgtggatggagtgatgggggaaagcttttgttgaggcagaaccagcaggaatgtggggtagtcacacaaacacagatacaattcctggtttccctactagacacttcccaggctctcaattgcttgtagtttttgtttgctttttttttttaagacatggtctcactctgtggcccaggctggagtgcagtgccatggtgtaatcatggctcggtgcagtggtactatcatggctcagtgcagtggtgcgatcatgtctcagtgcagtggtgcgattatggctcagtgcagtggtgcgatcatggctcagtgcagtggtgcgatcatggctcagtgcagtggtgcaattatgtctcagtgcagttgtgcgatcatgtttcagtgcagtggtgcgatcatggctcagtgcagtggtgtgatcatggctcagtgcagtggtgtgatcatg

SEQ ID NO: 46253 - DNA, 1596 bp, Homo sapiens
aagaaaagaaaagaaatgtgattgaacacaaagtgaatggtcgcatgggaataggctgagggagaaagccagcagagcctgtctgttgggattctgcttggtctctctgtgcagcattccttccttctggatataggcagggactctccaaaataagggttttatgacctactattagaaaaggtagctcagtttttttttttttttttaatgagctgtgcttatacagaaaggcaaaggaaggctagagtaatagttctaagttttatgattggctttgggggaaagacattctggtttctttgacctgccttggaggagagaggggagcaggagaaggtcagaggcagactttacttctcaggtccttcccatgttcttctcaacttgccaaaacaccaaactctggggtatcattttctgagccccaacaccttgatggaagtatttacaccacagaaatcggaaatgttgcaagtcagaactttcacctacccccagccctccactgcctctgagagttaaacatttacaggccactgccacatctgctcctttctttccttcacaagttgtgagaagaaccaagttagcattaggttgacctgtgagtgacaaaaaccgaatagaacaatggcttcctagatggaagtccatttctctctgacagaaacaaagtccagagccaggcaggcagctcggggctgggacagctccgccttgctgcctcactgtctttgatgcatggctctttgtgatttaggatgactgctcaggctccatgttcaggccaaggggaaagagaaggacaaagaaatacacaccccatcctagtaggtccacagacagaagtaacccgtaacatttctgctcatttcaaataggttggaaggaagtctctctgccacatctggctgccagggaggcttagagccctgttgcttcctgcaggcagccatgtgccctgctgggggctgagaaggggaggacaggggccggggggcagctgagaagccaggtgggattcgagaacatgtaggggagagggagaactggtgttggtgtgatgggaatgagcatagtttgtggaactctgggggagctgactggaatagaaaattaaaaatactgacaaatgaggttaaataaacaaggtggaagccagagctcagtgagggaccaggaaagcagacaaaagaatctttatctgctgccactagacaccggaggcactgaactttccagcaggggagctacatgatcagaggcatttcagaaatgttaatctcacacttaagtgctagacagattggaggcaggaggaaaaacaggaagcagcagggaggttggaaaggagaattatttcataagccaggtgtgaggtgattatcggggaacctgccccattagtcacgtaggttcttttctattttcctaagcatcggccagtttgagaaataaagggacagagtacaaaagagagaaattttaaagctgggcatccgggggagacatcacatgttggtaggttccgtgatgccccgcaagccgcaaaaccagcaagtttttattagggattttcaaaaggggagggag

SEQ ID NO: 46254 - DNA, 3007 bp, Homo sapiens
aggaacctcttgagggcagggatcaggcctgttacgtttgtttactttatctttatatcctgagcattggcccaggaataagtatctgtggaaggacgggatccttctaagtctctcatctatttttcatacacggcatcatttaattctaaactagctgtcattaccatttcacaattgaagaaactgaggcttagaggcgcaaatggtctctctcagatgactcaggtcttctgggttgatgtggcttttattaagaacttgttgtctccaacagcaaatagcattcctaggggctggggctgtttcttcaaggcccctgcctctgcaccctggtagcagcacaggcctagctgtagggctgtggacagcgtgccctcggctgcttactgactggttggcatttgatacatatgatgatttaacatgaagatttagtgtgattttgcatctcttcatgggagcagggtcaggaccaggtcctgttgcggaattcagctttggggctgggtagaagactgggatgaagttgctcctcatctctgtgccctggctatgagcaggcagcacctgggtcaggagtgtgaggtgagtgggtgatgctaaggagggttcaggtggagcagtcagactgtgctgagtaactcccctggaggggaagggggacgtggtggaggcagttcctggaggcccagctcagagcggagaaaggagccaattaccacctcctcccaagtcacatcccagccctgggaatacttcacaggctccggggaaatcccggccaagtggcagagtgggtggtggggtgcttatcactcatgatcaggagtgggtgggggcggatcttagagcttgcatcaggcctcaattttccaactcctgcctgtgatccacccccgcgcccactgcacaccaccaaccaacctttgactttatctctttagttgatttctcagagattgcagatcaggaagggcctttggaaaccacagcttccacttccgctgtgggggcagaaagcacgggacaatctaaccctttcgtgcctggaaagtaacaaggaggactctgcccttaccaggttcccaaggtcctgtaccagccccacagggactgctgaggggagctttttctctctggttcctcatcctctcctctactcaggtgtaggctgtccctgcctagttggtctgacagtagctccctgcgacttctcatatcacctccgactccccagcctcacctccacgggccctgatgcactggcttcggctgtgtcttttgtgagtcatccttgctgctttgttccagccccactgatgggcctcctgccctcccccatgcaggacttagtcaccgctcgtgtcatcaatccctctggaatgcacccctcctccagacacccatgctccccacatcctttattattttgttaaaactagcaatgccccccccaacccccatgattaaaatagtacatgtttgttgtgggaaatctgtaatatgcaaaatatacacaaaagagaataaaaagcaccaataattccataacccaaattagctaacattacattccggtggatttccatctggcattctcctcgccagaactccgtccagcttcaggccttcatgtgtgcttattgcttcttttacctgcagtcatgctctctgtctctcccctccttcaatctgtgagcaaatctactcatccttattattttaagggtcattctttcagagaaaccttccctctacccccaagctagtctctttattacacactcacaatacccagtacttttccttgtagcactcaccacaactagaaataaatcatcatttttgtcctcttgtgtttaatgtctgcctagctacctgacgtaaggtctgtgactggttttcttgtttactctgatggccctagcacccatcacagtgccctgtactcagaaaacatacatcatacccagatgccttcccggaataaccatgtgcctgtcttcccagcacttacaataatcaatttaacaaatataattaatcaattactatgtgcctggcttggtttcaggtacaggataccaagcaaaatgacccagttcttaccctcgaggaggtctcagtcttttgagggagacagatcagtaatggaagctttctaatgtacagctaagtaaacggtgatcaatagtgttaggtaaagtgtggaggagaggtccgtgaacaatcctggggagatgacaccattgttttatcttgttaatgcatttacttcacagaatcacaggataatggaattggacggcaccatgagatcagcaggcccatctcttcctgtacagatgaggaaactaaagtggtgaagggtagtgaagccacttagccaaagccattgggtgacagatctgggaatagaacttggatctttagattcccagcccagggctctttccactgtacctgggggcctttggactccccctcccctctcctcttattctgttaatccccaagtcctttgattttccccatgaaggtctctccaatctctccacttttcctcatccccacatcaccaggctctaagcctccaacatcatctccagcctgagcacctaccctcacctcctacctcatctctctgcttctagtcttgccctgctcagatgccttctccactctgccgccaaaatgagcctcacagatgtacgcatgtctgtccctggcttagaactccagtggcttcccaccaggcttttagaaatatactcaaaattcttatatggtgtattagtcagctcaggctgccataacaaaatatcctagacggggtggcttaaacaacagaagtttatttctcacagttctggaagctgagaagtccaagaccaaagtgctggcaaggtcagctttattcagactttcagagtcctcttttctttctttcttttattttattttattttatttttttattttttttgagacagcatcctgctct

SEQ ID NO: 46255 - DNA, 2453 bp, Homo sapiens
attatgccagggtagcagggaggtaacttgcatttttttttttttttttttgtcagccagggtgtttgataaattgaggtgtttgatggtaagcagaagtttttgagttatgtacattatctgagcaggagggccatatgtcttgggccatttgcctcatttctttgctttcccctggtcccaccagcctgatttgttttttaattattactcaacagtgagtgctgtcacatgctgggcattgtgctatgtgctctatgtggagtaactcacttactgtccccctatcccccaagaccatcctgtgacatgggcattcttttttttttgagatggagtcttgctctgtcaccaggctggagtgcagaggtgtgatcttggctcactgcaacctccgccttacgggttcaagcgattcttctgcctcagcctcctgagtagctgggactacaggtgcgtgccaccacgcccaattaatttttgtgtttttagtagagacgggttttcaccacgttggccaggatggtctcaatctcttgacctggtgatccacctacctcagcctcccaaagtcctgggattacaggcgtgagccaccacacccgaccagacatgggcattcttatcctcattttgactgagtaactgggcacagagaggctgttatgcatcccaattgcagagctaggcagcggcaagcccactttcacacagcgccagctgcctggctctgggatcagcctgtagtcactctccattctgcccctcaggatctgcttctcccaggaagcctctcacagaggcagaattttgcattggcatcctgcttcaagcttatgaaatcttctatacagatgacctcattccagccttgcaataatagcttctgtgaggtattattattcatagctttaaaaaagccagttgaaggaaatccagtgatttgtcaaaggtcagaagttaggtggccgctctcctgctcagacttacgttttctgacttggagtacagtgctccgctctcacgttatctgtcagctgacgctgcagccagcctcatactcaacacatcacatggttcgaaggctaggccactttccactactattgagctgcctcctctctatgaaaatgcttttctggattgagggagacagtcatagagaaatgtgttgttggcatcgatttcctatggttgggcaatggcttccgccatctggaccaggtgacgtcagctatctggatttctgccagcattccccggcccaggaaacagacttccggctgtctgggctctgagccatcttcggcctcctgggtgagtgggtcttgcaattcgcaaagtgaggaactgaaaagtcagctctcagggaagatttcactgtataaagtcaggtaaaaatggggaagaggcatactgggtcagagagacagggagcccttctatctgagtctggggcctttctcagatgagaggggaggatctagtgatcagacagggaaattgaagatctttgtgactaagactcaagtcaattgggggtagatgaggagtaaggtaagcaaagctaaagaaatctggggaaagatacacataaagatacaaacacagaaggtcaaatactggccaaggatagaatgttgatcccaaaactcatgcacttttctgtggacactgagacttgaacaaatcaataacttgagaatgtaagcagccctctgccatgttatactttgttgagttatataacagttgggggaaaacctaaacaatggtacatgtgttaaggtagacagttaaattgtccctccaccactccctgtctcattcccaaccctgctctccaggccaggctcataaaagttgttactcattttagccattccttcagccaatattcatcttattcattcttacaatcaccctgtgaggtaagagctatcattatgcctttattttgaaaattgtagtaaaatagacatagaatttagcattttaactgtttgtaaacatacagttcagtggcattaggtacatccacattattgtgcaaccatcaccatcagccacattcagaactttttcatcttcccccactgaaactccacccagcaaacaataccttcacattccccactttccttagccctggcaaccaccattctactttctgtagaatgtaaccactttagatgccttttattttattttttatttatttgtttttttgagacggagtctttctctgtcaccaagccagagtgctgtggcacgatcctggctcactgcaacctctgcctcctgggttctagtgattctcctgccccagcttcccgagtagctgggattacaggaacacgccaccacgcccagctaatttttgtatttttagtagagacggggtttcaccatgttggccaggatgtaggtgccttttataagtggaataatag

SEQ ID NO: 46256 - DNA, 1302 bp, Homo sapiens
ctcaaggctggatcaggtgcgagactctgtagcagtaacctgaagttgagaattgaggaagtagtgctgctatgagaggagacctgcggtggcatccctaggatggggtgctggtggggggtgggtggcaagggggaaagggggtttctgcctaagggagtttctgctccatgccagcacttcatcagaggtcttgagccagggtggaatccagctccagggagcatatgagagcaaacaatggaagcttgacatgatcactggatgaacatctgaagtttcatatgtgatgggatctccccagaaaacaatagtgcacatcacagccaggaggcacccagagcattgtgttgctgtgttttttgaacccagtgagttaactgtccagtgttccacatcattctgacctgggtcaacagatggaggcagggcacactcttggctgtagctcgatccgcctctcctgctgcagcaggacatttctcagtagcacaggcaaggtgctccgggcaggggactgcatagtaagtggtgcctcctttgcaatataagccaaacaaggcttcctgctggagcgcctcttggctaattcaggggcatgagaggcagcatctaaccttgcccaggggccctggctcccctttactatggggggtggcctgtgatcaggcccagtgggactgaggagcaaatgtggacagtcttccccggcacacatcggctgacctgcatgcccagactgtctcctggggcgcctgtacaagttggtcctagaatccaattcttcctggaactgggtgtcatttcaggacagagaataccgggagtcataaattggccctgaagcaaacgaaagtcttccaatcctgcatgacatagcagattgttttgcttggggctttggcttggtctggggcgtgcagttccatgggggaacctctggcaatcccaccagggggagccctttccccatcttggggctgtggatctcagctttccagaatatttgtgtgcatgtgagtgagcacatctgacttaatttttatattcagtatagaatcatgactcagctttccctgttaatgtagtcaacttaagctactgccatggttcaggttccatcatgcttcaaatatagtttatgactgtagttacgtagtgtggcagcaacacagggcaacttggggctggggagaagtgagcgtgtctttccctccccaaatgcagtcatttagcatcttcctctttcagagtcctgtatcccagcgatggggatcaagattcagacttaaggacacccta

SEQ ID NO: 46257 - DNA, 1676 bp, Homo sapiens
ctcgccaggctgcaggcaaatttcttaatcttgccgggctccagtcttccagtctataaggtgggaataacaaaatttgcatataggaatttggggaaacgtgtagttctgggtttgggtgaagacctccacttttgtagtaggttcataaatcaaatcagagcaaatagttggtgtcttaaaaactgtatttatctgggtcttctaagtaaacggtttgaggagtggtggaggcagaaattaagatttactgagtacttagggtcaagtaaggtgcactggatcgtgttaatcgttaactcgtggaaaccgcccagagtgtgtacgctttctttcttttctttccttttctttttttttgagacggagtttcactcttgtcgcccaggctggcgtgtaatggcatggtcctggctcactgcaactccgcctccagggttcaagcgattcacctgcctcagcctccagagtagctgggattacaggtgcccaccaccacgcccggctaatttttgtatttttagtaaagacgggggtttcaccatgttggccaggatggtctcgaactcctgacctcgggtgattcgccgcctcggcctcccaaagtgctaggattacaggcgtgagtcaccgcgcccggcctggagtgtgtattatcccaattttatggggagtaattgtgctcactcggctcaccaccaagtcgccagagcgcgcctccgcaaggaagccctccaggcacttctactttcccggacccgcctcccgctccagccggttacacgcgccgttagcagcgtgggcggagttggttctgccttcgcggaaccaactggtccagcttctggtgtctcccctcgctcaattaaaagccagctcctctcctttcggcttccccacggtgcctttcgggatttgtagtcagacgcgcttcagccggctctaaggagagcaaaggcaagactccaattcccagcatcccccgcgcccggagagtgcagcgtctattctcatcctcttcacttttccactcctccccttacctcccttctcttctgaattctccattctgggctcttgcctgtgaaatctttctttgctttccccatcttttcctcgcattttttcaccatctttccctcaatctccaggagccaatgcgagactttggctccgattaagcgacggcccgagactcggggtgcgcgaggaggatcgacagagtggtgaggggacctaggagggcgggagtggcagaggtatgagagagagagaggtgagtgggaggcgaagagtgagaggaaggcagggagaagctaggagatcggaaggcgtgggtcagggtgaatgacgtgaagtagacttgggaagggaaaagaggtggctttagatttgggaagcatggaggggagaggttaccgccgtacttagcagaagtgggctaagagatagaagataggaaggacgggcagatttggagcttgtagactggtctgaccaggatgggatggaagagagaggtgtgggctcaattttctttgtccctgtttagccaaagatgagacaagtcattgaaatacaaaatgatcttgcaaacactggacagttaacaattctgtcacttggtaattgagggaagactggagttgaagggcagaaatagggtgaggaggcaa

SEQ ID NO: 46258 - DNA, 2673 bp, Homo sapiens
catttcctaaggacaagagcccacccagtgatgctcaaacaggtatagacaggctccaagatgtcagaggctggcagctggtgatgacatgatggaaaagaaaaaggggcatccaaatctggggaagaaacagagggccgggttgtctggggcagtattctgagtccctacagtcaacccttgctccttgcagacacctgtgctgccccccaccatcaccgaccagatccggctctgggagctggaaagggacagactccggttcactgagggtgagtagcttctggtggccaagtcttggtcattggccagagaaagggcagacagttcagtctgcattttattttttacttcatggactaggagagaaaagctggcaagacagttttttgttgttttggggtgagtcggtagtaaacaaatcgtcccaaatcaatgcactttggatttggctaggtgagggaataattcacagtaatttgtattaggcctttctgaatatggctggatcacactggtgttaagatgaacccctgagcagacaagcatagagaattagtttgtaaaattgcggtgggggcaagcccagaccgcgtccagggctgccaccaaggagctggggggattcccaataggagctccgagcttcactttctcgtcttctccccgcgcccctcccgtcctgccgaccccaggtgtcctgtataaccagttcctgtcgcaagtggactttgagctgctgctggcccacgcgcgggagctgggcgtgctcgtgttcgagaactcggccaagcggctcatggtggtgaccccggccgggcacagcgacgtcaagcgcttttggaagcggcagaaacatagctcctgagagcgcgggacttggacacggacctcggcgggcgggactgggcggggcggggcatcagaactcaggtgttttttatttacgcgtcagggcttttcttgtttaataaagttatgatagctagcagtgcggtcccgggcgcctccccgtggggtttgccttcgcggcggactcgctcctctggtctacagcctttggaccggtagggagagggtggggccaaagccagctgctgcgcatgcgccggccggggccccgcccccatgcgccgcgcggctccagggccacgttccagggtcgggtttggtggattcctcagtccctgccgccgcggggcgccctgggatagcggcggggcctcctggtgagcgcgcgccggggcggcctccgggaagtgggagacgctgcgggtcctgggcccaggccttgggatgggcgggaaggcttggccgcgccgggctgtgggcactgcaggaggcccctgtgcaggtggagatcgccgcggccctggcgggactccttgctggctcttgggcgcgctgatgcccatcatctccctgagtttctgagccctatctctcatgtgtcagtggtcaccgccgaatccagacactccggccctgttccggaagagccctgatatccgtggctccatggcgctgtctgtcgataccatgcactctagctctcaaggaggaaaggttttgtggaagggaatagagacttggaataacagacctgtgctaattagagacaggaaagatggaacaaggggagtgacccttctccacccccatatcctaatgtgctctctctctatccagaacagatctcggcccctttccaaacactcctgatgcctcatttgcctctcgcctcttttcgaccaccattttgggggctgaggcactcacggggcctccccaggtttcactccgtttctacacagtcggagccccatggatctcccatctcccggaggaaccgtgaagccaaacagaagcgcctgcgagagaagcaggcgactctggaggctgagatagcaggggagagcaaggttaggggtcagacagcttgtccttgggtttctgagacttgagaggggctggaggagaccggctgaaatgcagtctggggtatactggatcccagcctcttctgctttctcttctcagtcacctgcagaatccattaaggcctggaggcctaaggagttagtattgtatgaaatccctacgaaacccggtgaaaagaaaggtaagtagaataagtaagaaggccttttctttcacatatgtgttgcccatttggcctgccgaaatgcagcctgggaacaagttcagtggttagtggagctctcctctgccttcacagatgtctctgggcccctgcctcctgcatacagcccccgatatgttgaggctgcctggtacccgtggtgggtacgagagggcttcttcaaaccagaatatcaggttagtatctggcagggaggggtcctaaattgtctccaggacagagtggcccttgaatacaactggacctcagagttgagctcacattgtagaccttgtcttctttctggctctggtgtctccaaagatttctcttggcaggttccccctggccaattccctcctctccactctcctcttatttgcaggacagttcttccttgaagttctttctgttctggagacagtagagggtgctctttccccaatccaattctctcttgcccctttgactttttttcttcctctaggcccggctgccccaagctacaggggagaccttttccatgtgta

SEQ ID NO: 46259 - DNA, 712 bp, Homo sapiens
cttctgagttgtcccctgagagcttggtctgggaaaagaggaggaggggtcctcgctggaggaagaggaactttctagtcatgggtagggtatgggcacagtggttccggttctacctactttctggactaactgacagtgccctggcttttgcaggctctttctcctccacttctcactaaatggaagcttccccgctccttggctgtatccctagaggtgctgagagaagtaggacttcctccagacctgatgggctgcaggctgtgctgcagatggtgtgcccccaccttctgtgctctgacacctgagtgcccagcctctgagttacacattcacagcacagccagccaccttacccacgccaaacaccatctcatctccatggaattcaagggcctggcccttccacgcccagagtacattctgtccagcagctctgagtagcctgtcctgggctgggtcctctgtggtgctagatgtacaatgccatttaatcctactgaaaacctcatgaggcgggtgttagctccattttggagatttttatttttactttatttttgggacagggtctcgctctgttgctcaggctggagtgcagtggcataatcatggctcactgtagcctcaacctccagggctctagtgatcctcctgcctcagacttctgagtagctgggaccacaggtgtgcaccactgtgccctgct

SEQ ID NO: 46260 - DNA, 630 bp, Homo sapiens
gcacagtcaggttgaggccaggggtggaggcaggggcaggtgggtggtgaatggcgatgactgaggaatctttgagctgcctctgaaaggtctcagcagtgcgtcctgtctgtgccctgacttgatgtctgtctcccctaccttgagggtctggagacagaggtaccacagctgcccaacacctcccggccccatctctcccgcctttccttccccttcctctcaggcggattgtccactggctgctctctcctccttccatcttgcagcttaaggaagaggaacctgcagggggcggaagggaatccactccatacacagtcgctctgagatttgcttcagggcggagatctgaattcctgagattccgatggggccatgtgggcgtggtctcggagaggagataggcgtggctgggcggcatggagggaggggtggggaggacaaggggagctggctgctcccattctgcagattttgaagacaagagtgagtgggttacaggtggggagggcttgaggctgggctcgggttgtgatgaggtcgggtggaactggagtgtgaatcagagctggtgcatggctgtgcccagcagagagagaggccagggcaggaagggaagagggacaa

SEQ ID NO: 46261 - DNA, 527 bp, Homo sapiens
tgtgcccatgtcagtcccaacagaaacctcccatcacccatgcagccttggctctcttaccagagtatggcatcatcactaattgaacaggtgccccagtttgctgccaggctcctaaacgtaactccatccagaatcaaacagcagggccacaggtcactcgctatctgctcctttgggcatccccatttgctgaaagctggaaacctatcatggtcagtaatcccaaccctgacactgatgtcactgaactatctggccctggctgggctgggaaggcccttattactgaatctcccaccagagacccgctctgctaaaggcaagattgaagcttgactctcagaaagcagacatgccagatgccagagggacccagacttaggcccctggagaaaggaggcagagggacacctgggttctggaaggggctggagagccctcgagaaaaggaggaagatgcctggattttagttgtctgggtagacggtgactcagcctgtggcatctgccaggacaggagtgtc

SEQ ID NO: 46262 - DNA, 499 bp, Homo sapiens
agagacggggtttcaccatgttggccaggctgatcttgaactcctgacctcaggtgatccaccgacctcggcctcccaaagttctgggattataggcatgagccaccatgcccagccttagaggctttattagcattcaaaaccatggatgcaatgaagtgtggagtactcttaaacaagctccaagtccatgaaatgccgtgtcagaatttttcctttcctttttgcatagcaaagtacttgcacaatcccaaatatttgtcttcctgagcagcagctacaaagatgatgccaccaggcttggccagggtagctgctgattttcccttcttcctcctcctcttctcctcctcctttttcttctaattcttcctcctcttcctcttctctctccctctctgctttctcctccgccttcttattttcttaaccatgataaaatatacataacttacaatacatcattttagccatttataagagtaaagtttagtatcat

SEQ ID NO: 46263 - DNA, 804 bp, Homo sapiens
cgtctctaccaaaaatacaaaaaaaattagccaggcgtggtggtgggcgcctgtaatccctgctactcgggaggctgaggcaggagaatcacttgaaccctggaggcagaggttgcagtgagccaagattgcaccattgcactccagcctgggtgacaaaagggaaactccgtctcaaaaaataaagtgatgctgctctttccgaacatcatttcctcctgtgggcctccctagactctcaggcttggctccctggaggacctgggcaaggagggagggggcactggggtaatgaggggagtggcagagggcagggaggagtggactagaaggtgctgggccgtcccagggtgtgaggggagaaggcagcggaacagtggaatctgtggcttcttcttttccaacacaaacttcccctgaccagccagaggtagcaaagtttgtcttgttttctttgtcacattcctcctggctgccgtcagaacttggccaagacagccaggctggaggaggcacagtctctcctggcctcctgccaggtctccagccgcccacgtggactggcggtgcagccacgtccctcctcctggctactctctcctgtccactcctgtccaccccatcctgccaccctgggctgcccagttcctctactgtcctgcccacctgtgggcccttgagctctaatccgccgtgcttttggttttttactgaaaccctgccttctgtgctagattttactctggtgctcaccattaatctttctctcagtgcaggtggtggagacctaaagctaatggggct

SEQ ID NO: 46264 - DNA, 1320 bp, Homo sapiens
tatggtccctgctgctcctggccagaggtgagaaaggaggtacacagtgcaggggtcttgagcgccatctccagagttctctccatggctcagcaaggcctgagggaagcccatccagacaccagcaggccatgactcttgggtccttccctgttaaagtgctggcccaaggcctggccccagctgaatgtggccacatgcagggctagaccctccccaagaccttgggaatccaggccgcctagatccccaggcagaaaagccagcgtcctgacatcttattcaaatctttcctgcggctgttctctcagcttctctctactatccccttagcttccatgcctgctgcccgcctcctctttctcgagtcctaacacatagtgggcactttaagatcttcctcccaccctcccaccctcattaatctattttttacccgaatctgggatccctactcccgtccctttttacaacctaatctacctttttctgaaggaattattctggtcctgaccctcacccccatctctcaatagcctgccctcgccccctgtacgctagccggctctactctcccaccactgctcccctagatacccgaggcttcacccagttagcccgtgagctctaaggctgttctgatctcttcatctgtcccttcacctggcccctgtacccccttcccctttggaccccttgaaccctcccaggacccccgctcagccccttcccgcccccaaccgactcttcccgaacgtcccttaccaaccgcgagagccccctactgcgctttggccacaccccctacgcctcgctcccggccccgcctctgcccctgaccgcgcctgcgcaaggcgggcgccctaaagtcctatttcactctgttgggaggagggggaaaggtgtacgcaggcgcagtggcgtctaaatttgggcccactaaatgcgtcggagcatctccgcgcccaggcggctcctcctcactgcggcaacccgggaaaacttgtgaactaatcagaaaaagtggaaggcgggagatcttggggcgctgtccaatggcgcggaagagaacacatgagctggccaatcgggaacggcacgggggcgggctcgctcggcgcgaagttcgggcccgggaattccgaaggaggggtaggcgctgcccgcgcgcagaggccgcgcccctcctggccccggcttcttggctgtcaaacagatgcagcaacgtcggctcctgccgaggagcccaaggggtcccgggatccgccgcacaggctggcactgcttgaagaggaggctactcggagactgcgccgcgcg

SEQ ID NO: 46265 - DNA, 1941 bp, Homo sapiens
gctcactgcgacctcaaactcctggtctcacacgatcctcctgcctcgcctccgaaaactctagttttacagatatgaaccatagcgctagctcttactgtctttcttcaacacgtcctcccatccttccctcctttctccactctgcatttgaccccggtgtattccagcctccaggccaacacacgtgaccacgtctgcctggggcagttgaagtaaaggacgcgaggcggcgctgtcaccgcattctgtgaaccgcagcgctctgggtccctcccgctggtctagtatcatttcagtgaacgtcactctacattttttgtgtgtgtgtgagatggagtctctgtcgcccaggctggagtgcagtggcgcgatctcggctccctgcaagctccgcctcccgcgttcaagccatttttctgcctcagcctccgagtagctgggactacaggcgcctacgaccacacccggctaatttttgtatttctagtagagaaggggcttcaccatgttggccaagctggtctcgaactcctgacctcaagtgatccgcccgccatggtctcccaaagtgccgggattacagacgtgagccaccgcgctcggctgtcactgcagactttgatgggggccacactcggggtataaattaggatcctcactgaaagggcgggaccatggaggctttttcttggccccttagttgtgggttttcctctgggcggcgaagccagtttccatcagaactgcccagaggcgggcgctgccttcctggggtgacgcagcagcaggaagagtttccggatcctggaatccgtgggcggcccgtgggaggggctgaggctcatttctctactcacctgtctccgaatccgtcgtggtgtttcaagcgagtcaagattccagatcgcgccccaggctggactcggaattactgccccgcgggtctgcattttcacagcggcaggtgtgagttccccgccgctggagaccagaagcctgaaggcagctccgcccaccccagcccacagcgccgttattccgtttctatatcagtaaacacttgtcattttccgtagaccagggcggggtgacgggtgatcccagtcctcgcagtgaactctggggcgcagaattcaaaacgcttgcggtcgccgagcgcagccccgccctgggttatgtaagtgacagcgctgggccgtttctcttttttttccggaccccgcagtggcgcctaaagtctgcaaggaggaggtcgcctctgtgctgtgggtccaggaatctaaggcgagtgctgagggagaaaatgtagttgatggggcagagcagaaggggctgtaggtgggttggagggggaggggaacgggcagccaggcctggaccctggggagtgactcacccggagccgaagaccatctcagctttccctagcccagaaagggtgggactggctttatttctgcctgccatcacctcaaaatgccgtgggacaaatcttacatattattattgttatttatttatgtattttattttttttgagacagtcttggtctgtcacccagactggagtgcagtggcgccatctgggctcactgcaacccccacccccccgggttcaagcaattcttcctgcctcagcctcccaagtagctgcgattacaggcaccccccaccacgcccggctgatttttatatttttagtagagacggggttttgccatgttgtccaggctagtctcgaactcctgaccttaggtgatccacccgcctcggcctcccaaagtgctgggattacaggtgtaagccaccgcgcctggccgggaaatatctcttacagaaataaaggcagttggctgggtgtggtggctcacctgtaatcctagcactttgggagggtgaggcaggcagatggtttgagcctaggagtttaagaccagc

SEQ ID NO: 46266 - DNA, 3276 bp, Homo sapiens
ttgaagaggagagaaactgagacacgcaggtatgtgcaaaggaagaaccttccagaatcaccctcatgtacacctatgctctgtacatacccagggctctgcactgaggcagaccctaaagctgcagtgggaatggaggtggacacacttatggaaagacttcttcaaagaatgttggggacccaggtctacccttcctgctgtggctcttatacgacgtggagttggggagggaaaggcactggcatgtggaggaagactaggagaggaggggaggccaaagcgtgtcccaccctcactccacctctctgctctctgtctcctacatcgagtgcctccttccccagggcttgtggtccctgacaaggaggaccctgagggcaaccacaccttgccatgcagagcacctggcttctcatctgccaagctcactctgacccggctgcaggaagggaaggagccaaccccggactcaagactcaaggggaccagaaccagggagatgagacataccagggctgggcagctgtgggggtccttccagagaggagctgagatacgcctacctggaggggcccctgggcctggaggggctcctcagtgtgactgggtgaagtgttttcagaggaccagggttgaggttgggggcatctcatccagaccctgccggcatctgccccagaacccaagggcccctccttcctccctcctcaatggaaatgctggagatgtcctcagtcaccctctgagcactcacacatcaccccttatttggaaatttttctcactctaaccttccttcctgccgcaccttctgccccatccccaggctctggcctctctctctcctcttctaccctttagcaggtaatgactcagttcccactgaggagccagctgtaggtgagagtttgggctctcggtgaggttgggagaaggaaaaggcttatgggccagggggtgggagggagaatgggcacagccagagcagagtggaagggttgggggaggcgataaagacagatgtttccgtattaccatttttctttcatggtccgagggagctgcccttcccccaagcccaggaaagtgaaaagagaagcaggaacagtaaaatactccacaggaaagaaaaatcttagtgatccctcctgctgtctctttccttttgcctattctggcaaattttgtaagtgaaatttgttaccaagatgtgaaaatcttataagaaagtctctaaatatttgagaataaaattatcaatgtctcagctctgcaggctgaaaaaacggaggctttacaaaataaaatcatgcttggaaaacttctcctctgagggatgtcaaaggctgcactgaataagctctaaggtggtgctgaaatgagtcatttatttgcctgtgtaagctcaggcaggtgttggaattgaggaagtataggtaatgaaaaaagtaaacatgtcctcgggacatagcgactggtgatgaccacacaatcaacacaataaactctagcattcacattgtagtccagctcattcaagcaaagctatctccaatagggagtttaccctgtacagaacacgtgcatttccacctgttctcagactgaccctttgctcatcacaatagtgaaaaaaaacacagccctgggtggagatttaagatgctaatgagtcatgagatgtatgaacaagcatgtacagctactgcacacgtgcacccagaagaccgcccagaacatgcttgctagtaacacctcttcccacccacctcctgtgaataatcatgtaagactcccataaagggagtttctccagcagtgatcaatgctgtctcatccttaggagcagcccaccctgaatcctctcagggtgtacagtttattttgcacttaactttcaaaataatatttttcctttgtaataaattgctttgtacttcatctcctttgctgcgtgtttcttgtttaaattcttttaaatgaagaagtcaagaaccaaggtattacaacagccgtcaacatttccggtgccatgactcagaggtttgtctgcttcgttggtttcagtttcccttcactactggtgagtactatggcagccagagacccctgattgactatcactgctttccccagatctattaaggttttgggggaggaccttttaactcactcacattctttgagcaactaattgtgattgctttccatttggctgctgcttttacagtgtttacaattaccttatttggatggaacgccctgattattcagccttgggacttttgctgcttctgtttcactttttgttttgctgttcctcccaggactgcacctgatctgtacttactggctattgtaactttttttttttttttttttttgagacaagagtctcactctgtcacccagactggagtgcagtggctctatctcggctcactgcaacctccacctcctgggctcaagcgattctcctgcctcagcctcccaagtagctgggattacaggcgtgcaccatcacgcccggctaatttttgtattttcaatagagtcggggtctcaccatactggctcagctggtctcgaactcctgaccttatgatcagcccaccttggcctcccaaagtgctgggattacagacatgagccaccgcgcccagcacttgtttgttaatcaagtaatctcttcaaagatttttgttcaccttgagggacacattagatctacttttgccaacagtccccattcctccaggctctgtgtgttctgagactcctctgagtctcagaggagtgtgttctgaacgtctcctctgagaacaggagacgttccaagaggccatccatgttgagtgcaggatgtgtggccacatggatgtgtagtcatggggactataaccaggcattccaagcatgatgactggacattaaaaatggcagatcagtgaaataaggaagggcttgttggtgagacatccaggctccccggctggcagcagagatcacttcagttcagcttggagacgtccagcaccagtgagacctagaatggtgcatggcaaatgcccatgacctcctagggcctcagtttcatggggattcaagggaacaccctggactccatcgtccggcttagctcacagggatgccgatgacctcctggattttggtacatgtttctgtggttgcaggattctcttgttacctagaaagccacctcctctactgtcactgaaacacctctagggtatatactaaacattggaatat

SEQ ID NO: 46267 - DNA, 1250 bp, Homo sapiens
ccgagccccgccccgccccgaccaacccgcggggattttggcctaaaccgaaaatgaaaccgggtaaaggcgactggggctctctccggtcgagggtctgggcgggttccgcagatccaccttggggtggatctcagacggggagactctgggcgacccgggccgtccgtgggggatggggaggggtcgtgacctgcgccccgggccggggtcactcaccgtcctcgctctggttgtagtagccgcgcaggttccgcaggctcactcggtcagcctgtgcctggcgcttgtacttctgtgtctcccggtcccaatactccggcccctcctgctccacccacggcgcccgcggctcccctctcggactcgcggcgtcgctgtcgaaccgcacgaactgcgtgtcgtccacgtagcccactgagatgaagcggggctctccgcggccgggccgggacacggcggtgtcgaaatacctcatggagtgggagcctgggggcgaggaggggctgagacccgcccgacccacctccctgcgcggctccccgggtcctgcgccctcgccgggagggcccctcgctcctctccgcagaggccgcttccctcccaaccccgcactcacaggcccaggtctcggtcagggccaggcctcccgagagcagcaggaggagggctcggggcgccatgacccgcatctcggcctctggggagaatgtgagtccgggtgggtgactggggactttagaaccgggactgcggagacgctgattggcttctctagaacccgacacccaatgggagtgggaattggggacgcgtcatgagtattcaggaagaaggacccgacgcaggttgggagaagtgaaactcaggggagtggagaatccccaacgcggcgcctccccaatgcagacacggcccttggagcctgagaccctgagagccccgcccgggacctgggacttcgtcctgatccctcttctcctacaccaagcatctttgtcacactgtgtgcctgagtcctggacaaggatctgtctgtggaaaccagggagagaccccaaggctgcgcccagccccttccccttcacttctcctcctggaatccccgtccctgaactggactccctgcctcccaccctttgccttaccttacctcacctcaggtaatattaaactacatccagcaaaataaaggaaacttacctctccccttggactcttgtacagggaaactcaccatggggaacttg

SEQ ID NO: 46268 - DNA, 1175 bp, Homo sapiens
gcggaggaggcgcccgtccggccccacgtcgcagccgtacatgctctggagggtgtgagaccctggccccggccccgcggtcagcccagtcccccgagccccgccccgccccgaccaacccgcggggattttggcctcaactgaaaatgaaaccgggtaaacgcgcctggggctctcgccggtcgagggtctgggcgggtcccgcggcctcagggaggcggatctcggacccggagactcggggcgacccgggccgtacgtgggggatggggagtcgtgacctgcgccccgggccggggtcactcaccggcctcgctctggttgtagtagccgcgcaggttccgcaggctctctcggtcagtctgtgcctgggccttgtagatctgtgtgttccggtcccaatactccggcccctcctgctctatccacggcgcccgcggctcctctctcggactcgcggcgtcgctgtcgaacctcacgaactgggtgtcgtccacgtagcccactgagatgaagcggggctccccgcggccgggccgggacacggaggtgtagaaatacctcatggagtgggagcctgggggtgaggaggggctgagacccgcccgaccctcctcccggcgcggctcctcaggtcctgcgcccccgcctgcggtcccctcgctcctcccggcagaggccatttccctcccgacccgcactcaccggcccaggtctcggtcagggccagggccgccgagagcagcaggaggacggttcggggcgccatgaccagcatctcggcgtctgaggagactctgagtccgggtgggtgcgtggggactttagaactgggaccgcggcgacgctgattggcttctctagatatccaatacccaatgggagtgggaagtggggacgcgtcacgagtatcctggaagaaggacccgacacaagttgggagaagaagtgaaactcaggggagtggggaatccccaacgctgcgcctccccattgcagacgcggccctcggagcctgagaccctgagagccccgtccgggacctgggacttcgtcctgatccctcttctcctacaccaagcctctttgtcacactgtctgcctgagtcctggacaaggatctgtctgtggaaaccagggagagacccccaggctgcgcccagccccttcccctt

SEQ ID NO: 46269 - DNA, 608 bp, Homo sapiens
aggtcttcctacacaaaatcaccagattctgtttaccttctactgaagagattgtgtcattctctggaaatacctaaattcattcctgagcggcggtcagggcaggtccccgttcttgccgatgcccatgttctgagacacagcgacgatgcagtttagcaaacgaaccatgacagcagcggtgagctcctccaagcccgctcgctacaccaggacgcgcggccaagattggccggaaggtttttacttggaaactggaggatgagccatgacatccctctctccacctcaaagctcgtcctgggcatccacctccagggagcagaagcagcgcagcagcgccacctggtggtcgatgcgcttcctttgcagatcacgcacagccctgagatccacctctccttcctacgcaccacgcatttcttcactggacaccagcctgcgtcaatcttcctgtaaagcaaaagaagcgtgaggttggtgggggaggaatggtgttatctccacctttggcgagatccatgtcaccgtgttcaggggaagggccaggccttactccccatgcagagaggaggctctggccgtgaaggcgcctgtggagaggtgag

SEQ ID NO: 46270 - DNA, 4427 bp, Homo sapiens
cctgggcgacagagcaagactccgtctcaaaaaaaaaaaacaaaaaacaaaaaaactctcctttactttttctctccccttttcttcctatctcttccctcatttcttcaacacgtccccccatccttccctcttttctccattctctgcatttgatccccggtatattccagcctccaggccaacaaacttctccgcgtccgccgggagcaggtcagggaagggacgcgaggcggcgctgtcaccgcattctgagcgccgcagctccctgggccccttgtatcatttcagtgaaggtcactccagtctttcatggaggccaaactaagggtgtaaattaggatcctcactgaagtggcgggaccctaagaggctttttcctggccccttagttgtgggttttcctgcgggcggcgcagccggtttccatcagaaccgcccagaggcggacgctgccttcctggggtgacggagcagcaggaagcgttttcggatcctggaatacgtgggcggcccgtgggaggggctgaggcgcagtttcctactcacccggatccgaatcctccgcggtgctgtttcaagagagccggattccagatcacgctccagcccggactcggaattcctgccctgcgggtctgcattttcataacgggcaggtgtgagtgccctgcagctggagaccagaagcctgaaggcagctcggccctccccagcccacagcgccgttattccgtttctatatcagtaaacacatttcattttccgtagaccagggcggggtgacgggtgatcccagtcctcgcagtgaattccgggcagcaaaattcaaaacacatgcggccaaggccgggcacggtggttcacgcctgtaatcccagcactttgggaggtcgaggcgggcgatcacctgaggtcgggagctcgagaccaacctgaccaacatggggaaatcccgtctctactaaaaatataaaattagacgggcttggtggtgaatgcctgtaatcccagctagtcgggaggctgaggcaggagaatcgcttaaaccttggaggcggaggttgcggtgagccgagatcgcgccattgcacttcagcctgggcaacaagagggaaaactccgtcgcaaaaactttcgggggcggagcggagccccgccctgggttatgtaagcgaccgcgctgggccgtttctctttcttttccggaccctgcagtggcgcctaaagtctgagagagggaagtcgcctctgtgctcgtgagtgcatggggtataaggcaagtgctgagggagaaaacgtagttgatggggtagagcagacggggttggaggtggggtggagggggagggctttggacagaagacctgggaggcttggtgggggaggggcgcccaggcctgggcactaagaaacaagtcccctggagctcaagaccatctcggcctcccctagcccaagagaggactggcttcatgactccctgaaaccatttctaaatgccttagaacaaaccttgcatattcattattgttattgaactattaaaagtcttttttgggggcgagctgaatcagatcctttgctggagctggcacacggaggaagtcctggagggagggtagacaccgtggaggtaagggcttgggacctgtgtcaggagagctaggtccatctccctcccagtctctcactaggcttatgatctttagcagtgaaaataatctctctaaggtggggaaaggaccccggtccctgctgtgctcaataaattatgaggatcaaaataaattatcagtgaatgtgaatgggaaaactaagaaattgttaaaattctcgaatacattacattttcatccacagaaaagtgtaggctagggatcatgggggaatagttagtaatgacagggatagttgaacttaaaaaaaaagtttgtgaggctgacaaagaagaaacggacacatttcctgatcttggagggttcatagggtagaagatggtagatgacagctgggtgtggtggcactcgcctgtagtcccagctactcaagaggctgtggtgggaggattgcttgagcccaggcattcaaggctgcagtgagctataatcatgccactgcattccaactgagtgacacagcaagactcctctcttaaaaaaaaaaaaaaaattcatggcagggcacaatgagtactatcaggaaggttcaaaccacgggctaaatcagtagttctaaaacttgactacacatcggaatcacctagggaactttaaaagatactaagatttaggtccaacctgggtttactgatttaacaacctaggttgtggctgtggcctgggaacatggatattaaaaactctccaggtggttctacgcagtggctaggtttgatgacctctgcctagatgtcccaacgactaagagatgtgcgttggggacaaggcaattctcttagtagaaagaggctttcgggacagcattcttattattgagaattgagaattcatatgccacacaatttatccttttaaagtgtgcagctcagtggcttctagcgtaatcacaaggttgtgccaccgtcaccactgtctaccctggaagattttttttcctttttttcttttttcttttctttttattttaaaggctagtcaagtgaaacagtgggagtgaagaagaaacaaagacatctataactggttgtgatcaattagttgtaaacactgcactcagaccagcctgggaagattttaaggatatggtgtggtctgatgggttccaaggcagaggttacaatagcctggaagagggagactgcttaggcagtggcatcctggtgggatagggtgaggagatcccagagcccacgtttactgcaaccctggggagatgtcaccagagaaatgggggtggtgccagacagcagattgtggcagctgaggttttccacggtagagtagaagcatccatcatgtgtgacattcagcagatggggcgctgtgggtggcttggagcactctggttgtaactgaggcaggcaccgtgtttaggaaggctgtgcagtaatctaggctgaagggaggggaaagcctagactaagattgtggctgtgggattgaaatagcgttgaaggagctgactttgactcccggagatgatggggaaagaggaaatcagaagggaccaaggatggtgatgttcttaagagaaactgaggaggaagagaggatgatatggtggcagacgtatagagagtctttgtagatctctcacattggaggggactatggtcggaggtacagatgtcctaaggcaggctggaaaagggagtctggagagagcttggtgttgtagtgaaccacagggagccgcctccttggccctgtgatcacccagggactgaatagagaggcggccctgggagacttcagacacttagaggatataagggggtgaaaggggggcctggctttgagtcaaagggaggagaaggagattataaagctgaaacgtctaagagagtttgtggtctgagcggttctactgcggcaggtgcttctgagaggcagaggtggctgagatctggaaacaggtctgcaaatctggtcactggtctcattgccagtaacgctgtgcgcggttgagggagtgtgttgggagaatagccacgcgttgtctgtcctggaaggaacaagccagtgagagccggtttaatggggcggccggcgaaaggggcttggtgaggcccgcgctcctcggggtgggggcgcggggatgggtggtcgcgatgccgggagggcaggcagggccctggccgtgcttatgaagttggagctgtactctcagctactcgaagctggtccctgctttaggctgcgctcccgcgtgctccccattttctgggccccaggtcccgccttctaaatctccccaggtctccagcccactggaattttctcttccaagcgtggccccgccctctccgctcgtgattggccctaagttccgggccccagtttcattggatgagcggtcgggggaccgggccaggtgactaagtttccgcggcgccttctccccggccactgcttgagccgctgagagggtggcgacgtcggggccatggggctgggcccggtctttctgcttctggctggcatcttcccttttgcacctccgggagctgctgctggtgagtggcgttcctggcggtcctcggcggagcgggagcagtgggacgtttccgggggtcgggtgggtagcggcgagcgctgtgcggtcagggcggggctcctgtgccctgtcggtggcgcagggagctggacgcggcccgttaccgccacacttcagccctgcttccccgtcacttttcagtcctcctcgggatcgcgcatcacctgcactttctggtctcctcctgc

SEQ ID NO: 46271 - DNA, 1492 bp, Homo sapiens
caggacacctgaggtggggaagggagcacagaacccagacaccagcctggacacaggcacctgggataatctcctattccttggaaagttccagtatctgagggaggaacagtgacttctggtcctgacctgagtggagaccgagggactcagaagagctggaatcagacccccacacacactgagtatgagtcagagaacaaggcctgagagaaaaagtcacagtgcccaagactgctgcaggggtcaaaggggactgctgatcagtgttccagggatttgctccagattaatctgagtcatggaaaaactgcctttcttttgtttctaaacaaatacctgcaaagacaaaagaccacataaatccccaggtgcacaactttttcagatttaaagaaaaaacaacccccgtctttccctccattcccaggagaagctcactctgtggcatcaagctgcctgggtgagctctcttctagaagagtccagggggacaggcaaggaatgggaggcaggaagtccagttcagggagggggattctgggatgaaaagtgaagggagagggactgagcccatgctgagggtttttctctggtttctcagacagctccggggccaagattcggggagacattgagacagagcgtttgatataaaagaagggggtaagagccaagtcccagggcccggagcttggctctctgggcttcaggccccgagggcggtgcctgggatgggccggctcagctttggggtttcccgagctccgctctctctcttccacctttcccaacctgtgtcaggtccttttacctggatactcatgatgcggcctcagttctcacttccattgggtgttgggttcctagatcagccaatcagtgtcgccgcggttcctggttctaaagtcctcgccggcccaccgggactcagattctccccagacgccaaggttgcgggtcatggagtcccgaaccctcctcctgctgttctcgggagccgtggccctgatccagacctgggcaggtgagtgcggggtcgggagggaaaaagcctctgcgggaaggagcgaggggcccgcccggaggagtaaatctgcacatatatttaattacagattacaattacaatcaaggcagaaatgatctcatttttacattacaactctggaaaaggcaatagactgagatgcaagtgtgcccccaagtgatgggcagaaggagagaaggtgttttggatgcattctagaacacaggtaatctaaggagagttgatcaaggccgtggaagagtcctccagccactattggccatcaaaggagtcctctgtgtcccaggaatggtcctgctttggtgtccctggtgtgacccatcacccgctgggaacagcctgagagaagtagggcctctgcaccaatgctgctgaggatgtcagagcacaggaacgaggccttgggaaattacctggaaatgcgactgaaatcttccttcc

SEQ ID NO: 46272 - DNA, 2080 bp, Homo sapiens
ccaacttataaattcttgatctgaaagtaacagtgaggaaatagaatagataataaaaggtaaaatacgactaataacttagtaaagtggaaaatggagatgacaagtagagtcctgaaaagtcctcaaaggaagactccgctttccctattataatcccaccgttatggatgcctaactcagcagccatcagtcaagggtgatagatgagggtcatcactgcgcaaagcgctcacctttcgaaaagaaaacatcatatggccgccgtccacctcccatagctctcagcctcccacttctcagtatcctcccttccgctgtttaagcaagccttgtgtaattagcatgggggggaggggcggtgcaagacaaatggctcggccacaaaaaaacaaaattcatgtctccaccctacaataagaaagctaataggtgacagagaaaggcaatccccgcccaggctttaacaggatctttaccaagtggtctcacatcactgttacgctacgaaggtgagactccttttggagaaacatacaatgacaccaatcgtatcgtaaacacttggaaggcactccaaattaagttgggcaagtcaaggtgagaaaaatccaactgggcccagaaaccagctcctcctcccagtcccaccgagggccgagaaagagctcaagaaaggacaaggaaggtgagaagagccccgccctccgcaaataccaagaccaagggacgccgagcgccgcctctcattgatgctgaggcctccaatatgagaagaacccattggaagaagggagcaaaacgaacacaatggcgccgaggacaccatcttggattgggtccccccttagcttcccttccttcccccaggagctctttgctctcgaaagggatgcaagctaaggaaatagcgaaccaactaggccccagcgaccagaccatcgcctgtgaaaagggtatcaggaacccatgtgacgggatgggtgcggagaagcgcagatggaaacggattgtagcgaaggccaaagcttacctaaacagggagagcgcgtatggcggcagcaacagcgacgaaggagggaaatctgccttcacttccggttgcaggcttccctctactccagcctcccgccttcttggctgcaagagcgcaggcgcaagggaccggaaacagggccttccgcggttatacagatccgtgcgctccaggcttgcctttggaaaatgcctgtctgaaatttgttttaaaaccgtttctaacttcactgctaccgccagtaacaaaagatataaaggaaactaacgtctcccccccactgttatctttattctcttatcctactcctctccatgcccctcatctcttcgtttaggtttttgccacgcaggtcttctctgtaggcacccctccatggatgcgcgaggaacgagtgtggcgaaggctgcgagttcccacggggtccttggcccggtagtgaaggtgacctgaggactgctgggcacgcactaggaaccggcaggccctagctgaggggagggaggagggaagtctcagggaactggattgctcgggggtgtttcccgactctttcccagtcgtggggctggtgggcggtattttcccaaaaggatgctgtccgaggtagctgatgccctagggccagtgagtcaggaaggtgttctgaatccgagcgggaagacggggtctggattcggccccaagtgttaatagtagggcttgagggttatactacattccattaatactgtttttgtttttgttttgagacagagtctcgccctgtcgcccaggcgggagtgcaatgtcctgatctcggctcactgcaaccgctgcttcccgggttcaagcgattctcctgcctcagcctcccgagtagctaggattacaggcgcccgccaccacgcccagcaaatttttgtttttttagtagagacggggcttcacccatgtatgacctcaggtgatccacccacttcggcctcccagagtgctgggattacaggcgtgagccaccgcgcccggcccattaatactgttaattcgagcagaatgttcttg

SEQ ID NO: 46273 - DNA, 1685 bp, Homo sapiens
ttgaatgctgtcaaagtaccagatggctcccaccccccaccgcttacttctcctcctccagctcgttgctgcagtcctccactacccctgggtcttagtgctcccctgctcactcagcctcctgcaccgagtgtctctcccaatctcatcctcctattgatgactggtcctcctctccagcacttcttgctcaggcagtacccaaaggggccgcctgggagcagcagagaccaggcccaaagctgcgggcttacaacaggttagccatcccagtcggaaaggtctagggatgaggcaggggcggagacgggggagtactgaggtgagagaaggagaacttgattggtggtaacagaggaagcataaagggttgtgaatgcggtgaaaaggtaaggatgtcatcatgcaacctgtgttgggaaaagagcattctgggcttaattctaaactaactctctacctttctctctctctccaccatcccgccccctcccctgcctcccgttgttaacatctccatctttttctacatatttctcaagtccaaatttttgcatctcacttgccccatcctacgatagtcttcttccgtcttttgtctgtattttttctttttttttgatctgtccctgttgttgtcccactgtggtttttgtttttgttttccatgtttaatgtgatttttatcctgtctttatctcctctattttctctgtcttctcatcttttcgtccatcactgaaccatctcctctctctgccaagttagaggaggcgggaaaaaacctccaaataactctcttttctccctcccctcccctcgcctccttttcctcgcctccagtccagtcttctggtttcagacggcccctttaatttaagttccctagtttcccctgggagatctggccaagaactacccggtcggggcggaacgacatccggtaacgcccctcacagttcacttccgtcctccacctgcgtctctgcttgcgccatttcctccagcctggagtgtctccgcccttcccgcctcccgtctccgagcttcttaaacacaggccttgggcctacggctctgggggtacttgggggggcgggggcaggtctgatgagtaacccctccccccaggttccagaggaagaagcctccacatctgtctgccgggtacatgatattcaatttctagatcattattggagattatctgtgactttttaaaactcagatttctgctgataaaaattttccccatccggccctgttgggtttttttaaagttctttgttaaaaattaaaaatttacctgggctcctgagccttaaaccaattatttacccttttctcgaattttacattaaaaaaattaaacctctgatcctatcacccccctcaaaaaaaattttttttcaaatctatcatctgataaaggatcagggttaggttaggcctcatctcttgctgaagatattaaaaaaagacggaaccaaagggagaaacaacaggggatgtcagagatggagggagaaggaccagccaaggctgaagtcctgactgctgccttttttccttccccagcccaagagttccatggcctccacttcccgccgccaacgccgagaacgtcgctttcgtcgttacttgtctgcaggacggctggtccgggcccaggccctcctccagcg

SEQ ID NO: 46274 - DNA, 659 bp, Homo sapiens
aaaactctggtgaccaaatttgctcctccacccaggagatttctcactggtttttaagcacatcatttccccttctgcaagagttacataaaaccaaagcaaaataagccctgaaacctgggcccaccggaccacagtcttttcaacgtcccttcctggtgtctggcccccagccctggtgggggttcccctgagataagggctgttcactttctctgaccacatggtttccgcttctgtgtctcttgtttcctaggctgataaaaatactgagccctagaggccctggcttcctctgaccccttggggcaggcagcaggcatcctgtccagcatggtgggggcagggacaggggccagggattcccaaggggtgactcagtgcctgccatgaaacagtgggtaggtggaagtgtatctctgctctctagagctggcaccaggagttgagtctcagtggaggatgcattgggattcaattggaggaacaggcctggaaaagaataatgagattgaagagggtcagtttgaggactcaggttggggcaggtttggattaagttaggaaaaggatctgggagggactctgttcagtgtaggtcaactgagcattatgtagcccaaagataaatttaaaccctgcttcaagcttacaatcta

SEQ ID NO: 46275 - DNA, 1052 bp, Homo sapiens
ggctcagacatgttttccgtgaaaacggagctgaacaataggctgttcccatgtagccccctggcctctgtgccttcttttgattatgttttttaaaatatttatctgattaagttgtctaaacaatgctgatttggtgaccaactgtcactcattgctgagcctctgctccccaggggagttgtgtctgtaatcgccctactattcagtggcgagaaataaagtttgcttagaaaagaaacatggtctccttcttggaattaattctgcatctgcctcttcttgtgggtgggaagaagctccctaagtcctctctccacaggctttaagatccctcggacccagtcccatccttagactcctagggccctggagaccctacataaacaaagcccaacagaatattccccatcccccaggaaacaagagcctgaacctaattacctctccctcagggcatgggaatttccaactctgggaattccaatccttgctgggaaaatcctgcagctcaggtgagatttccggctgttgcagctggccagcagtccggagagagctggagaggagccgcattctcaggtacctgaatcacacagccaagggacttccagagattcgggtgtctaggcttcaaatcaccctgtcctaactctgcaacctgaaccagccacttaacctatctatccaatggggataggaatgtccaccacacatagggcatgtgagagaaggcctgacctccatcagaggacctcactcagcccttggcacagtgggcacttagtgaattctggcttccttcaaccagtttccagctgttctatccccttccattctctcagtgggtgaaatcgaagagactgaggacaataaagaacaaggaaccgaactgccggacgtggtggcatgcacctgtaatcctaccactttgcaaggccaaggtgagaggatcgcttgaacccaggagttccagagcaacctgggcaacatagtgagatcctgtctctattttttaaaaaagaatgaaacataggaataagatgtgggtg

SEQ ID NO: 46276 - DNA, 1056 bp, Homo sapiens
accatatcggggtgactgatgttgacgtacaccctctcgcccctccggagctgcaccaggccgccgaaccccacgctcgtgtaccagagaggcccgtacccttgtctcctggccgggtccagcactggagtcaccgtctcggcgccctcgagcagcagctcgggagtgcccggcccgtaggcgccccccgcccggtacagagagctgcgcagcgtgaccgagcggccctgggggtccccgccgccagggggcgcccggccccggtagccgacgagacagtagaggtaatagaggccgtcctgcgggagcgccagcccctcggcgtccgagaactgcgtcccgctcgtcagaaacgcctgttccttcgtcgtctcccagcctagcccctgccccttcagcggagcgcctgcggagacacgggccgacgcgctcttgggaatgcgatcctaaaggcttgggacttctggggaagtggcggcttttagcccctgcgggagccgagccgggccgggggaggagggatggtgctgtttctgggatgagtgcgagttgggggccgagggaacacggatgtggggtgcagaacgctgtagtggggacctccaggccggcttttgcttgcaccggagggaagaagaaactacactgcggggacgagcgtaagagtgggcacgagcgacaaaaggtcgtgaagcgggtgggaaaccgagcactggaatcatggagccgaaggactctgggcgagcagaactggaaccttcggattatttacactcttattcaggtcttggaggtccttacctatgaggtgggcagctgggagcccggggctgagatctgtttctggctcctcctctggcagcttctgaaaccctggaaggggcaaagagtccacgattgggggcagggcagccacccatgcaggctacccttgagagaacagggcgcagggatggggagcctggattcctagaggaagaggtatctggggacgcagcagggagctgggagcccctgagggtctgaagcggggaaggagagacagtctgctcttac

SEQ ID NO: 46277 - DNA, 2165 bp, Homo sapiens
tgaaaattataggttataaaattaaatgtccgtcttagtcgatggttgcccatattttgatgaacgagtcattcctagcctatctttgttcaaatgatttgcatacattatgcaaataggtagaactgcccgaagaatgcctacgctgcgtggtgcggacgaaacgcttcccggggcctttggattggtctgtctagccacctcatttgcatgacgtaatataataactggaaggccccgcccctctggtgcatttccccgctccaaccacctcctcaaactcacggcaaagggatgcgagagctggaactcttaccaggcctgcggaaactcagccctccggcagctaatcccgcccgccagcccccgtcctctctctctttctccctagctgaaggcgccacgggccgtgtgtcgttgccttccacttttggcgtcccaacgtctctccgctcccatctttctactaacgtccgacgcacgctccgcctctttctcccacattcgtcgtgtaaattctgcgtcccaaccgcccagccgacctgcaccgcattcccgccccctcaacacggctcaacggccgacgctgggggcccgcctccttagccaatcggggtcctagtgcccttaagtccctcctctttatgcaaataacctccgcatgctccgcgcgcccggcccttttttttttttttttaaactaaagacagccctggaagtagagggttagggtagaaagtgccccgccctttatgcaaattaaggggcgtgtctaggcgcggagggaggtgggaggtgggagggggtgctcccgggggcggcggttgcccggatgggccgttagtcggggctcagccgcggagtgagcgagggagacgggaggagccgaacccggcgccatccgccgccatcctcccccgccccaccgccatcccgtcccggggagcccctaggcccgggtcccggatccccgcgcacccggccaggtgagtctgggtgaaccgtgcgctgacgcccttttccggcgcgggagaggtggtggcggtggcggtggcggcggcggcggcggtggtgggccggggggaggagaagctgccattagccgccgccattttgtcctcctgctgccgggcctgcttgcccctccccctccggtacctctactccgggacccgcacctccggcagttcattcaggatccgtagtctgcccctaaccacccaccgtcttggcttcagggggtgacccctgcgcctgggtccgtaactccctaccctccgctgcgctcctggcttttcacccccatttgtgggccccctccccggctgccgccccgtggtggtgggccgcgcccgacggttctctcggaagggcgcttttcctccatattggaccccctcctatcatccagcgctgtgttcccccctctggacgcccctcttcgtgtcgagccactcccactctagaatcctgcttttatcccagcatctttgctttctatgttgctcagtcgccctatgtctgctttttcatttttcctgttcctcgtctcctttctcccccaaccccgtttttcttcttgggcctctgcccccttacttcgttgtctacatcctttttttttttgccattcctgtttccatatattttccacctgctttcgtattcattattttctgttagttttggtctattcgctacatgactcttgtattcgttttcccttcatatatttatcttcacagattggcctcctcaaacacctacgaagcaacatccatcttatctctagcttgtcataaagttctttctccccaattttagctttcattctgggcctgtctggatttccctgctttcttccccactatttctcatctctttacactgttcccgtccataaacgaatgcctggtcactctggaatggactgagagacctgtcgtccggcttgcttagggagctggaggtatcgagtaaagaaacactggtgatggacatttttaatgaggataggaaaacgaagatggctctggccttggccctctgttttctggcccatggttacagggtgctaaggtggctccataatgctttttctcagttcttcatatggtaaaacagtatttcatctggaggcgattttttccaggagccaatacagg

SEQ ID NO: 46278 - DNA, 2545 bp, Homo sapiens
cgtctctactaaaaatacaaaaatcagctgggtatagtggcacacgcctataatcccagctactcaggaggctgagataggaaaatcgcttgaacccaagaggtggaagtttcagtgagtcgagatcgcgccactgcactccagcctggaagacagggcgtgactccatctcaaaaaaaagaaaaaaaaagaaaatctggtgaccagaaaatcaagctcatctctcaggctaaggggcctaaacgaggaaaagctaaaggtgtcttccagaactagtgaggtgtctcacctgggcccccacaataaaggtacgagtttgagagtccaaggtcttcaccaacacctccaagctgtcaggctcctccacagcggtactggtactatcattaggctccatggccgacaggtctctaaagaagaacgaaggaaggaaggcccgctgttgcccagaccagagtgtacccgaaagactccctagcattaatccctgccccaatacctaaaaagtttctcctgcacacacacacattcacacctgtccccatcccccttctgattccggggcacagggagagaaacacaaagggcaggagatcgacggcttagggagctggaggacgagaggtgggaggggctccacgacgccaatcacaataagcagggagccagtcagattaggaaggaagcacgagaccagagactagtgtcatcaccggtcacggcaggacaagcgccccagaggtcggaaaatcctgggacaacgcgaaagcggtggtcgccccacactctgcggagaaagtggtttcgcgcacgcgcgccacgcccatcgaaccctcctaactcactatagacccgaaacggcactcacggggcgacagacctgctagctgactgcccgcgtctactgccttcccacggtgttccagcagaacggcacaactaacccacagccaaacacacacacacacacacacacacacacacacacacacacccaccaccccgcggctccgcccccgacttccccacggaccgtcacttccggtctcccccaaacctgccaccgacggccacttccgtttccccgatagtatttggggatctcgaagcgatacttccggctccccccaggtccccaagctttacttttgtggggcacgacgagaaagtccgcagccccaaacagtgagtttctgagggcgagtcgggccggggccggcctaggtgggagggagccgagcaccccgaggagccgccaccgctgtcgcccgggggaccgtactacgcctgcgtgcgtcgcactacggatgcgtggacacttaagcatcgccccaccccctcccccctctggcggcgttcacgtctgtgcgcgcgcttgagcgctagaagattgaggtggctaccgtaaatgcctgaaaaacagtcaccagctgggactctaccactgcctcgagaggggctatggacggtcgtatggaccttggactttggagatgggggattatgccacattcatctatgtttaaatcttggcaggctgataatttcaggcggcactgtcctagccagctaaaactcttctccaccctattgccctcgctgcgccctttcttctgtgcctccggaagttactctttcagtaggcgtttgggggcggcactggtcaattttgttctcggttgcttggttgggctagatttcggttctgccgggtgggcgttttaagggctgtgggcgtcacattcgtcggtgtgtggccaaggggacatgacacgttttaggaaaagtaaacgtgctactaagttgcacgacttgtcaagaaaagaggcgcttccgagtttgagaattgggagcaaatggagtccgagtggacagaaagacaagaccctgaccgtggggaatttaaaggccggccagcgtgcttccgaaggccgggggtggaggcattaccgcctctccgtgccctcttctcttaacctgccctgggccaagggcctcggccccgcgaaactgcgagtcctccagaaagacacatcgctgttggggtgtccaacctttctgggattcgtagtttatacccaggtcctggttatattttagttaagagttctaataagcagctgtttaatgagcacttgtgccagcccatatactacgggttttgtgtattattttaaaaagccttttaacgagcttttaacattttttaagtgagtacacttagacgaacataagtgtcagaattgacaaatccaggcctacaggactccagatcgagcacttgtactttactgccccaataaaaagctgttaacattttagcttatttttttgagagagggtctcgctttgtcgcccaggctggagtgcagtggcgcaatcacaactcactgtagcctctgcctcccgagcccaaccgatcttcccacctcagcctccctagtagggaccacagatgcacaccaccacacctggctaattttatttttatagagatggggtcttgctatgttgcccagcctggtcttgcagacttggcctccca

SEQ ID NO: 46279 - DNA, 1642 bp, Homo sapiens
agtggtcgtgagcacagggccagcagggcagaggccagcagctccagaagatgcagggtcaggttggtggagatctgcagacactcttctgggccccccaagtaccgggagggagctcctggttccccccgcagccagcccaacagcttctcacgcctaccaggtttctccaatggggctcctggcccagggacgctcagtcccccttcaggggacacccctggtctcctggtgccacctgaatccacatgatcccatctgagtttgggactggcccctccagcctccagtctcccagactcttgagtgctagagataggctggtcccacttgagggaatccattcttttgctccctagctgctcaacttggggctcctccttgcttggttcggaagcagccccagaaaccctcaatgcccccgagtccttagtcttgggatgccccacatcttccatggtttctggggcactatcccagtcacttcctgaattctccgaggagctgtccacccgtctgggttctgggtaaggcgggtcaggcctcattggtttccggcggccccaagggcgaggtagccagccaccaagccgtcgcaggaacatggctggggtgtgtaatgggcccccaaattctgaggctgcttcctggcactactcagactctcaggatctcctcagaagccagagtctttctggctcagaacaggtatttgcctggtgatgcagtcctactctgaattcagaagtggctcctcccttctctgaatagtcatgcagcctcaagtgtggcaagtagtttgcttcctcttcagttctggggtaaaggggggcatacccaaattcattcaccatccacacccccacaatctgagattccaagaatctcagatctgacaaggcctgggtcaccaccagagagtcctctctgcgtttccggatttccttcccagcaggcagcaccccaagtttcactcaccaaggccacaccccaaggtgtcccagaaactggggaggcagtgctccatccaataaagcgggcaggaaggtggccccaggtcctaggtgctcctggatcgtgtagtctttaactgctgccccaagggacctcaaggaataggaattctctttgttaggaggtggaatgaaagtgtccagcaaactccagccagcagcgttcgtcccttgatttagagggctatgatttctacaaagtggcccgactggcccgcgaacacgcagcagagacgcggcctccacaaggtcagaactaagatgtcctcagagatccccagttacgaagcaaagcgcgggcctacttcgggacctacgcgtccgggcgctgtgcgcggggaccgctcccgggcccagcgtcggggccgcggccttggggagccgccgggagccgcgaagcccggaagcagctgcaccaggactggaaggacccgcgggggcggtgccgcagctcatggggcggaccctgcgaatagaccgcccccgtataccccgcgctgtctgtgcgcgccggaccgccaaaccgagattagcaaggaccaggaccttaatataaacccagctccccattttcccgggtttctcatgcttccctaaactcggtcgccccctacagccccctgcccctg

SEQ ID NO: 46280 - DNA, 3000 bp, Homo sapiens
atattccccccagctcctcctgcctcatgcggttccagcagtctcctaagttctggcaggtccccctcctgggctgccctcagtatccggtgagtcatcttatcctcagcctcaagggatctcccttgtccatgtcttcctgatgctccttctgccactgcttctgctgctggtgccttcattattcttcttttctttctctttctttctctggcaggttcagtctgagatctctgggagtcaggagcgctgctctcatccccaatcagggcctcatagaaagctcgggctgcagccccatccagggtggactctggcttctcgggctgtggctgctgctgcccatccttccagaggtcgctggggtcagtggctggggtgaaggtgatgagcaagggccgggacatggcttttgggagaactgagaaaatgataccaggcaagggaaggatgagacaagtaagccaagctcgtggtgaccctgtagcaaccacagcctcagagacctgctgggatgagaaaaagtagtcaaaaacactttcctgccactaaagtaaccccacaacttaggactctgcagggcctaagggagagagactttgcgtaaaaacatggaaccctacaataccgactttgctccttagtaaagattaataaaactccatgagactgttgtccagaggtcctgcgtccggcccccacccccatcctcaccaacaataaacaccagcctctttctgaaaccactttcccaccccgtaagacataccagtaggaaaaaaaaatcagcctggccctttaagtcttccgcgatcccatttcggagtttcctcttcccaaacaaaaatagatgggtcactccctagaagatctcggggagagtctcctatacgtgttgctgtgtagcttccgtaccgcaaaatggcgccattctaatcagaagagttgacacaatcaaatagccacacggcacgaagacgcatgcgtggcgacaacaacaacaaaaaccacaacccacattacttgagggctcgggcgtgcgcaaagctccgggttcagtttcccgcgctggaactttttcaatagtaaacgagcaaagctccgcgcgcccaggtggcgcgagcactaggatctgtcggttggggtcctacttttacataacgcccccacaatgcccttcgccttcctcaacgtggcccccgctccaagcccattttctggagccaggaatccactctgtgggttaggaaaggccctcaggaggcggagggaaacctgtggaatgccgagaagccgtgtaatgaaataacgtcacgcctgcccctcaccattactctgaccagggttcgaaggtcacacttagagcctaaggggaaatggagaagtgcaaagggacgagcagaatggctggcaccacctcaggttagcgcactgggacgttccagttctcacaccgcccaccccaccccacccaagtccctacgcacggagccaagccgcacctctcccctcatgaggcaggagcccggaggaaacagtatgcccgtcaagggtctctggcgggactgattcgcactaggggcccaacaggcaataaggacccagcggattggccgaggataggccagtcccctgggcagcagcgccgcgccgggactagaggggaacgtgaggagagctgcggaaagagatccagcctggctccctcctttccccgccctaagtcagcctcttcacccagtgagcacaaaactgtattgcccagactcccgggccccgaacgccatacctggcttccgcttccggtggcttctcgttgtgccccgcccgcaagcgccctcctccgggccttcgtgacagccaggtcgtgcgcgggtcatcctgggattggtagttcgctttctctcatttagccagtttctttctctaccggggactccgtgtcccggcatccaccgcggcacctgacccttggcgcttgcgtgttgccctcttccccaccctccctaatttccactccccccaccccacttcgcctgccgcggtcgggtccgcggcctgcgctgtagcggtcgccgccgttccctggaagtagcaacttccctaccccaccccagtcctggtccccgtccagccggtgagtctgaagtcgtcgctgctccgagtcccttgtcgctgggagcggcacatggggtctccggactttgatgtgggggcgggggaggaagcgaccaggtccggcacgaaggagggagaggtggcctgaggagcggaggggggatgtgtggattccggtgaaagggacctgacaatcgcccccaacccgtgagaaaaggaggagcccagttcttgcttgagaatgataaacttggaaacccttgggaaaggcgtgggggtcatgcagagacttgtattggtagggagcctgagtcgaggtccctgccggagttgacacagaggagagagggccctggccttcgggagctccagggatgtgggtcgggctggtgggtcaaagtatctgttggcttctttcaagtggtgggaccccaaagaatgtttaacttcaaagaaaaggggctgagatgtaaattagaggagctggagaggagtgcttcagagtttgggttgctttaagaaagggtggttccgaattctcccgtggttggagggccgaatgtgggaggagggaggataccagaggcagggaaggagaacttgagctttactgacactgttctttttctagctgacgtgaagatgagcagctcagaggaggtgtcctggatttcctggttctgtgggctccgtggcaatgaattcttctgtgaagtgagttctcttcaacctccctacttgccagcttcacatatcttcccaccagacgttccttcacatattccacttctgcactgttctcttacatgctatttgaaaacttcctatcagcaaagagtcccccctataaaccccgacgaacctgtgctaaagtggcaaaac

SEQ ID NO: 46281 - DNA, 1067 bp, Homo sapiens
caaagtctccaccctcacagggcacagtctagtaggggagacaagtccaccagcaatgatgtggggagggcagagtgctgccaggagcacctcgacagttaaaccactgaccagagggatttcggcagaggagtaacttgatcggatttctgtttataaaagattgccatggctgcacattgcatttgggtcaagagtggaggccgccgggaagtaggacgctattcccgagtccggtcacaagatggcggactggtccggcagaagacgagcagggacgaggaagcggggctaatgaacctgagatacagttagaagactggacagatttgctgttggactgaacgaggggtgagggaacaggggtaggcttgcacaaggaagtggtaccattttccaagataggaaacatgtggtctgtctcaaaaaaaaaaaaaaaaaagcaaatagggggtgcccagtcccacttctcataccctggggacacctgtcagacatcctaaaacaaggacacctggatcccaagcgatacgtactcagctcagtgctcccttggggttccaggaacccagcgccttccctcacctcatcctttttcctgccccgcctgtgctcagctgcggctcagtgggcctgaactccggagcccacagaatctggcgctgggcgtccgctctccgcgcctgaccgcacctcagaactccggtaggacgggggggtggccccccgctcaagctctgttccctggggaagaaacctggaaagtgcgaaccgcgcgtcgggacccaagcgtcgggccccagcggacatccggagcccgaagcggctccccaggaaggcggcgccgtagcgccactctccctcccaggcgaattctggagaccgcggccccaggcgtctcacccattttctccgctggggacccgctgggctccccatccacgcctactcggtccccaccccaccagctcagtcttgactcagaaactcagggtttttacttttaggatcgttgggctgtgcgttaggggaggaggtggtcctcagcgtcctggaacgacaccacc

SEQ ID NO: 46282 - DNA, 773 bp, Homo sapiens
cgcctgcctgtagtcccagctactcaggaggctgaggcaggagaatcgcttgaacccgggagacggaggttgcagtgagccgagatcgcgccactgcactccagcttggcgacagagcaagactccgtctcaaaaaaaaaaaaaaaaaaaaaaaaaagagagccaggggctcctcttgaagcgaagagggcaaagggcaaaggggaagcacaggggaacttcgcggcgccctctgaagctccctctcgaatataatcgcaacgaaaaggccaacgactagaggctttgcgaggctgaggctgggcttcgggaggggattgccctgagaggtccgggaggacttgctgtggaattcaagcgaccgtgggccttgagggaaccggggggcaagacacccacccagcattcgcggaatatttcctcgaattatttcggggaggggtgaggccggggcagggtggggccttcttcggagggggcgcggcctccgagtaattaatcccgtctttgttgcgttttgctcctctcctgtccacccagcagggccagcccagggcgcgctaagagtccagagagttcgtttccatggtgacgggttccgcgaaggttttcctggggtgaagaggcagggcgttgaataatcgccatggcgacagcagcagatgacggtgtcccttctgagtgctcctacctagagttaagggatacctgagggtaagcaaccgagtgacgaaacaaagaaggcggggcctgaggacagaacgccaaggtta

SEQ ID NO: 46283 - DNA, 522 bp, Homo sapiens
cccagaaataggagatgacaccagaggttctgaggcagcacagggagcagcatgtgattgtgtggggtgtgtggtgggggaatggaacagaatgaaaagcataatagctagggacacaggccaggggagggatgtaaggttatcaaagcaaatggcgagtggacttttccctaaagctgagagactcaaaacctcacccagagaaagcagaggccaggggaggtcaggtcagtgtgggaggcagggacattccctttcaaagggcggagataaggaggctgagtcaccgtcctaccttccaggggcgtggagacgcagcccacctcataaaacccagcattcccctcacagcagatcacctaggaaggaggcaggaaggaagggctggggggccaagttgggactgaaaaactccctttgggcagggagggcagcccatgaagagctttgcagggaagaggaaagggcaggtttctgttttctccaaggggaatggaagcttctcattccacagggtccata

SEQ ID NO: 46284 - DNA, 1980 bp, Homo sapiens
ccctttcagaagccctgctgtgtgtcctctggttctagtctcgttgactatctctcttgaaacatccctggcccccacagaaactcctcttcctcaccctcactctgaacctaatttcccacccctgaccatgggaacaaacacagggagctggatttggaagcaaaagtgaaagcagcattggacgatttttgctccttttccacagcctagtttcaaatggattgcaggcgcgtgcatgtggggagaagggttagtttgagaagaaagaaaagacacctagacaatctaagaaggaaagaaaagcatcagaaataagagtagttgactaagaagagaatgtgggtaggagcgggcagtttgtaggagacagtaacacaatgagacaactgataaaaaggaagagaatatttagaacagcctaccaccacccgccagctctccagaatacaatgactcgggtctccaggctaggttgggcgggggttgaggggaggaccgacggatacaggatctgtaaaagtcattctgaaattcaaggcgagggtaaagggaagataaaaacagagccgggggaggcatgaagaggcactgaagaagaggaaactgggagtctgacagcaaaattcaacggctccccagtccgcgcagggtctcttcccgggactcaagactcaactgggaccggcacgaaccacgacacacagggtcggggggacgcggagaggaaagaacaaagagtggcagtcggaatgagaaagcggtaaagagcgaaaaagaaaggaggcggccagtccgtaggcgtgactttaactcaggaagcacacagagcgcagattttgcggataactggcttgacaagcaggctccccttatttcccattatgggcacttctggggagcaaaaggccgtaaagggtttggactgtaccacgttcttcggtggggaggaactcgactcacccaggagctggaatggggggcagtgactgccgttggcgtctcagggacgctggccggggccctttcagagtccctctcccggtagattttgtagagccgggggcctaggacgcagctcagcagcttcgccatggccccggctcgggccgctgctcttccagcagcaggtccccctgccggccccgccctccctgcctctgaggtgttgtgtgcccttgacgtcagcccgtaccggctccgcctccgggcgagttgcgacattttcagtgcttcctgagaagagtttcgcgcagttggagctacgggtacagcagtggtccgaaactagtggaagaccactagaacgcggagaatcagaaaattaccgggcatggttcaataatttttttctgtctcattattggcagactctagagcgacagcggaaacgaggggtgagattaggagtacttgataagagtaaccgaaaacataaggtgtctaggaatgtatctagtacaagaaatgcaaggttttatgaagaaaactataaaaagttattgaaaaggcaaactggcccggcccggcgcagtggctcacgcctgtagtcctagcactttgggaggccgaggcggggggatcacttgaggccaggagttcgagaccagcctggccaacatggtgaaaccccatctctactaaaaatacaaaaattagcctggcatgggtggtgcgcgcctgtaatcccagctactcgggaggccgagacgcgagaatcgcttgaacgcgggaggcagaggttgcagtgagccgagatcttcccactgcacttcagccttggtgacagagcaagactctgtctctaaataaataaataaaggtaaactggcccagcgcggtggctcacgcctgtaattccaacactttgggtggccgagggatgattgcttgcgtccaggagttccaggccatggctcatgcctgtaattccaacacttggggtggctgagagaggattgcttgcgccctggagttcca

SEQ ID NO: 46285 - DNA, 1225 bp, Homo sapiens
ctccccctccaaccgctcggatttcttagttttcttgtttcttcacctgtctgggagaagaaacagaaaaggaggagacagagaaaaagacatgcagacaagggcgttgggggtggttaagagcgcccaggtcttcctcctgccatctctaggcgtccctcccactccgccccacccactccagaccttccgctcctgtcgacctcactctacccagcaccctcaggggtcagattctttaagaggagcctgaggaacaaggctagggtctctaatctccaaaacacctgttgcccctgcttgggggcttgtgaggtccctgtcgggcgcccctcttggcagccactaggatgcgctcactccccaaaaatgcagcagccccgcccccttaaccctcagctgctcgctaccgcagggactggaagtccagcccgcgacccgcaggggttatgggacagaaggagaaagctggagaggcaggggctggggaatggaagtcctgaatacccgaacgagaagggagagaggtgggtaggaagggaggagttcgagcctaaggagttaagcatcctctctccgccctggctggtcacgctgcccctagcgcgacctagtataaaccagaccgagtcccgaaggactgggagaggtctaaaacgaaatgcgaggggcggggtaacagggggcgtggttccggggcgctggcactactcccggctccaggacccggttccccgtctatgtcccaaagtccaccccgcctagctccgcgcccaaataccggctccccatactctctgtctggtgcaggcatgggcccggcacccccaaactccggcccccacacggttcagggccccccacgcaagactcacctccagcggccacccccactcctgtcgcgctgtgatctcggctggggccccaccccccgaggacagagttggtggagaagggagtccccgtcttcaagcctcggggactgggagctctggcttttagcgcgggtccttgtgtaggcgagctcatatactacgatggggcaggggcgcgacggtctggcggctccggggcattgtctaagcgggacggggcggggcttcttcgggccacgcccattccgccctgctaagcctcgcccattacatccagactgcgccccccttgccagaaatcggcaccgcccagcgagcgctgcccaggcccacccagatctggccggccc

SEQ ID NO: 46286 - DNA, 2878 bp, Homo sapiens
gtccgcctggagaaaggatcaggaatcaggactggaaatgggggtcaggaagaaccagaaagggggaatggaggacgtgggataagaaagggactccagggggagggcaaaaatgttcatgacagaaggactcgggtgggtgtgtgtttgcacacatgtgtacaccaggggtgtttcaaggaacataagcaggcctaccttttggtgtcaacggtggtaacattgaaggtgactcccttgagccacagtaccatgaacagtctctgggagaatgggcagttcccaatcttggccccatcactgccagcctgaaaagtaaccccaacccaaggttatgcctgatgcaccccacccatccctaggccagtccctgcattcccactcccagaccagctgttttctgcctagtcatgacacatacactgtcccctcactatgggctctttgcccttgggcctgggtcaaacctaaggcagatcaatgggaaactgttttgcaaaggcaggcttctggttccccagacactgaggacaggtgggaggtaggtagagggaggaggtcctggagaacttgggaggatctgaatcctagagagggaagggtgtggaacttcagtgaggccagagttgtaggctagaagcctggatttctgggttcctgaagggagtagagtctgaagacaggagaggtgggtggggtttgggagccagagttttggttctctacacctccaatccaaggtgtctttgggtggggagtctagtcaaggggccctgggcctcgcgctagagatgtggagggccctacagagaggggctgccctctaattagcaagtggtgacctcattggcccaagggacacctccccctaagctgagggtgattcatctctctgtctccggcttccttcctgtcaaggatgtgggggaagggacagtgaggatgaggcctgggcagctaaggctacccctaacctgctgccagggtctcccagcacaagtcctctgactgcaataaccatcctctcacaggacacagggccggaatctctgcggcacagcctcacccacgagtaaaaatagccccggaggcgaatgtgagagtgaggtggggaccacacctaagggggcggacccaagcaggctccgacttccctgggcccagggagagggaatggctgcccgagaaacccaagcagaagggagagggagacacaggcagagacacacaaagatgagagaaacaaaaggggggaaggggaaagaaaggcggcaggaaagtggagagtggggagacgtgcgtgccaacggagagacacaaacggagcggggagaagaggacactgttaaggaagggagggaggggcacagccaggaggtcccaagactgggaaatgaatgcagcagcggtagggaggggagcggccgctgcaatcagaggggggctgggtgacaccgagaagcctgctgcctgcagttttgctacccaaatgccataggaccatctctccttacccacacccgcagagagaggagagagttggggcaagtcttctacttctccaacccccaaatcccaaaatgccctaaccgagctcttctcctccgtctgatctctctcccacccatccttgtggtagctacgttaaactcacgtcttcttgccacctccccttctgtccctttccccagtcctggggatattcaatgccacccgatcacctctccagctctgcttttcaaactccgatcccagtctcctgttttgttccgcccctccaaagcttcccaatttacttgctctcactctcaggcctccctcaacacaccgtcttccctgaagcgtctccatccacacacacacacacacacacacacacacacacacacacacacctctcctactgcactactcaccctcagatcttgtagggacacatgtcctaactgaggttcccctctgtcccttctaaaccctgctgggcccccactgtcccttcaccagctcgccctctaaccccaccccagtctcacttttgggaattctcctttttctccacttcccttcctttagtctgctagaaacttgcacttttacaaacttttcagggttgatcctagaattctcattacttgctaacaagttaatgtcttcccctctcaaaaccacccctcaaccaaagagtgcacgtgggattgggggtgggagtcaaggagggaagggattggggagttaaggctggaccgggggaaaggtgagagttggcttccaggaatttgggtggctgaggagagaagtgttcttaccttcacgaacaattcgacctgcggttgttcttcagccatggttgcgtcggggaccaggaagtggccgtccctgggggaactgggaggggctgggaccggggaaggcgggtctcacactcagggactctctcccctagacccagggctgtcccttcagcacaacacaagctcaatcagacctacttgcacccaaactaggcctccccaccagcccaacgcaccccacacccagctcctccagctcggtcctctcccgggctggatcagagagccgctgactcaccgaccggccccgccctgaacctggggaggggactggaggggggcgggactcgacgatgtagggagtgagtccggaaggggaatcctcggatctcccacaggatggggatgggggtgttaaggaggagtcctgaaaacctccttgtttctccgacctctcctgaacacaggactcttttctgcctcagtttccctgcttcattaatctgagtacaacccgactgaccctcatataaaaaacttgacactaacagcttgggcacacccgtgaagattcagggatggggact

SEQ ID NO: 46287 - DNA, 2326 bp, Homo sapiens
cttctctatcctcctcatcaccctctgtccaacaaaagacctacagttccagaaaaccatggtggagtgcaagaacacagaactaaaacagagcttgaaacttaaagaaagggagagacttgggggaggagtggggtggagtgacgtgatgtgctgctggaaaccagcagttggtggtttcctcttgtgcttcctcttctgtgggttttctcctgcttgtgggagggcctttttctctcctcccgacagaaaggctatctttggtgttcgttcccttgaactgtaacatcctgtaagggtatgattccatgcctctgtgtgggtgtgaattccctcatggtgaccctcaaaatctgcacacaggaccccttcccattgaggggaggggatcaaaacaactctacttctcagggtcctctcctgttccaactggtctgtgtccaagagaagccttaggtaaatggggccagcttgaagatcaaacaggtttggcagcctctcccggcctctcttttctctcctacagctttatagctacagctgccttgatatcaatattgactttggctggctggcatgactacccacagggtatcgtgccttaatttaccaggtgacaggcaacgctgccctctcctggaaccatccagcagagccagggctgtacccccaaatcctgcaacagaggtttccctccatctcacctccctgtccctgcatttctcctatctcagtagctcctctttccctctctgggcttctctttccactccctccccttcctgggcttggtaaactagtccctaatctcttcacaccccagattggaaggtgggtccctccctgacactccccagagctgtcaccaacctcctccaagtttctatagctccattgctcaacagatttgccaggggtaaccattaacccagcccttaactctgttcccccacctttcttgctggaggggattttccaattactggttagcacagctaggtcatctcacccccaccatctttcctaacttcttgggttggggggctggggaggaatctccccatctcagggtactaggaacaaagctggggaggatggtgcatttaaagggattatatatatatatatatatattttttttctttctccctcataaccccacccccgcaacacacacacacacacacacacacacacacacacacacagacgcacaaataagctttatggagcagtgacttcattatgttcaccgctttgagtccaacccctggcccaaaataggcactaaatagttgccgaatgcatgaatgatagatacctctctgtcttcaggggtgtgtagaagtgcgaaggggtatgggcatgtcccagtaggggtgtgagtgttctgatcagaactacttctctctgccagaatttgatgtaattcgaatgcttccacctctgcttgaagggtttaaataataaattaggccctgtcgtgccattatgggggtggtcataccctgtacccaggaaacaggcacggtagggctgagacagaagtcctgcttgtttccgcttatttatttgaaacaccgctcatttaggtcttactttgtttgccaggcactgttctaagctctgtataaatattaactcagagggtacaaatattaacttaagagttgttgcaggaaaaaaaataagcgcctctggctctttaagtttggcctccccctcaaaacccccgcaacggtcccaaaccccttccagggactgggactacggaccctggtccgaccttctcgcgggcttcccactgcgccaatcaaatcccagaaacagtgagtgctagaggcccggctgctaagcaacggcagagggcgggaagtttgaacgttctggacccgccccgaaggcaaataggccaatcagcgtccagactcttcagctacggcagtccgcttctcctcctcgccctgtcggatctctaggctggatccgggcctctccaatcaacagcggttaggagggcggggcgcgtgcgcgcgcacctcgctcacgcgccggcgcgctccttttgcaggctcgtggcggtcggtcagcggggcgttctcccacctgtagcgactcaggttactgaaaaggcgggaaaacgctgcgatggcggcagctgggggaggaggaagataagcgcgtgaggctggggtcctggcgcgtggttggcagaggcagagacataagacgtgcacgactcgccccacagggccctcagaccccttccttccaaagggtaacctccgcgtgacaggaatgagggtggggcgcgtggagtttccca

SEQ ID NO: 46288 - DNA, 1712 bp, Homo sapiens
agggcatgaagtgcagccccgaggcgctggcgagccagggtgtggtcaagggccctggctgccaccacggtctcccgcagagcccctaccaggcgcgcgcgtccctgacccagtcgctcagcatcaaagtgcaggtcggggtcattcctggaagttggcaggaagtcctgggctgcattggcacgagacacctcacctaaggctgctcggaaccgccgagaagaaccaggtccaaagtaggcggcaaagaggtcatcagcaaggagtgttcgaccctggggagaatagcgggcgacggggctccagggaggccctttggattgactgttgcccaccttatctcagcaactgacactcaaggctgggtatgagggtcctgagccccacaaaggagggacagtcccggacctttctaaggagggggactcctaatttcaggaccaagactactgggtattattgctgcaggggtggggccatgggtgtctcttctcttggcaaccagagccctcaaggagtagaggccccatggaattggggactctggcaggggtgtgacaggaccctgggatgctcaccaggaagtcctcaagacgaagaggggggcggcctgggggtggctgctccaggaagagctgcagggtgacgttgagcgctgcctcctcagttaggtcttggtgggtgatggagccaggggcagccagcaggctccagatgttggggaagaaggcagatgtggggggcagcaacagctgcagcagaagcaacgctgaggggcccgggtgggattgggggacctccgtggggagcatggctgagacatggacctgggagacagaaggctctcaagggaggaggaagcagccgcgattccagggcaggccggctctgcgggtctccatgggaacctgctttacctcaaaagtcgtgtctgctccagcctggcttccccaccctctcgctgtcacccagacaacctgagggcctcatcggaccattagggacatacacacctgccaggagaggggtccaaggttcctcccccacgcccccctccccagtccctggctgcgtccccagccctgccgcagaaacactccccatgctcaggaagcctgagtcctctcaggccctcccctacctggttgctgggtctcctgggcagggctggcccgggcttgacgtcacagggcacttaggtcagagttataattaaccgaggctcagcagagggggaggaaggcctcaacagggtgggggaggacaggcaacccctggccctttcgctcctgcctgcccaaagccacaggcagcagcccacgccagggcgggcctcccttggctgcagtgcggaggtgagtgagagctggggaggaggaagggagtaagcagcgtgactcaggcctggcacagtgccagggacagacccagatagacgcacccctctgccctccagaaccagggcctcactcccaccctgcagcccccaaggattcaggcacccagcccctctgctcccctctctgcccccaccacagacgacaagaggattttgtgggaaaatattttattgctgccatccccatggtgagccgctgggggtgaggggtgaagctgggtggtggatcacagcatcttctggaatagggcgatggcctcatccaccttcctgagctctgcttctgtctgttggagctggagtggaaccaggg

SEQ ID NO: 46289 - DNA, 2048 bp, Homo sapiens
caaggcacaggtctcctttggaaggactgatagttacaatctggcagggttatctctcctctcacttaccttcctcatttcatttctcttttatctcctcccagcaattgtcatctctccctcacccagtcttttcctacaattcaaataacttctatcctcatcaatttcagactcatcaaacttttactaagagactttaaaagtgcctggcactaaactatgtgctctgcgcacatcttttaatcctattaactcagtgaggcaagcattacatcaacttgcctgcgtgttcatagacataggaagaccaagacacagcgggtctatgaaacgtgcccagggttaccataccagttggcaatctgggatttgatcactcttttcccacatctgatgtactaccttcttgtctcattgtccattccagtcctcgcttccctcctctgaatttctcccctccccctcttctgtacaaccccctcacctgggggtcctgggccgagcttcggagtcccagggccggcagcgttgctccacaggcagctggtattaactccgtgtcggcgtaactgacccactgttggacaaggacagccgcccggctgccccctgggccccccaggcctgctggccacagcagctgggccacagccgtggccccccacacccagagcccaccgggcccctgctccagggccggcaggcggggtgggggaaagggagtcctgctagtcgggggtggctggagacagatgcgggggtgggctcctccccatccgggaccctccccagcctccccatagcgagcggctatgagggctcggaggctggggaaggcatctgggtgaggggagacgtagagggtggacatagttatgagaaggtccgaacgaagtggaaaaacctaaggagaaagagagacaggggaagactgcgggatcgaggtgggtcctatgtttgagtagagaggggaccctcacgggagctccttcgccgcagacacccgagtcccataggactgagggtctgaccaggcaggctgtcaggagccgaggacctggctctcagaggggcagtgtcagtggggagttcctggggaagaggaactatccaccatcgcggggcttcggggagtgtggaaggctctcaggagcgggtcggcgtctggttggatgcgggttcgagccgcgtgtacgtactggagggagatggtcagactgggccgggaatccacctcacagccaggcgccggccgcggctggaccggccgagcggcccgggcggaggagtcgagcgggcagagacggtgggcggctctccaggtgaccctagttccctaagatcgccgccccggcagccggcgcccacgtgttcccccctttgtgacagggagcgtttccgggcctgcgggtcctggcgggggcggccgtgccccgcctgcgagtgcgcgcccgccgtgtccgacactgccccgggggccgcgcggctcgccgcccgccggtctcacgaggaacagcgcggggcgcggggcgctgggcgcggacgcaggacgagaggacacccctgagcacgacgctcccgtcaggcgccgccacgggcaccttgtgcgggtcctcggccgggtggcgagggcggcgcccagcgggcagctagggaactggcccaagagggtcggccggccctgccggtggagggcgttccccacccggtagcggggaggtgcccagcagggagccgcctgatgaggaccgaaggggaggtccatttgccgaggccctggcgtccagcttcctctttgagcctcatctcctcatgtatgaaaaaagggtgacggccgggcgcagtggctcacgcctataatcccagcactttgggaggccgaggtgggcggatcacctgaggtcagaagttcaagactagcctggccaaggtggtgaaagcccgtctcacgcctgtaatcccagcactctgggaggccagggcgggtggatcaccaggtcaggagttcaagaccagccaggccaagatggtgaaaccccgtctct

SEQ ID NO: 46290 - DNA, 1401 bp, Homo sapiens
cacacccacccccaacagacttgttggaacaggtacctacctcaggtcattctttagttccacgaccacatccttgcccacaagggacttgaaaaaagaatagaagagctattgggagagagggggaaaaccatcatgtgggaaggagcatggtagggaggagtgtcctttgacagtattaccaaatactggtattgtgaaccccactgcatccctgacagttctcaaaatttcacaggaaagaataattggttgacagagctgaaaggctggagcccaaattattctgcacactgcactgagcccatcacttaaagtcccagagagactctgccctgcatacgtcggcctccccactgtgctctctcagtcgaccacctttctcgggtacctgcccactcctttcaatgaattgtagaaaatatcccacccgcaccctgccgaagcttgcctggcagagaagtgctctgaggtctaacttttccgtctcccgctatcctcactgaatctctctcagggttggggttttttccctcatcatggaaaaaatatcccatttgttctcagtgcctcctcaatgaacctgagaaacagtacagtactaaagatgaagataaaaactccggacctaactccagcctaggggtacaaaggccagatcccccgccccaaccatgcgaggtccccgagggcgcccccttttgacgtcacggtacccaccatggtgctggcgccgcgggcagcgggccggaccgggaagacagcagggtgctgcgagcaggtctggggaaaccgaagcgcgagcccgcgcgtggggcgaggcgggaccgcgcaggcgcagcgggaagcgacgcagaaagctccaagcgctgacgggcaaagcgcggccgacttgcggctggggagcgcaagctgggtagagtagaggggaggaggaagccgggaaaggggcggggtttccttcattccgacttcctccctggccggccggctcccattgcgcaggcgcggaccctagcctgggctgccagacgggtggcgggactcagcgcctgagctcaaaggattttgttcttttccagaatcctgccatctacagcgtgatgtgtttgtgccctacacacacttcctatcgagaattgtggggagtttgttaagattatgaagtgtgcacttttctatatttgttaaagtaaaaacataaaatttaaaaaataaaattaaaaaatgttttgaatcttaaattcagctgataaaaagaaaaaaaggccgagggccgtggctcaagcctttaatcccagcactctgggaggcctaggtgggtggattgtgtgaggtcaggagttcgagaccagtctagccaacatggtgaaaccccatcttcactaaaaatacaaaaaa

SEQ ID NO: 46291 - DNA, 2358 bp, Homo sapiens
ggtctccctaagttctgggatggcaggcatgagccaccaccgcacccggcctatatacattttgcttatctatctctcgatggatacagattacagaatttacagaataatgttgctatgagcaagcctatacaaatacatggagacgctactgtcatggcagactgctttttggacagggtagacaaaagtattctcagctactcaaagaagttgggaagcaagtagctgtatattgttttcaatttcccaagtgacctaattctactgtcctgttcctatatattttactgtgggattctgtctctttatgacccaagagtagtgtacattctggtctcttcaagagacatcagcctccacacttgagttctgctgccttcctgggataatattctctattaggggttcaccggcagtaaattccagtcaggctgaagatgactgctagaaaaccacaagccttccagttttctcaaacgacatggcactccagacagtatctgtatccttctcctaaataaaactcctgttttctggagccaataactgatcaataaagggtttaagggcggggggcggtggctcacgcctgtaatcccagcactttgagaggccgaggcgggcggatcacggggtcaggagaacgagaccatcctggctaccatcctggctaacacggtgaaacctcgtctctactaaaaaatagaaaaaattagctgggcgtggtggcgggcgccagtagttccagctactcggatggctgaggcaggagaatagcttgaacccgggaggtggagcaattagccgggcgcggtggcgggcgcctgcagtccctgctactcggaaggctgaggcaggagaatggcctgaactcgggaggcagagcttgcagtgagccaagatcgtgccactgcactccaccctgggcgacagagcgagactccgtctcaaaaaaaaaaaaaaaattaaaaataaataaataaaaataaaataaagggtttagtgtctatccctctccacaccgcagattcctaggccgcactccctttcccccgcttcccagttaccccgcctcccccttaccccgccttccccgcctccccatttccccgacaggccgcactcccttcccccgcctcccccattctggctgctccgaccaatcaatctgaagccatcttagctttccccaagtgctcctcctacccggatcagccaacgcccacatacctcaggcttaaaccaactagggaactttccagtactttcccaaacaaggacctactgagcctttcaggttcacaatcaatcagatccctactggctcacctagtctcccgacgccttcgcttcagtttggaaacgtccagattacgcagccccagcgagtaggtgggggctccctcaatatcaaactgcacaaccggggtccccccaccccccaccccgtccctccctgcaaatttgagacggctccaactcagtaatctttttccaaactggcccatgaggtcagagacagtatctccattgtaacgtggccgggcggtgtcaacacaaacgcccccaccctcccctggacgcgcgtaacccgctccccgcaccagccccctgcccacaactgcgcaggcccagcaagcccccacaattaaaagcccagcgccgacccttcctgtcaattaggcgctgaagcgcaggcggtcagcatcgccatggagaccaacacccttcccaccgccactcccccttcctctcagggtccctgtcccctccagtgaatcccagaagactctggagagttctgagcagggggcggcactctggcctctgattggtccaaggaaggctggggggcaggacgggaggcgaaaaccctggaatattcccgacctggcagcctcatcgagctcggtgattggctcagaagggaaaaggcgggtctccgtgacgacttataaaagcccaggggcaagcggtccggataacggctagcctgaggagctgctgcgacagtccactacctttttcgagagtgactcccgttgtcccaaggcttcccagagcgaacctgtgcggctgcaggcaccggcgcgtcgagtttccggcgtccggaaggaccgagctcttctcgcggatccagtgttccgtttccagcccccaatctcagagcggagccgacagagagcagggaaccggcatggccaaagccgcggcgatcggcatcgacctgggcaccacctactcctgcgtgggggtgttccaacacggcaaggtggagatcatcgccaacgaccagggcaaccgcaccacccccagctacgtggccttcacggacaccgagcggctcatcgggga

SEQ ID NO: 46292 - DNA, 2255 bp, Homo sapiens
acaaaaaattaactacagtattttatagatgtgagagaagtgggcagaaataatacggctttaggctaaaaaaggaaatgaggttatttcttgggggagccaatattggcgatttctgagggagcgatccttacgtgaatataaaaaattgtgacagccaccattcctcctgctaactgatctaaatccatccccttgggaaacgcccctgaggtatctatcaggtgtagttcagccagagggagtaaacccaccgggccctcgtcctttcctagcaccaccatttaaagggatgtttgaggggtagggcagcggagcattccagacacggagttaaacccgccccaccccgctggcccacgtccagcccgatcaagaattggaggagagaggagcagggcgtggtggcgcgggcctggagtcccagctacccgggaggctggggcgggaggatcgcttgaggctgcagtgagccgtgattgcgccactgcactccagtctgggcgacaaagcgagaccctgcctcaaaaaaaagtgaaaaaaaaaaaaattagaagggagggcaccagaggagggctggagcaggttcacaggctgggactacggaggagcccagcaaccgagaatcactcctgagggtctaattttcttactctcctgatgcctcacggggcgagggactagaacggggcgctgagctggctgtaggcaaaagccaaccgactccatcccctactctcccatcagtcgcgcgtccccgcgcagacgggtgcgcgctggccgtgggcggtggggaccttctcttctcgcctctggccacccaatgcatctgatttagttgtatgaaagttacaaaattctccaatattttcgtcttgtaaatcacctagtatgagagaaactcgaaaggtcctttctttcctcctttaatccctttttggaaaaaaaaaaacatcagaaaacgcaggagtcggataggcagccccgaagccagccccgccctcaggccccagcggccccgccttttctccccccgccccccccccgcactccccacctttcctcccctttggctgaggctttttcccccgtcgctggctctgcccgaagtttctagagttttctgaccttcaaggcgagaactgctgtgtcattcttagggacactccccaacaaactgcgccacccgagtctctccctcctctcgccagccggccctaaaacatcaaggttagtcaggactctatatttaacgtccggaagattctgtgaactatatgccaaccttgccctagtaacggggctcccccctcctttcccctctttctgcttgagcaatctgttctatcggaaaggagaggcagggctgggagagctggaaggtggggaaggcaagagcttgtaggggccatggtcttgagtccgaagagcagagcagcagccaggacgggagtccctggctgatcacatacccgtggtgcccttaatgctcgcagaggccaacactgtattcatttgttttcctctttagagaataaaacaattaggtctaaccacaaaattaaaagcaaacaaaacccagttaggttgatgagccaatgtgggaaggagtacaaaatgagtgtcagaacccgtgggtccaatcaccggttctgtaacctgtcatctgggtaaccagatcaagccactgaacttctttgatccttggtgctgtctttgaaaatgaaaaggtttgactgaatggcctgtgcccgcagatcttaggacagtttttacattaagctgaaagcagctgtagtcctaataatggtccccaacttttaaacacctaaataagaatgactacgagtcatatccgagagtatgggatccccaataaaaggagggagaagatcatattctctttgatcatgtagggaaaaaaaatttttttattcgagacaggatctctgtctcccaggctggaatgcagtggcgtgatcatagctcactgcagccttgacctcttgtgctcaagcgatcctcctgcctcagcctcccaagtagctgggactacaggcacctgccaccacgcccagctaacttgtaaagtttttagtagagatggtgtcccactatgttgcccaggctgatcttggacttctgagttcaagtgcctgccttggcttcctaaagcactgggattaccgacctgagtcaccacacgcagttcagttattgttaattatgttttagagatgaacacgtcgaaactt

SEQ ID NO: 46293 - DNA, 1625 bp, Homo sapiens
cgccactgcactccagcttgggcgacagagcgagactgtctcaaaacgaaaacaacaaacttaagacacataacctgaggtgttaagaggagctagtaactagaacctgggtcccaacccctcctgctttccagcatcactccacacagtttgcttaaagagggccacctgccaaacagctgtagtatgtgatgttaaagagagctaaacaccccccgcacctccctcccagggtcaccatcttgttaaatttgacctaaaaacggtaacagcctaggggtttcagggacagacagaaaatcttactcgggactgtgaggtcctacttctacacaccgtccaggagtgaaccaggaattgagaaagtaggaaggaggtgtcccagaccccaagctaggaatggggagggaaatggaggaatcccaaatgccttaaggacggcctacatactaaggaaaatttttttctaactcctggttgcagctgaggggagcggctgagggcggggacaggggtgcggcggacccactgctcccattacccgaccagcgcctcccttcctccttggatgggtgcccctgtcttgctaagaactgcctgtttacacaactgctttccttgtgaaaatttaaaggctcctattcccagttgttctatccttgtaggttaaagattatgtcaaaaactatattgcattatctctttccttctccttcccattaagacggaaaaaacatccgggagagccggtccgtttctcaggcagactaggccattaggtgcctcggagaaaggacccaaggctgctccgtccttcacagacacagtccaatcagagtttcccaggcacatcgatgcaccgcctccttcgagaaacaaggtaactttcgggttctggttgtctccaaagtcatccgaccaatctcgcaccgcccagagcgggcccttcctgtcaattacctactgaagggcaggcggccagcatcgccatggagaccaacacccttcccaccaccactccccctttctctcagggcccctgtcccctccagtgaatcccagaagactctggagagttctgagcagagggcggcaccctgccctctgattggtccaaggaaggctggggggcaggacgggaggcgaaacccctggaatattcccgacctggcagcctcatcgagcttggtgattggctcagaaggggaaaggcgggtctccacgacgacttataaaagccgaggggcgcgcggtccggaaaacggccagcctgaggagctgctgcgagggtccgcttcgtctttcgagagtgactcccgcggtcccaaggctttccagagcgaacctgtgcggctgcaggcaccggcgtgttgagtttccggcgttccgaaggactgagctcttgtcgcggatcccgtccgccgtttccagcccccagtctcagagcggagcccacagagcagggcaccggcatggccaaagccgcggcgatcggcatcgacctgggcaccacctactcctgcgtgggggtgttccaacacggcaaggtggagatcatcgccaacgaccagggcaaccgcaccacccccagctacgtggccttcacggacaccgagcggctcatc

SEQ ID NO: 46294 - DNA, 3328 bp, Homo sapiens
acacaacacacatcaccaaacatcatacgcgtttataaatgggggcgataggaaagggtccagaaaggatttgaaatgacttatgagtttcaataatttttttttttttgagacagagtctcgccctgtcgcccaggctggagtgcagtggcgcaatctcggctcactgcaagctcggcgtcctgggttcacgccattttcctgcctcagcctcccgagtagctgggactacaggcgccgccaccacactctgctaatttttttttagtagagacggggtttcaccgtgttagccaggatggtctcgatctcctgacctcgtgatccacctgcctcggcctctcaaagtgctgggattacaggcgtgagccaccgcgcccggcctaatttttaaataaatagagacgggggttgggtgtcactatttgcccaggctggtcccgaactccgggcctcaaatgatcctctgcctgggcctgtccaaagtgttgagattacaggcgtgacctattacgtccgacctgccttttgggtttttggtttttgttttgttttgtttaattgaaggttagggtgcctgacagtctgcgggatcgaactgggaggcaaattcagatttcgctgggggaacggagtgcgaagtgtcagggtagctggacgctaaactggcgcagctgcgcgcgcccgcgcgcgcgcgggaagagtcccagggtcattaacggaccatgggctgctgggaaacggcttaggagcagcacccggctggcgctggccggccggcgccggggactttcttccgcctggccagacagatccctgttttttgtttttcaaaattcagaaagcatctccgaatatttgcccagaggagtgtgaaacatactttcctggtctttctttcactttgttttatttctgtgtggacaaacaatggggaaaatgccgcgcgtctagccaggcagataagaaaacaactatacccgtcaggcccccaacccggcgccgccataaatggccccggcctcgccattttagttctttttgcgaagtgggctcgtgggttggcagtatgagagttgtaatggcccgactgttgagtgagggggagcaggggatcccaacggcttgcgctgcctttgcgcagcagccggcgggcggccacgtcgcggcctggctggggtaggagagggcggtccccagtgcagttgggtgaactaccgttgcacactggagtttctggtgtctttgcttggaactgacctagctcgtggcagggggaactcggctagcggccccacagcccctgctgactcaaaacaactgtgagtggggttgggcgagtgattgcaaaatgggggtggcggtcgcccggggataggaagggagtgatgatgaccccaggtaactcttgagtgtgtcgctgatgccatcaccgcagcgctctgaccgccccctcggtccagcatttctcaggctcaacgagttcatggccaagattcctaatcttttgttctgtttcatttccccgttaggagttgtaagacgttcatcgccgtgttatccttgagtaaaggtgagtattaggtgcgagagccttttgaatgcctcttcggaaagctttgttcccaagcaagctttcgttcatgggcattatgcgcctccctgcccttttttttttttttttttttgagacagtctcgccttgtcacccaggctgaagtgcggtggcacgatctcactgcaacctgcgccttctgggatcaagcgattctcctgcctcagcctcccgattagctgggattacaggcgcatgccaccaagcctggctaattttttgtattttttaatagataaggggtttcactgtgttagccaggatggtctcgatctgctgacctcgtgatccgcccctctcggcctcccaaagtgctgggattacaggcgtgagccaccgcgcccggcctttttttttttttttttttaagacagcctccctgtcaccctggctggaatgcagtggcaagaacacaattcagtgcggccttcaactcccgggtttaaccgattctcccaccttagccaattttttcctttttttttttttttttttgagatggagtcttgatcttgttgcccgggctggcaatggtacgatctccctgcaacctctgcctcccgggttcaatcgattgtcctgcctcagcctgccgattagctgggactacaggcccgcgccaccacactcggctaatttttctgtttttagtagaaggggtttcaccatgttggccaggatggtctccatctcctgacctcgtgagccgctgtgcccggccactttttcttttttgagctataatccatgtaccacaggtggtgacttccatttgtttgtttttgctattttgtttttgagacagggcgcaatgccaggatctccctgcaacatccaccgtcagggctcaagtggtctttccacctcagcttcctgggactgcaggcacgtgctaccaccacgcctggctaatttttagtttttttacagaagcgggcttttgccatgttgtccaggctggtctctactcctgggctcaagcagtcctcctgcctcagtctcccaaagtgctggaattacaggggtgagttgctgcgtctggtgttggtgactttctagagattactttttggtttacatcattttccttgtgactatttttacttttttggggggcggggggacagtcttactctttttagtttacatcattttccttgtgactattctatttttacttttttagggggcggggggacatgagtctcactcatgttggtcaggctggtctcaaactcctgacctcagttgatccacgcccttcggcctcccaaagtgccgggattacaggcgtgagccactttgcccggcctgtatttttacgttttaataaatccccgtatttttgttaaaggctgggtaacctgactcctcccctcatttctactgcaaaataggagtacactggggcctcccagtggagctgttctctgctgttttaaattactttctactcctccctttctaacgtccactcctggactcatttgttagatcaatatatactgggactgttgtgttttctttgagtgtactagatctctttccagaagagcttcccttgatccagatctccctaattgggaatgatgatttcacagactagagtctccgatgctggtcatgatgtcaaaactaagttctgactcatttagggaactggatacttgggtctccagaagggccaatgggagggccataattctgtttatt

SEQ ID NO: 46295 - DNA, 1284 bp, Homo sapiens
catggacctccgcagggcgatgaacttggccccctcatcggatgaggacattttcctcgcctcagcaaaggcgagaagagtgccccgcggagtggctgtgatgagcgggatgcggaaggtgtccactgagccgatctgtctcccgctcacccacagcagttgctccatggtcaccagcggctgcacctgtcatgggaggaggaagggtcaacaaagacaaacttgtcttgggggttttaggaacccacgttccgatgggagagggaggatctaatggggatcccgagtaggggatggggtcccagaacaagaaagaggaacacgaaggggagtttggagcgaagctggaggctcggagcaggggagggtctacgaaaggagaaggcgccttcagggagggaaggggaccccaaaagaggaaggggctcgaatgaggagaaggacggggacccggagagggagaggggctgggagcggtaggaggaaacggggtctgggagaaagaaaagggtcctgtcgcggaaagtcggctcagccgcccgcgttccgggggacactaggtgtcgatcacctgcgcgggtcggggatggggctatgcaaagggtgactcaccagaccgaagtcgttctcagccttggaccaggaggctgccagagacagcagcaggaagatcgcggcaaacacccaaaccctacagcctccccagaagcccagaatccgcggcccccagcgtctgtccgggagcgccgtgctgggtcgctccccagtcatctctccccgcagctgccgcgaccctggcagctagactccacagagtcgggagtcagctgacccggaccctttaaagcgcagatgtcacccttaagcccgccccggtctggaggccccgccgcgcttcccggactctaattggtcttcaagtagctcatctcctcccacgtgatcacgcagcatctcgaagcttgcccttccgattggccctcttggaggccctcttggaggcccggagcgcgtgacccgaacgggaagcggactggctggggtgaagaagggactggcaccatccttattgggctttttgattggccgcggcaccaggacacgtcacaggggcggggccgattttaaagagccgggcgcggaaaaaaaaaggccgcctgtcgtcgtggagagaatgagtcacagatttactgagttaacaaaatatctttaataaaatctttttgtttgtttgttttgttttggagacagagtctgtcacccaggttggagtgcagtggcgcg

SEQ ID NO: 46296 - DNA, 1851 bp, Homo sapiens
ggagtcgggggtggccttgggcagggtttcttcactacgaggggtgtcccccaaagagccatgaactgtagaggaagagaaaaagttcagagctaagggctcaggagatcctgtgtttagggaaggtgacggtccaattggggcccgttttagctgcactcacctctctcggtggctcctctggtttccttctccagcagcagcgcccccatctcagcgggggcctccccctgggaggggagacaagggacaggagggctggtcagcccagtagagagttggggggtccaggatgcctgggccctgggaagagagagtaggctccggggcctacctcttcctctgtggggccccccccttccgcggcctcggctgcccggaggggccgcacgacccctcccccgggcccgcatcaaccccctccctctcggtagaccccgcatctctggggccgagagaagaggagggggagggggcggggcctccgcgccccggccccgccccctcctcccggctgcacgcgccgctccccctttgtcccccaggccgcggggaccccgggcaccaacccctccagcacccgctgccccccagcccggtggacggcccctcgtgcccctcacgcgtgctcctggggccccggcgcccgtcgcccactcaggggcagccggcggctgcacgcgcgcctccgtgcccactccccccacctcccacaccctggtcccctcatccgcccccggtgctggccccctggattgctgcaagtcccgcccgggccccccggccccgttgcacccccggagcattgcacgggcgcgcgcttcccccgggcgcgcgcgcgggcatgcacccgcctctccccctccccttccgcacctcggcggccgccgccgctgcagctcccgccgccgccgccatcgccgcttgcgctgggggccgagccggcgcgcggccgccccgggtcacgtgggcgagggagggagggcgaggaggagccttaaaggagccgctacatgctttttggccattttcccctgagagcggcctcggagatggctgtgactgtcctaagctgggagctgcaagggagaattcctgtcattcctggcctcagttctgcagggaccgagggcgagacacgcctgggcccaggtgtggcgtctctgtccccatctggttttaggtaacaagcggagcttctgaacttctcggctctcggcagcggctgtatttcctctggcctggttgggcttttcccgcctctggttgcttttctgcctttctagtttttgggttaccagatagaaggcttggcctcagttttggcctcgcctttttgctctttctaacgagcacgaaggggcgatagggacgcggaggacacctttattcttggctggttctagcatgctgcttcatgtcccctggagcagcgtgcccttctgaaaacctgtggctaaatgtctcttctgtttatatcaggcgtgttacaccttcacacgcactagggatccaggtaagcccagcggcccgaacgtcattactgactggtgacactgcagtaagtaaaccttttttgccgaacacttcataagcacagtcaggtactccgtgggtcatagcccagcggacaatttaagtataaatgatatacaccaagatagacaatctcgatagctgtatttagggtaccatccctttaggtattacgttttggtcgagtttggaaaagatctgtatgatttcacacgcagtatttgacacaggcaggtggggcacctgaggccaattaaaggccttctgggaactgtagttctctttggttaactattccagagctttctgggaatt

SEQ ID NO: 46297 - DNA, 1716 bp, Homo sapiens
acaccccccagcccagcagcccgctaggatggggcgagcccgcgcgcccacggtggaaggacggagaaaaaggggggccagaggcctggggctctggactccaaggtggccccggttgcaggctcttctcaccccgccccctttaccggctgcctcattcctccgccccccccttacacgtttgcacgcgcttttcacgtcctcccccccgccgccagcacgcaccgtgcacgccctgcccccacgctcagagctccgtggcacgcccccccagccccacgaccctgagtgcacgctcctctcacctggcccggttccgcgcgctgtttttttaatcccttattttccccacccccccccggggccggcagcgacccccacacacgggcagggcctgggcagcgcgcaggcgcggggatgcacgggacgcgcgcgcgcgcggggccggctccgcgtgggcgtaaggggggaggggcgggggcggctcgtgccgtgtgttccaggccccgcgcgcgcggcggcggcggcgtcggctaggactcggggaggaggaagaggggagggaattaaaggagcaggatccccccttcccgacccccctttcttcaccagcacccccacgcggttaaagggccggacggccttgcctcctctttggccgggattatttgtccgccagagcggaaatacgttccacacccccctctttctcgctccccctcctctgtacctccaagccccgcggccagtttgcgcgtgcgtgccaagtgccgcgcggaggcccgctcactcgggcccgccccccaatcccggctgcccatggcgctactcgctccgcgtccccgcgccccgcccgcgccgcatcccgcagcgcgcgcgcgcacccgttctctcggctgcgggcgctgccacctgctcccaggggtggtgcgtctccggtccagctgtgccgagcgctgccctgggtgcatccgtggcacctctcagggccccatccgccccgtggctaacagagctgttggtagctattacccacgcctgcctcctctgctgagtgtgctcacagttgctccagacacattcccaggcttttccaactcttgtaaagctagtaaccgcctcagcccttcaggcctgaaatatgatttcactttccacaaagccagacgatccagtgccctcaactttcctccactccatgtcagtcctttaaaatcacacccgccctcccctccattctcaggattgatcccaacttcttgccaaggcagtcgccctccgcttgtgctatcgatgaccttgcccatttcacctttagtatataattaaccctaggactaattttaatgatgtgatttattatgttagtatgattctactctaatcttccaccgctccgtcccccttattcctcacctctcctccagactgacaaggtccagctctaaacaaaacttcccttcaacactgcgcccgggccttctctttctcttgtctctctcagactaagttatagtctccacagcttcagcgacagcacttaggagcgtcttgaaggctggtgccttcccttccacttcctcgtacctacacccacttccccacctatccaagtccgcgtgaagatgccactgtttcctgccaattggatttcttttttacgtccttcaggagactagtgcgttttccatacatttcaattctgatgaagtttct

SEQ ID NO: 46298 - DNA, 554 bp, Homo sapiens
ggtggaggcaggagaattgctggaacctgggaggcggaggttgcagtgagccgagatggcgccactgcactccagcctaggagacagagggagactcttgtctcaaaaaataaacaaataaatacataaaaaaaaaaataaaatgaatcatgaagggaatggttaaaaagtgaaataagacttttaaaaaaagatccatgtttacaacacactggaatggcattcttttgcaactaaacatttggggaaagttttagatagcagcataaaaacatgcaaggggtacataatttgcaaaattcttttaatgtgagcaaaagggtttgaagattacatgcttcttgaaatcagcatgcacatgagtcatctggagttttaattcggagtctgagtcagtaggtctgggtggggcctgagattctgtgtttctttctttttttttttttctctctcttttttttttgagacagagtctcgctctgttgcccaggctggagtgcagtggcacactgcagcctccgcctcccgggttcaagcaattctcctgcctcagc

SEQ ID NO: 46299 - DNA, 3023 bp, Homo sapiens
ggctcactgcaacctccatcttctaggttcaatcagttctctaaggactcacttataaatcaaaagggtttttacgaacctaaatgatcacttcagagaggtttcatgttcatttttttattggtcttatttatttttaccctacattgttcaaaaaggtattgaaaagacttctgtgggtcagggagactaacacactagcttcaagtttctttgcttcctgcatttcatacaagtgtaggttatgatttaaaggcatatcccagcccccgcaaaagttttattcctttgagtaaccaaccccaaatgtatttactttgccagttgggaatttcatctactagactttccgtaaaaatgttgtaaacatttttcctgtctccaaaactaagtgttgatttcattttttccacctagattatctctagggaaggattgtagggaataaaaaagtattgtcaatcttcctatttatcaagaagttctaaaaaaattagtttcacccccctcggaagtttatcttcaagaagacagaactgttctaggctctcaggaagtaaaacccacttggtacaacccaaaagaacactaaaactttacttaaatgaaatattttgcaatatcttggatggtttgtgggtttgtgtgctttagactattgactattcacacaagagcaaggtgcatgtgtgcacacacgagcccaaatatgtgtttgcctgcgtgtttgtgagcatgcgtgtatggtgcacatgtgcacgcatgggtgggtggagcgtgggggcagtacacaaagcctgtgggggagatctattgaccctatagatatattagcatcagggagacagggcaaaggtttcacccttcagttcagtccccaatccctgcttattatttccctaacagaagaccatcccccttgccactccctggtttttcttctctggcagcaatgaagcagctgctgacccagctctagttttcgggaagtcagatgaccttttccctcccgcggctctctacctctcgccgcccctagggaggacaccatgggcccactgatggttcttttttgcctgctgttcctgtacccaggtaggaggcagggaagggggaacgtcagggtcctgtgtgtgaggttggtgctcccagcttgaattcccatgtgtgaaacagtctcttttgctttccttttctcatctgtgtcttccttctttctccattgctgtctccttgttcccacggctctaggtctggcagactcggctccctcctgccctcagaacgtgaatatctcgggtggcaccttcaccctcagccatggctgggctcctgggagccttctcacctactcctgcccccagggcctgtacccatccccagcatcacggctgtgcaagagcagcggacagtggcagaccccaggagccacccggtctctgtctaaggcggtctgcaaacgtgaggctccctgtgggctttgctcagggtgctacaccaggggccaccccagaacttttgtttaggagttgctcagggtgggacttaacctgactagatggcaaagttgcttttgcagagggcttttcaaaatatccagaaaatgtcaattgccagtagcaaggaattgggaacaggtcttgatggagactgtggggtactaaagccagggatgactttttatgtacaattgactgcctagtagtgaccattcagaacagatgctgaatggtcctggagtcctctagacatctgaggatcccaaggggagtgtctggggaggccacggccctcaggagactgagggaagtggctatttatcaatcagttcgcttagactctgtgaaattggcaatattcaatcagttgccaaaaacagcaatttcacatgttgcaacctaatatttcagtgttttgacagccagttgaccattcccatgcattccagcataaaatcacctgcttaatccccagcccaggtgttatccatccagtcctatattccccacccacttcctctctctccagctgtgcgctgtccagcccctgtctcctttgagaatggcatttataccccacggctggggtcctatcccgtgggtggcaatgtgagcttcgagtgtgaggatggcttcatattgcggggctcgcctgtgcgtcagtgtcgccccaacggcatgtgggatggagaaacagctgtgtgtgataatgggggtgagttctctggctgatgggctacacagggggctggggtctcctggggaaccctggggcccaatgtgcatccaggaagcctctgtggggataggagtctgttgttcagtgtgccataataatattcctggattttggtaaattgaggtctacaggtcacacatcacaagtctgcaagggccaggccccaggcagctggtgctaagcttcagatgtagcataaagcctccacacactctgcctggcttttctaagtgcctcaaagcaagacttcatattcaggccccacagattgttgtagggaagatatgctgggagagagtcaagtactgtgctttaatgccttgcctttaaagccaggtttgggttccaagccctactctgactttgacagactttgggaaggctatttaacctttctagccctcagttttcccatctgtaagacaaggatagtgagtgctgacctgagattgccatctggattaaatgagttgacattagtaagcatatacaacagccctggagtgcggtggctcacgcctgtaatcccagcactttgggaggccaaggggggtggatcacaaggtcaggagtttgagaccagcttggccaacatggtgaaaccccgtctctagtaaaaatacaaaaattagccgggtgcggtggcgcatgcctgtaataccagctattcaggaggctgaggcaggagaatcatttgaaccaggaagtggagattgcagtgagccgagattgcatcattgcactccagcctgagtgacagagtaagactctgtctcaaaaaaaaa

SEQ ID NO: 46300 - DNA, 587 bp, Homo sapiens
ttcatcttcagtgggctgtggccatgggcagtttcttcatctgcaaaaggggagtagtactaggacccagctcacaagctgacaggggaagatgctcagacaaacactgcctgcctggcatagaaaaatgcccagcatatgttagccatgaccacgaccgtcgtcgttatcatcatcatcatcatcatagcatctcatgtttcaggaaactttccaggaagaagggacctcgattccctctggggaatgtccctggtggttgctctttcagcagcacagctggctaactaaggctttggcagttgcagcctctaaaggaaaaattcctcaggttcagactaaacacaaattgcactgacctttgatcagaaagtaatttcagagagagagatgctcagacagggagggcagctggttttgagccccaacctttcatcttccccttagctcctctcctttccattcacactgccccctcccccatcacctggccctcgggggtaagctgattcctctttaaaactctggcccaaggaagacaaaatttaaagcccactcccttcctccttagcatcactggaccaagg

SEQ ID NO: 46301 - DNA, 3942 bp, Homo sapiens
gaggcagcacctgggggatgtcctgaattttttacccctctagccatggccactgagccctctgctgccctgccagaatctgccgcccctccatcttctacctctgaatggccacccttagaccctgtgatccatcctctctcctagctgagtaaatccgggtctctaggatgccagaggcagcgcacacaagctgggaaatcctcagggctcctaccagcaggactgcctcgctgccccacctcccgctccttggcctgtccccagattccttccctggttgacttgactcatgcttgtttcactttcacatggaatttcccagttatgaaattaataaaaatcaatggtttccacatctctcagtgcctctatctggaggccaggtagggctggccttgggggagggggaggccagaatgactccaagagctacaggaaggcaggtcagagaccccactggacaaacagtggctggactctgcaccataacacacaatcaacaggggagtgagctggatccttatttctggtccctaagtgggtggtttgggcttactggggaggagctaaggccggagaggaggtactgaaggggagagtcctggacctttggcagcaaagggtgggacttctgcagtttctgtttccttgactggcagctcagcggggccctcccgcttggatgttccgggaaagtgatgtgggtaggacaggcggggcgagccgcaggtgccagaacacagattgtataaaaggctgggggctggtggggagcaggggaagggaatgtgaccaggtctaggtctggagtttcagcttggacactgagccaagcagacaagcaaagcaagccaggacacaccatcctgccccaggcccagcttctctcctgccttccaacgccatggggagcaatctcagcccccaactctgcctgatgccctttatcttgggcctcttgtctggaggtaagcgagggtaaccttcccttcctgctgtctccagcatccctccttggccttttggggccaggcttcatcagcctttctcttcaggtgtgaccaccactccatggtctttggcccggccccagggatcctgctctctggagggggtagagatcaaaggcggctccttccgacttctccaagagggccaggcactggagtacgtgtgtccttctggcttctacccgtaccctgtgcagacacgtacctgcagatctacggggtcctggagcaccctgaagactcaagaccaaaagactgtcaggaaggcagagtgcagaggtttgagggcaatgagtgtgggcagtggcctaaggcagaaacagggcaggcggcagcaaggtcaggactaggatgagactaggcagggtgacaaggtgggctgaccgggagtaggagcagttttagggtggcaggcggaaagggggcaagaaaaagcggagttaacccttactaagcatttaccctgggcttccaggcagccctggaagtcaagagaacactcagaaatggggagggagaagcagtggaaatccatatgggttgaggagtaggtaagatgctgcttctgcgggactgggaatgcgctgtttctcagtgacatggtctccgagaccaggagggatacacctaaggcagcctttccctcttgatgacttctacttgtccccccttctcaaagcaatccactgtccaagaccacacgacttcgagaacggggaatactggccccggtctccctactacaatgtgagtgatgagatctctttccactgctatgacggttacactctccggggctctgccaatcgcacctgccaagtgaatggccgatggagtgggcagacagcgatctgtgacaacggaggtgagaagcatcccctccccctacattgctgtctccctgacggcgcccagcccgaggagtgggcactcggctccggacactgtaactcttgctctctaccttgctcacggggcctcaggcttcagtgcttacctcgatgtctcatacctctgcagcggggtactgctccaacccgggcatccccattggcacaaggaaggtgggcagccagtaccgccttgaagacagcgtcacctaccactgcagccgggggcttaccctgcgtggctcccagcggcgaacgtgtcaggaaggtggctcttggagcgggacggagccttcctgccaaggtgacctttgacctgtacccccaggtcagatcctggtcttccatcctactgtcttctctccccacctcaaccctgctctttcctcactttgtttaaacctccctgtacaactatctcacttctgagccttttataccctggaaacccatgatcccccgtctctttggtcactgtatccctgacactcccagacatttgacctcatttctgactctcccagactccttcatgtacgacacccctcaagaggtggccgaagctttcctgtcttccctgacagagaccatagaaggagtcgatgctgaggatgggcacggcccaggtttgaagacagagaagggaggcagggcagggaactgggggaaaatggagaagggacagaactgttaatgctggagcctgagccactctcctggcacccaggggaacaacagaagcggaagatcgtcctggacccttcaggctccatgaacatctacctggtgctagatggatcagacagcattggggccagcaacttcacaggagccaaaaagtgtctagtcaacttaattgagaaggtggaatcctcctatccctgaactcgggggaatggaatctcgctgatcttccaggactagctccctgatcattccagcccctctgaacaacagggccccaggaaaatctccaggtcctattctgtcctccttcccttttacttgaagcagtttcttgactggtaattcctccatgaacctcagcccttgagcctcttactgagagcctccctgtcccagcaaagtcgctgaaatctcccaatcacagtattctattttcaatgccatggcgccttgttctcctcacccacaggtggcaagttatggtgtgaagccaagatatggtctagtgacatatgccacataccccaaaatttgggtcaaagtgtctgaagcagacagcagtaatgcagactgggtcacgaagcagctcaatgaaatcaattatgaaggtcagaggttagggaatggtgggaggttcactttggggtcaggaggttcagggtggagggggtcatgagactaccttgagggcgacagggaggaccactttgtagtcaaaagttgaacagcaggatcgttgggcaatggaggttagtgggaacctgttgggggctggaagggccactttgtggtcaaagggaagtccgtgtaatgatgattaacttaaaaagttgaaagatgtgggatttcagttgcagattggtctctggggttaaaagatggcttggaagaccaggtgaggtgatggtctcttccctctccacagaccacaagttgaagtcagggactaacaccaagaaggccctccaggcagtgtacagcatgatgagctggccagatgacgtccctcctgaaggctggaaccgcacccgccatgtcatcatcctcatgactgatggtcagaagggacctctctcctgtcccagcctccccaccttctcagaccagcatgtggcccttaagtccacttgtaacactatacccatggttggggccctgaatgtgactcatagctggctgttcatctctcctgtgacccttcataaggaattcttcctaagccctgtgatcaactatctctaacccttcctcaacttgctcaccctgccatgtgtatccctgcctttagccagtttatcttccttatctcctaccctcatggtcctgtctcttctgcaggattgcacaacatg

SEQ ID NO: 46302 - DNA, 1945 bp, Homo sapiens
aagatcaagaatagaaagatgatagcttcaacactgagtatctgaagtttttcagtataacactggatagaactggaaaaaacaaacttggggatcatcagctcttaagcggtactaaaagccatgggaaaggaagacaatccatggcaaattgcatagaaaagacagaaggtccacaccaaggcttgggaaagcccacctctcgaagctacactgtgaggtgatatgtctctaggtatgggccagaaaaacttccccattcgctcacactcaccccatatcttctcagagtgcagagtctgtgaaaggttaggccatgtccacacacagtccctcacctttttcttgagcttgttgaatttcttctgcagagcctcctcttcctcgctcagtccggggggtatcaccaacatggtggctcctagttcaggggcagggcccaagacatctttctccactgttaccacccggggttcacacgccgtccacactgtacccaaccccaccccttcaggtctgcctactcttgtctttggctttccctaccccttgcttaaaccaggctgctgtccaagctcccgctggtcgggatcatccagcattccctcctgtctccagggatcacagacaccagcacctttaggtaccatgtggttcaaggagggacaaatatccactccgtcggaaagacgatggcacccgacccccctaccctcgctagggtaaggacaaccgcggggtttgaacggcagagaaggcggtggagccagcgtagcgcccgcagagcaacgcaaagaggaagaacagagaaacggctatgagaaaaagggccgaagagtgagaagcagagggccttacccgagggggcggcaaccgggggccccacggtctccggccgcgcccgcgctggccgctgatagcgggctcacaacgatgacgtagcgaggagcggaaaacgcggtaaccaaggcggccccaggcgcgcacttccgcccggccttccaccggtccaggtctgcccctccgcagcgatagttcacgctctcggcggggctgtaccggaagttgcctctacttccgcccgttccggggcggggcttacttcgcagcgactacttgccgcacttccgggctgccaggcagctgctgtggctccaggatgatggagacagagcgacttggtgagggggaggggagggaaatggaacggagtagccgatatggaatgaactttgacccctgacttttgacctttccccgtagtgctaccccctccagatcccctggacctaccccttcgggccgtggagctcggatgcacggggcactgggagctgctgaacttgcctggagctccagagagtagcgtgagtgacttttgaccctaacctttgacccgcattgagtccaaacctccttcaccctcctcacagtaggatctagcttaaccttgttcatctgtgcctgtactcctgtccatcccagcctgaaggggtgctggacagattacagcccagtgtacctgcagtacatgtgaggacagagcagaaagggctggggatatttttgctttgagagctgctctttcaaatgtggcatttctccgtggagctcccttctgtatccaagcaccagggcacttggtgactgagatgataggctttgagcctccaacctttcatccttaggtctgggacccctttttctaaaatcagtgagtctccaatttcagtgtgcttcatgattagccagggagctttttaaaaatgcacattcctaggtccagcctccatgtttctgaaatccaaaatctgccccaggtaattcagtagcaggtagtttttggccaagcctgattgtcctagtctgtttgacacatctgccatttctgatctgaacacaagtcccatcatctcttttgtctgcattttatcctctttcctta

SEQ ID NO: 46303 - DNA, 3152 bp, Homo sapiens
tccctttcccagccttcaagcctaagctctcgccctgcccaccccgatcctgaacctgtagaaactcctccattggccagggctgtgcatctccttggaggtcttgagctccacatagcaggttgggggctgtgtggatggggcttgggggtctgtgcagtctacctcccctgagaagagcagagggtggcttcccaggcggctgcgtagcacagagcagaaggccacgttggtgttaacctccccagaggggtctggggagcttccaggtttgtctgcacaaggagagaagcagcagcaggcgtggggggctctcaacctctgggaaggggaagggggctatgaagcaggggcaactcacctgcacacatgtactgctcaaatttgtatcccatgtacataagctcccggaggagcggtggccgagcaagcctctgggcccgagcgttcggtgtctccacttcactcaggtatagtgttccctggaaccgggaggctgccagctgccagccctcctgccgctcatacggtgtcgtcagcagttttgtcaggtgcccccgccacgtcactatggcctctgccagccagcctggacccctgagaggcaggagttacaggctgaaggtctgacacaagcattagtgagatgctcccctcgaagaatagtcttgtttcttctaaggactgattctcaccccggctttggctctcctaattttagagggtaggtacgggtctccagatatactgcctaccacgctttgctcacccctccaaccggcctcggtgttccaggagccagcacagcaggtggtccagcctttcctggacctcctcgtcccggggctggtatcgatccgggtatccgtctctgaggtcaaagttggggcctggaccgttagtggggggtgggctatagtagcgcagggctcgggcatctccatggtactggcgttgagcatccagggagaagcagcccagttccgaagggcgccggtagaaaggaaagggcccagagtagagggcagggtctgtgggcagagaaggtgctggacgaggtagtttgttccgaggctcagctacctctgtcttctcagctcctctcttggtccccctgggatccatgaggtcctaagacaagcaggggtacagagtttccattctacagaggaggcctggagaaggatgactggtttaggactaagcgagccacctgatcgccaggctctggccttgaaacattcaggcccctcagacgccaccgcggccaagctctcatcctgcctctttccttgcccttcacccaccctccctccaggtcctccaaatgcagtgaggttaggaaggacgtctgcgctcagatcaagaatccagttacctcaaagctccccaacttccacctccgcagagctatgacgtcatggcaggcacgccagaggccgaaggatgcaaaagtggttttctgctttcgatgatgcaatcattcagcgacagtggcgggcaaacccctcccggggcgggggaggtgtgagcttcacgaaggaggttgacaccaacgtggccaccggcgcccctccacgccgccaacgagtccccgggcgtgcgtgcccttggagggagccaatccgcggccggcgtggggcccggcctggcggaggtgatgctggtatgtgcgtcgccaccgcccctcccagcactgacgggcctgagggacgacaagttgacgctcctttcgtcatcacctggtctaggagggacgcccggggagaccgtacgtcactgctctgcgccggaagaccctattttcaggttctcttccctccattcctaccccttccccggtaccataaaatcccgggatatgagctggaagaggcatcacctgatcccggagacctttggagttaagaggcggcggaagcgagggcctgtggagtcggatcctcttcggggtgagccaggtaaccatggcaaccccgggggtggggcctcgcttccggtagccgagagttttgttagaaccgcgtccccgccccagttccctgtccgtgagccgatttatctgcccagggtcggcgcgcgcggctgtctcagaactcatgcagctgttcccgcgaggcctgtttgaggacgcgctgccgcccatcgtgctgaggagccaggtgtacagccttgtgcctgacaggaccgtggccgaccggcagctggtgaggggcgtcggtgcgaccgccggaagcccctttcctaactcctggaattccctgtcactcagtcactccgccagccgttcagcaagcattaggcctttcaggcgagggcactgtgccaggcactggggtgccacagagaccctgttaaaagtcccgcaggtagtacagggcatttcaaatcatggaggtagaagaacgaggcttttggggaaaccgagtcatggggcatggttcgaacatacagcgctgggagtgcagtcagacgtcagatcatgacaggccttgtacatcagtgttgtttccatcttacactgaggcgatgggctggtagagaatatcatagagagagggaatggtgtattggagatagtggatgaggcagggaggtcagctaagaagatactgcatctgagaagtggtgaaggcctaaattaggtcagtgcagtagggagggagaggagagtgaggaagagggaggagtccaggacaactcagactttccagatgactgcgtggctggtggtattaggagcacatttagttgttggactacagataatgtgtttaattttatacaagttgagttgatggtgcatgtggagcatccaaagacaaaggtattagacagttggatatgagagttggagagaattctgggccagtgataatagaattacaagtcatggaggtgtgaatagcaagtggttaattctgtgatgtggtgagatccagtaggaagagtgggtagaggagtgatttctaacctttttgtaatctttagaaggtgataaaagctatggctatctctctccagaaaaatgcacgtttgccacatatacatagggtgtatgtatagttaggggggaaatattttactaatcctgcgaggtccgtggttaaggactccaggtttagagtggaagttaatagggtcaaatccac

SEQ ID NO: 46304 - DNA, 1319 bp, Homo sapiens
cttcaagagcagggggagatcagaatcgtccagctgggcttcgacttggatgcccatggaattatcttcactgaggactacaggaccagagtatgtgactgtgtgcgtcaggggtgctggggggagggcacaggttgggggagacagggaacttgggaaacagaaataaaaacaaaagaaagaatttccctgcccccacatcccatggagagggcacagggccctggtaaatagtaatatgagggagagagacaggagggaaagagggaggagtgagagggtaaagagggggggagaggagggggaggaggaggaaggaaggagggggaggaggagggggggaggaagagggggaggaggatgaagaggaggaggaagaagaagggtatgagaggtggaaggatctgagcaagaggtaagacaggaagagaaatgctgtcctgggggtggaggttggtagagagtgagggtggggatggaccatgtctctcatctctgcttgtaggtcctcaaggcctgtgatggccgaccgtatgctggggcagtgcagaaatttctagcttcagtacttccagcctgtggggaccttagtttccagcaggaccaaatgacacagacctttggcttcagggactcagaaatcacgtgagacttgtggaaccaaccaaagtcaggcatctggtgcttccctgcctccctccagttccatccagcctgtcctcctgtttttttggtgaacctgccagaaaagctgccaaaaagctgactcttcttgttaataaaatgacccaagtttgtattcctccccacaagagaggaggcctatcttacctgggccttagaaagagccctgaaatagaattcagttcttggtggcttatcaaaagcacacaggggcctggcaggaagtgtaaaagcttgatgttaatcatactgggactaagaggatagagaatggtaggagctgggatacccctaaacattcacattaaaacaaaaaaaacccaaagctaaaaaacaactgggcaggagctaaataaaaatctaattttgagaggctgtatctggctcaggcctcctactttgtaacccatggaatatgtgaaagcatttgaaaaactatagcactgatctcacatgggcagacacactctcagagagatgtggtgggagccatggcgcagtctgcctaggcagtggcaggagcgcagaagactctgattcctctcctcggtcctaagaccgaatgtgtgtcaggacatgtggtcagggaagagaagctatttaactgaaccagtaatagtagcaggaaaagaaaa

SEQ ID NO: 46305 - DNA, 1575 bp, Homo sapiens
cagagtccccgtcacagagagtaagagggatatggctctctcacctcgctggatggctctgtggagagacgcgatgactcggagctgagggaggaggaagagcagggggaagatggctcagacttcacctgaagatctggaggaaagggagttagaaattatcaggaagcagagcttaagaagagtccaaaaagtacccaaggacatgtcggtggggattcctgtaccgcagcaagggagaagaaacaaaaataggggattgaaggagagaggataggcacttatgtagaagcgtgaggatataggaagctacgtagtttctgggaaacagtgggaagatgagggtttctggaaatctgagggaacgacaaagactaccttacctgggaagatcggcaggagttcccatgggggctcagaggggctgacatccatccccacgtccagggagctgccgtcaaactaaataagggaggatacaagagggcaggagtgtgagaaaggatgagaaagtaggggtgactccagatgagttatggcctgtgaatgggtccaggttctgggctcactttccacccaccaagggttagagaaaggctggggacacaataccgggacatcctgctccgggcaacggaagagctgcgtctgctcctcggccacttcatctaggccagaatacaaggtgctgtctgcaagaaatgctgagcgtcggggggtcgttcggtggccccagcctacagatcgcacacaagcccccgccccatccctcattggctccgctcggccagacccaccgcccgcccacttgaaaagtgatacaaccagggcgcttcagcccctccttccccgaccccggaacaactcgacgttccagcagggagcagagttcttccctgacttttgtatcccccttaatgcacaacgagccccctgctccgctctccttcagatggcggattccgtatttgcccagacttcctctttaggcccccgcttctttcccgcgtgcctcagggacagtttgccacagccctctcccctccccggtgcctcactctgcagaccccagtcctccgggctaagcaggttgtcggtgaagaaacgcgtcgggtcagcaatctcgctgagcagcatcagctccgccatctttcccccccaccccccaaccaggagacggttcccaaggcccgcctctccccatcaccaactaatcagttgactctttcaaaaaagggggcgtcccggaagctctaccgaccagtaagagacctgggtgctgagcacgtgaatcaacagatgcggatgactgtgtaggcgggcccaatgggagcacagcagcaggaagtaacttccagacagtgccataccgccaagcgcatgcgccaaacaggctccagtgataaagcgcctgggagatgtagtacccagtattaaggtccaccatctcccccagccactactaagtttagtttagacagcttctatgtgtcctcggagatagataagcccctcaaaaggggcgcactgtgaccactgctacctcccctaggaagccaaaagctgagaatggga

SEQ ID NO: 46306 - DNA, 1088 bp, Homo sapiens
gagtatgctctagaatttggctggctggatctgggcttacttccagctcaagcgtttcggtaggagggtctcggggctgctgcctaatctgaataactgaatcaaggttctcccgaaggttcttttcccactcttgttgcggctgagaggtgtccttttctccaattgtattgactggtggcgtctccatatggatgcttagtcccttccacggtgagtgaacagttttggtcagaaagggatgaaccaggttcaggtcagcacctgaaaagaaaaccaaacaatgctaatagcagggttcttatttagactcctttctcgtcctttcccattcttctgagacccaggcccctagtcctgaaagtccccagttttgctttcctccaaaaatctgctccagcttccccgttccacccacatataatttagaactataaattccacaattccctgcggttaaggtagccgcgccaactacggacacccggtcgggtcaataagtacctgcgcggccaaagtgcctagcatggtgacaggaggagccgggccattcgaatcacctctccttccaaagctaaatggctactgaatgctgccctcggagccttgccccacgcggagagggcagccggagaggggcgcggtgcgggaggcgggggtagggggcggaacaactgggaaagatactgacaactaaccctggagcccgcgagactccgaatctagtcaaattcctggcagccaatcgggagaagggaggaatctggttagcccgcctattgaacgtgacatcatttcctccgcaaccatgaagctccaggccttagcaactgaactaggccagagcaaccgaactaggcagaatcgaacagaatttggcgcggtcgggctggccaggctgctcaagagtcaaagtgggccaacatggtgagaccctgtctctactaaaaatacaaaaattagtaggtcatggtggcgcgcgcctgtaatcccaactactcggaaggctgaaacaggagaatcgcttgaacccgggagacagacgttgcagtgagccgagatcacaccattgcactccagcctgggcg

SEQ ID NO: 46307 - DNA, 1321 bp, Homo sapiens
gaggggcacgcccgggctggcatcagccctccaggccaccctgccactcacccagcacacggcaaaatgcagaggactacctttccctggtccgccccctggccgccccttggggaatgcaaacttcgtgttctgctgcggagccagacgcctgtattgggaagtggggagaatcaaggcggggaaatcggacttttgggtcgctgggggcaacgaagcctggagaggccttctttccattcccagaatatgtttgctgctttttcctctccccactggcctaaatggatcgctccgcctgtttcctccccagcacctagggcgcaatggaatattccattgcccctcctgtcctgggtctgtgttgcggggaacgctcgcgcggttgccagagaaagccccggacgtgacggatttgcgcgaccccaagcagcccgcccttccccctcccatccgtcattcccctgcgctctctttcctcacccttccccccgccaccgtgggttccagacttgggataagtaaacagcgggtggagcgaggcctacggacccaggccaggtgggagtctgcactcttcaaggggcctgggctgctgctcacgggtattaaagaactccgcgttgttcatggctgaggcgatgcattaggaagatcctggacctagagaacaagtcccccgaacgctgagttggaggcgggacttcgggtgcgcgttggtgcgtcaacgtggtgggggggtgtgtttgtagggagagggctggagtaagttaaaagtaggctattttgtgacacggacctggtgtgggagcgagaggaggtggcttgattgccgggcgtctgttccgagggaggagggtgttgccatctccctcacatgcccttatcacccctttctcaggcgggagcatgctggggctctgcgggcagcggctccccgcggcgtgggtcctgcttctgttgcctttcctgccgctgctgctgcttgcagcccccgcgccccaccgcgcgtcctacaagccggtcatcgtggtgcatgggctcttcgacagctcgtacagcttccgccacctgctggaatacatcaatgaggtctggcaggggacacctgggtgcagggcgttagaggcgtctactgtggcaggggagggagagcggggaactgaaagccacccctctgggcctgcccagttcctcagggagctggtgctggcgtgggggagagttgggggacgggatccctggttctagcagggtacaatagacctgtggacgcgggccagggggtggcgtgtgggagcttcttagcctatccccggtg

SEQ ID NO: 46308 - DNA, 1848 bp, Homo sapiens
gaaaactcacacacatgcggtacttaaaacatgtcaaaactggatgtgagacatggacacaagaatgaagaatgggcaattctgatagaaaataacacaccatttctacacagcctatggatagcattgggacaacctagttgcacacaagccattaaacatgtcaaaggcacacagactcaatgtagaaaacatggctcccataaggcatttgtgtgtcagtaagggtctagcagtgtggaaggccactgagaaacaagaggtcctgtgcctagatggaaacagaggcacctaagggtattcctaagaggcaaattctgctggccttctcccctcatgacccttcaagagtcatgtggggtcaaagggcaagaaaaggaattggggaaggtgtagggaattccctctccaggattccctgtgcacgctcccagtcccaaattcacaagggtttccatttctcctccctcccaggtctcttccatccttcctccctctcaggtcccctctcctatccccagcaaccctcttcccagtcggcccctctcctttccccagcaaccctctcccccagtcggccctcccagacccaatctctccccttcccctcatcctagtcgctttcagcaccctcttccctcctcctcccatccctttcccgcccacacctcagaggggtagggggcctggggggctggccccctccccagccaggctgcggcagcggtggtggcggatggctgtgtctctgtctctgtcggggtgtcggtgccaagggggcgacgggatttgggggtgtcctagccccggccgatggaggggaggtgggagtgggaggttgggcccatagcggtaggaatggtggggggctgtccccccagcaccctccctccctccctttctgctgtctctctgagggctggggctgctgccgccgctattcccccgccacccctccccaacgcctgctggtttccggggccggccaggaagtggagggcggtgatgggcagcctgttttgccaatcgtctcccagaaactctggcatctcctccccacatctaccagtgtcctcttgcgagccccgccccagggctctccctcggtctttgcccccatctctggctccagctgcatcttttttttctctaactccctttcagctctggatcccctggtgctgtattcctccttccgcacattccttcctttattctccatcagctctcttttaactgccacttttacttggtctctttttttctcaactccggttatctgctgcttattccccccaactattcttaaggaccccttttcccgtacccattcaattctaaacatttatcaagcatctacctaccatatgacaagcattaagttcacctctcttctttttctctccaggactccatctcactccatctcactctccagtcctctggtctggtttcctttgccctttgtccctcactatctcccagcagtccagctcccccctccacctgccttctctggcctttaaagagaagagatctctttggccttatccctgaccctttccttttccatgctcttttacctctgtaccttttctttcctacttccttcgtatcagtctccttacttgcccaagctgagacaaccccttctcacaacatacaatatgggtacatcttttcttccaatggaaatttggcttcaggggtgctttctagaaaaataaaaagtgaggaagaatgccgattcctctggaatgcgcgtgcctccttaatttggtagccatgtatctagttttccaccccctcttctcttcctccactcccattatccctttactaggatca

SEQ ID NO: 46309 - DNA, 2218 bp, Homo sapiens
acttcactctccttcatttccacctttccctctcaatatcttccttcctaaacctcaagcttcctgaatcctcatctgccccagtccttctttacgcaactgctaacttctcatctttccttactcttgagtcacatgggatcttttatcaaggtcccccctctagccacacctttaccctgcattagtttacatgccctcgggaagaggattggtagtgggaggactgttacctaattctgctcctttagtcacagtgagggtcagtgattgtaggaaaagcccaaactccccggggtccaacctgggaagaagaccctatttctgatgggcaaattataaagaggaaagggcgggtctagcctccgcgggtctccttaaaaggggcgggctttgtcccttttgcaccactcacaaaggggttgagcccagagctttcctgctctgaaggtttaaaacggagttgaagtcaatcctgttctactctgtgtacaacattaagaaaggggtgggcctttagttcagttttgctctgtaaatcacctaatatggggagggctgagtcgtccagccgaatgagttgggttaacaccagcgccgcagatcgatgttcccactatccaaacgtcgggctaatcccagttctgctcccttaactaaaagggaggggcagacccaagttctgctctctacgtcaccaaaggaggttggagccattttgaaccctgcgaccctagtgttttccctcttttcctagctcttcgccgtctttcccgatgtcggccaatcaggggaaaaggaaaaggcccaatcagcagaaagtccacagctgaaggacccggatgaagcgagcctaggactttgaagtgcaagcctcgccaattgtagagcagtcaccatggcgacaagataggggtgaagaggtggaaaaagagaaggttaaaccctcacaggattggcccacccccgtcccgccgcgtgctgcgcaggcgcgttttacctaaccaccattttccgtcaagttttagccaatgagttgatttggagccatacgctccaaagtccaatagcaatccggacattctctaaaagaggaagcgaaggaaagaaaggggcttatagtgggcgaggtctataggtagtcccgagcaaattgcttatggctttggttatgactgacaactactcagacgaataaagccctccttggccaggcgacagcgtgtagcgagttattaccaatcccttggcattgcacattgacttagaccgtatcagccaatagccattgtgcgaaggcaggactgcactaaccttttcccgcccctaccctttgggccaatcctttcttttgaattctttgtgactggcaggcattcagaccaatagtgattaggaaaccttgaagcctgcccaacgatcgtgggcaggaggtggtttctggtttgttggggcgtgtgtatgtgtatttggggggactgaagggtacgtggggcgaaacaaaaccggccatggcagcagcggaggaggaggacgggggccccgaagggccaaatcgcgagcggggcggggcgggcgcgaccttcgaatgtaatatatgtttggagactgctcgggaagctgtggtcagtgtgtgtggccacctgtactggtgagaatcgaggaggggggcgggaggtggtgggtctcgcttatatactggagaggctaggagcgaataatcatacagtcatacagataatcggagggcacgttcccataggtgaagcccgacaggagacataagactttgctggtatgtgtgggtgggagtataacggtcgagatctgtggaaagaaaggtcttaggaaccaggagctgaggcacgtgatgtgctgagaagagaaggtggggcggggagtggcaggacaatgtgagacccgagccaccttaccccagagaagtgaggggtcttagctgtgcaggtggaaacaagtgagacacaaaggttaagggaggcacgcatcagttgagtcggggagaaccaggaaatatggatcacattcagatgagatctgggagggggctggtataagggcactgtggagaggcagacttgaaaggttaaagggtcataaagatagggacattattgagcttgaaagtgagtaatgggggaatgtgctagtaaaggggtttggtttggagtgatggggttggggttgaaaagaggagacc

SEQ ID NO: 46310 - DNA, 2344 bp, Homo sapiens
gctggggttgagaagagtcagagtttgaggtggcagagtggggctgggggtgccgagctaactggggagatcagtgtagggtgtgtgaaggggtcctggggctgagcaggtgggaggctttgatgcacctagtgtctggctgagcagtggagaggagctttaggggctctggagagggtgtggaggtctccacatctggagagaatgagggggctgggtggagagttaggggagaagataacgtagcccaagaacagtttcttagtctgggagccagagggggctcccggggatggggctgttccaggagactgcaggggtcggcaaaaggttaggagtggggagccgggccaccgggggttccctctgtgaaggtttcagggcctgggggtgaagggaggtttgagagggatcacttttctatgggctcccaggaataaggagagaagagagctgttggatcctggagagggccctggagttggggggggctcccagaagattcagaacatgtgaacggggtttgctgggtctgtgtggggtcccggagtgggggcactcacttggcctgggcctcgtccaggctctggtcggtgatggtcattatctgctgcagaatgtccccgatgtcttgcttccctcggcctcccgggacccccccgctacccccaccggggtctccgccaccgggaggctcgccagggcccccaggctccccactcaccaatcccaggcccccccggcccccgcctggagggggcggccccagtagccgttcgtccatagctgggggggggccctgaggccccctccctgctccgcccctccccccgcctggttacttctccccccaaactcgctggggccgctgctccctccgccccaacccccgcccgtctgcccccggctcccggctcccccgggggttcaccccggcactgaagggagacctgggataccggctgggccccccacaggagaccccggcccccggcggcggagaaaatggagccggagagagagaggaggcccaagcgggggtgtgtgtgagagagagggaggagggaggagggagaaggggggggagcgagggagggaggctgggggaggggagccggagaggaagaggaggggagaagagaggaggaacagggaggagctgggggcggagagagagacacagaaacagaggaactgagacctagtggaggaggggagagggaagaggggatgaggggaggagacgggccatctgaaagatatgggaaagccccctggctggacttccgcggcctaggagtggggctgtgttggcggctgggggcgtctgtcacctgggtcctgaatcagggatctaagcgatgtggactcaggccgctggaatgcctgggttcaccggcagctcagttcatatttcttgttctaatgactcccctccctgttctacttaattaaaaccgaagaggggggctgggggagataattagggaggtctccagccgctgcttaatgagccagtaattaaccagccggggaggggagctggcctctggccagactggggagagaaaaggcctctggcctcaccttcctacctttcaccccgcctgggccccccagataccagtctgcagtccagaggggaattatatttattcacacaaccaaaacatcagacagactcagcagcagtggggagggagggtgggcagggctgaaggtccattcacagcccgtaaacccctcagtctcagggatcgggggtgctggtagtgggactgggagaatagtcttaatctctcaggtgcccacccaccttcccttcttactgggaggaagggtagagctgtctctcaggttataacctctcaggtggaggcctgagccctcagaccctactgcctagtagcttgacaactggtggtgtccccacaagttagggaaaagactcccagccactccttgagatgggtgcctgggatcccccttactgcctcaagctcccatggacctgtgggcggggagttaaatccctgttccatctcgcctgttcccagagtttgaggactttcaccctgtccagttcccagggaaggtgatgtgggagatgaatattgagatttgtgccgtgtctttcagtctctggtacccctgccaagcaagagttgagggcatgcaatgggctgcccagctttgagaccagtggcaaggaagggctggttggggctcaagtctcagcaggtgtgtgtggggggccgggacctttgctcctccattcgacccccaccctgaactctcagcagcaactccaggagctcttgcccccctggagggaggggaggct

SEQ ID NO: 46311 - DNA, 2154 bp, Homo sapiens
cagtggagttctttgttgtgaggggagggaatgcaaggagtcatcagcgggggtggcccttggccacttttcagcacctacacagtgcctggcacatagtaggtgcccaataaatatttgtcagccatttgtgggcagtggggacaatggatcataggggcaccctttggaaaccatatataggaaagaacatcttacatcccatatgcctgcaattcttggttccaacttaggggtatttccactccactctgccctcctgtggcctgtcttattttctggaggaggactgggcctgcctcatcctagcatcttaaaccctctttccagagctgcagcttctccacgtggaagatgtctgctctggtgggcatacattcattttaggagagaaactaaactcacaacccttcattttgggggatccatcttaaaaccaggaaggccttccagcctgccttttaatgggtaatcatttttggaattcctccctaccatgtattcttctattttttaccctctcctccttggtttatgggcatttcttggagggctgggggaccacagtcaagttgaggtgatccccgctccggggacggagtaaggcaaggaggcgggatcggaatgttggaggcagaaccgcaagctcccagggccacccaatcacagggccagtcatccgttgagaccctgcctccgcgcccggcagccactccgtatcttcctcgcattatcgcagggttgggccgaggcccgcgcatgcctgcagaaaacctacggccgcgaggggtcgggcctcctcctgctcctactcccgagaggctccggcaatgagaataggccccgcccccccgcgcagccaagtctacggaccaagtccgagcctgcagacaagctccgcccccacgagggcctgctccggctgacagcgtccggcagcgcggcagagccccgcccccatgcgggggcacgcttactgacaccgtccgtgcgcgcgggaagggcccagcctcgcggcccggcgtggctttgtgacgggcctctggtggcccagccccttccagcagcgtcagcagatcccagtggttacgttggtgagcgacgtccgccggcgctagcccagcctggtcccgcagctctcgggctgcccccagccccagcagtagctgggctacttccaccgctccttcccgcgccgccaggaatagcggcgtctgctcctgtacagaagagccagggccgatatcagggaaggccacgcccacaggactgggcctttctgccttcacttgcgcgaccactggcccctatcccttcaggctttgcgggttaccgcactttccatctctcgtgcgcctgactgttttgtgggaagccctctgtcccatctaaccctgttgtcctgggcatctttatcggctccggcctggagaagcgagcgggcggctcgggcgttgttcacggcagcagcccagtgcagcgcagttttccctaggggacgacgtgggaggttgttaccccagttgggggccagacgcctgggttccggtttcccacgggttctggccttgggggaagggctattcgggccggctggtccctcaaaggcgggaagcgttgcccaggagaccaccggcctgcaggaagtgttgccctggtgacgtcaccagtgcgcgggagggacaatggggcattgttctggggtcggtgagaccgggagacagtctccccccacgagattcccccccctttccacagacactgtgttccatgccagttccccagtaagctggagcggagggccagtgtggtgttgagggtgggagttggggggggaaactcacgcggcccgtacttccaccgcatctcagattgaccgccgtaacagcaggatgagagggaatgcccctctgctgcacctatattttgcacgctatctcccaccccatctgctcaacttctctatagcatacatcaccccttcctctacataccccatttatctctggcccccacgtctgcttgggctgcaatcagttcttcaaccaggtcttccaccgccagcctggcagccagcatcaagggtgtggtcccgtcctctgtgcgagcgtccactgcagtttgtctgctacggagcagaagctggggagacag

SEQ ID NO: 46312 - DNA, 490 bp, Homo sapiens
agttggagatattgtctgttggtactaaatcaatttccccctgttttgtgcttttttccacatcacttggggttgaagcctggacaccacttcttccagagtccctttcttaggaaggcactcacttgcgattagaaggcagtggaaaattgctgtcattctgcttctgacagcaagtagcagcagctgccaggagtgtgggtttgtttagtgctgcagggccaatagtagcttcctgcagttcctgacctttggaagcacaattttgctttttctgtccttacaaaacttttgcaatgcacttcactgtattacatctctctgggcttaaaataccttgagtgtgttttttcccccttgtaaatctgggctagactgaataatcttgtaagtatgtaaatataagcaactattttaaaataacctgggtttttaaatgtaatacagatgctcttcaacttatgatggggttaactcccaataaatccat

SEQ ID NO: 46313 - DNA, 740 bp, Homo sapiens
atcgtagggctgtttaaattactcattctggctgggggtctgtgctctaaaccactattggtacgctatttctgtgtggctggtctggaaagcttcacaccacccccctctcccttccctgaatttccatattccccccaaccctcattatccctttcagagtctcgcaggttgaggtgatgtgagagaggaagcagaagcgaaggttacgcgaggaaagcccctcgttaaacttgggattttcacggggactcagtccagaggaagttgagaaaaccaacttaaattacggtctcgatcgccatctggcggtggaagtccacattacatccgcggagcaatggctgggaacgttgcataatagagcggggctcaaattccaaattaagtttctgaattttttccatctggaattttatttgatgattagtctagcatcgtaatggtgtccttcgtgttgacgtgaaaacccagtcttccttcagttcatttcccgtttattagggatgcaaaactccagccacaggtgacctacgactctgactccttccccacctactttaccctcccctcccccagtacattctggggctaaaccctaagaggtacccatgcatcgctgggccgatgatgaaaatgaagaagtcttctgatgaagcgagaccccggaagtgcagcttcaggcaaaatcctgagcgaattctttgctgccaggacagtccataggctcttactcttag

SEQ ID NO: 46314 - DNA, 1537 bp, Homo sapiens
aaaatcacctcccaggatgtcaatcacacgaccagaatagtgagggattaatgtctcacctgaaagaggcatgaaaaataacacaagaatgtgctggtgcccaggcccttttaccacctccaactcacaacgtcctctcctgactcacccaaaacagcaaggacaaggaagaagaaggcggcaacgaggagaggcaggtccggcctggagagcttcagcagcctccacatcaagactttgttgttcacctggtcctgctccttctcctgggctccaggagggctcagaacagcccacagtgaccagctgagccccgcagccccgtaccccaccagcagccagctccaaggggctgaagcgactctggctgggggagcacgtgaggcccccgcgaccagggctctcagggagacagtcaggggggtggccagacagagcgggagcagcagtgtccccacaaatcccagcagccctcttagctttagcagcccccacagccctcccagccgcagggtcccctccagccatagtcctggcagcccttgaggaagcaaagtccccagagggccctgaagcagccacagtaaagccgcgtccaccagcagcagggaggtccagggtctcaggtcagggagccgcatggctctgtcaacggatacgagatgagaaatcatgggggtggagtcccaatccttgtccctgccctcctacccgcccggctccgcctaacccgtccatcggcttctcattttatcctattcaaccctgagagctctcctgagtaaccggtgctcatccgtacacccctcctacgacagacagctttcggccttctggggagctggaagcatgaccatcaggagcctcgtgcttaaaaaaaaaaaaaaaaaatccccggacccccacccccacccccgcctgccgcggcgagctaagtggtccgggctccgctccctcctatcgccgggtgcagagggactgggaagcaggagcgtggagtgggtagtcacttgggctgcgtccctgttggcgctccaggttcccctccgcaccaactcaccagccgcggcggggagaccgcagctccggggacttctgcttcagcgctgaggtccgctccgtctctcccaacctcgctaccggctctggtccgccagctacgctcggccagggcgggcgtcagggctcgggcagctttcgctttcgcttccccagccaaggccttcattctgggctgggccgccgggagggggcgcgcgagacccgcagacagcggaactggagcccgaactctggttcgcactgtacaggcctgcaatgagtctcactcgcctttagtggcggttactctgggatataaaactgcaaaaatgtttctttatcattaagtaaaatacagttgtctcaagggcaactttatctgttgtccttgctttgtaattggagaatgctttgtaattggagaatcactgaattttctcaaagttactacttcaagctctgagcctactattaagaagtgccttctttctggtcc

SEQ ID NO: 46315 - DNA, 1691 bp, Homo sapiens
ataaccaatctctagaaggaaatggcttgggagaaggaaaagaagaggcatgccagtatcaaccttttccattttccagcacaacagaaatgaaagcaagcacatgttaccattactaaaaaattttgagagtgacttaaagggtttcttccatgcataaagcattcaaccctcacaaaacacgtttagtaacagtatcctcactttacagaagaggggcttgggacctagactaagtgacttgttctaagtcgcgcaacagtgagttgctgagaggaggccagcaggcaaatttcataggtttcccaagacaccacacacctcctatatcatgtgataaccccatgaaaaaggctccaccatttgtgtgtggacaagggcaggaaagttctcttgtcttcctttgggagcccccacctcacctgtaactctttgtcctaacttgcacttcctcctctcaggccccatccccatgtggcctcttctttgggtctggcgctctccgggactgaaggctacccccgaccctgtaccccgcgctcccgctctcgcctcctcctctcaggcgaccctccactcctcagcgcccgcctccctgcatccctaggggcttccctactgccccgacctgcattccccggggtaaagcgagctctggagatcgcatagagaaactgtagtgtcctgggtccgagcgacgcccgcttcccgcaaccgggagagccgattccggccgctgccctcggggggctccgcatacatctagtagcgccatgaccgcccagcacccagagatctgtccgctctcggaggaggaagtgaaagcgaaagccacagatcgaaggggagggaacaagactcttttccacatccccctgccttttccgagaaaaggacagttagtgcctggaccaggaccatcacactggggaccggcttctctgctctcccgttatgggggtcgggggaatgatgggtcaagggtcttccgaagaaagcgagaaaggaacaggcgccttcaaaagcccacttggcgatgggttacagtaagaggtacctccaggcccgggcatccgctggaaacaggggtgggtagggtcgtgtcatctaaaggcgcagcttcaaccagaagactagaagtcagccaggagctgggagtagtgtcacgcggggtgggggttcctatgagcatcactttacaaaaccaggagggacggaagtgcgagggggcagagtcttggaaacaggtcctgggccaactgcaacagaatatacccgccgcgtgtaggggaaggcggcgccagggagagggcgcagtctctgaatctttccacggggtccatcctagggcccctccaggttcaacggtctcctaacctgtagtcacccacaagagcgtgccctttctgcccgcccttcctagcgttgctccctgcttggctgagcactgcggagtttcacgcctctaaaccccgcctcttcttgcaacctgtgttggcctcatctacccagcaactgtcgacgtcacacgacctgggcctccctgaatgggagatatttactaggcaatcccgcctactgttctgaggtttcccctccaggtgcagcttcagagccaggcgagccaggaaggaccagcgggcgaggtggtgagttgtgaggcgcgcccagtccctctgttcccgcctggc

SEQ ID NO: 46316 - DNA, 2503 bp, Homo sapiens
tcaccattatcctggagggcatcagcagaaaggaaacactgacgtctcaatcccgaacctaaataggctgccctggaactcactaccctgtggttgctctaccagaactttcaggattttattaggaaggctggagatcatgaagtagaaaagcctcctgttagagatgaggatgccccgcccttcggccccagagcaaaggatttccccgcttccggcgtggcccaaagaatcaagacccggtcagcaatggagcccagaacctctggcccccgccagtccagtgccgtttcttctacaccgaagtggtgttccaagacccacgctaggagtccttctcctgctccacatttcccagaacccacgctactctaccttactgacaattacctttgattcctgtcccagtccccttgtgtcctcccctcttgccctgcgttccccttaccaagagaggagaggaccaccaggaccaggaacagcgagaggcggcgcgtctccgagcccaggcagcctagaagccgacgcacagggtttccagagccgccctgaccgccgggcacccagaggctcccgagtttgtgccacagggctgctgcgggcagtgccgctgcataactgacaacgaaggcggtagggtgacttccccagtgcagtagcctggtgctatccgcggacccgggggctccccatgagatcagctctcggaacaaggcaagtcccggcagggccaagcccagtgccgcagctaatggcttcaaagcagccagccagccctgggcacctgcgttttcgctcttggagccaaccgttgccctgaggaccccgcaggcccccagccagagcacggcccagcggctcaggcccaccgcccagacccggagcagtggcagcgcggtgggcaccagcagggagaatatgcggggcagcgcggtccggagcagcacccagtcggcgagaagtagcagtactgtccccagccatgcgagagaagctccggggaggcagcggcacccgcggggagcgggacacctagagctagccattggcactcggacgccgtcccggtcccggccgggcctgggactctccgcgccccggtggggcctgaagctccgggtaccgccgagtcctcccctactggcggctgggggagggaacgagggcggggctctcggaaagtcccaggaacaggctgatcctgcgctggcgagaagctcagccatttaggggaaagcgaaatcgaaagcggccgcctgctcactagataacgcctacttccaaaagtggcctgcccagactattttggtagcaagcgtggaaatcagatctgagaatctcgggagcagccctggtgcccaattttctccatcacgcacacccttctcgcctctccctgcctcctgcctttccacttgcaccagttttcccaccccagcctcagggcggggctgcctcgtcacttgtctcggggcagatctgccctacacacgttagcgccgcgcgcaaagcagccccgcagcacccaggcgcctcctggcggcgccgcgaaggggcggggctgtcggctgcgcgttgtgcgctgtcccaggttggaaaccagtgccccaggcggcgaggagagcggtgccttgcagggatgctgcgggcgggagcaccaaccggggacttaccccgggcgggagaagtccacaccggggtaatgggtctgggcttgagggttggcagaggggtggaggagatgcagcggccaggggaccctggaagcgcgcgcggagaagtgaatgcagagaccaacgggagcgcagggaggtcgcctgtagcagccagcgcttgcaacccgcaatgagcatagagtatttcttttctgaggggggtcgtctagagtgtccgtgaagggaacaggcacgcgaggctggtggaaaaagcgggtgctttgactcttagctggaagcgtcaacgggaagctactctaaagcgctttcgctttcactctggtcccggacagtgggggctggttaaatcaagaaagggggttggggatggtgcaaagagatgaggaaatggtgccctgggtgaagtagaacagcacttgggagaaggaaatataggcacttattgagaaggaccaactcatcacacagacttttgataaacttgccactgggcaactcttagcccaagcactgataatgggcgttctgtgttaactagtgatgcccttccctagcttgacccaggaaggcctctccttggcccagatgctgccttactcccttccctgtgtcttccctgcccactcccatgtgcccactggggggactttgcttaggatgggcgcctggggcagatggcagccccaagactggctggctggcttctgctctggactactgccaccactcgtggcttgggggcggctttgttagagaggaatagcctctaacttgaagttaaccctgttctttgaccctctattcatgataagtcggtccgtcggaaa

SEQ ID NO: 46317 - DNA, 921 bp, Homo sapiens
gagttgtttctagccatgatatttaacttatttgagattttaaatagcccatttttcccactgatcacaagtagaaattctgggcagtatacaaaaagcaagtactcaaggactccaaaaagtaaacaaaagcaggtggattgtgaagagggtcaaaactgggagaggggcccctcctggggagtgggttttcaatgttttccccttttttcctcccagctctgccctgacgtcaggcctcaggtgcagagctgcactgcgtggtagcacaagccctgagttaacaagagaaataccggctttctggccagaggaatgaagaaaaagggcccctgcgggcaggaatgtgtaggggaatctccaaactgagagtacaggcggaaattccctaattctgagtctgaaccctcaggagtaccaggttacccctgagctgcacatgcgtgtgacatgccttaagggcacagcaaagactttgagaactgaatgaagattagatcttttaaaattggaagacttcggccaggcgcggtggctcgtgcctgtaattccagaactttgggaggccaaggcgggtggttcacctgaggtcaggagttcgtgaccagtctggccaacatggtgaaacctcatctctacttaaaatacaaaaattagctgggcatggtgcctgtaatcccagctactcgggaggctgaggcagggagaatcgcttgaacccgggaggcaaaggtggcagtgagccaagattgcgccattgcactccacctggacgacaagagagaaattccatctcaaaaaaaaaaaaaaaaaaaaaaattagaagacttcatttttctgtattggccaaataactgttctaatgcccttcattccaataaaaggtttgtagcagcttacagagataatttaaaacaattt

SEQ ID NO: 46318 - DNA, 1699 bp, Homo sapiens
tagtctggctttcagggtcttagatgaggttcggaagtggacttaggagccttaggagcgcagccagtgctgtggattcccacatccacgggacctgcggtttcgggttattccattcagggatacatgacgtccctcatttctacctaccagtgggctggtcaagattctcatttatcaagtcagttggagtgggcttaagtaagttctcagccaaggctgtggggtctggaggaccagatatcccgaccaaaagccccccctcccattcctttcacacgcctgccgcagaggtgcacgggtgcgagtggggaactgaggcaagaagcagatggggcggcaccgagagaagagaaactacgctagaggaaaagctcgagctgttacccctcccaacttcttccgccttccgccttcccccttccccctctttcccctcttgcccctctccagcttttctggtccaaccctcttctgcgcctaacactggcacctccttttcttccggctgatgaataattgtccgcaaaccagcctctctggggcactgaggggcgggaaggttagaaggagccagggctagagtcctggaaggtggcagtcaggtcgcagggccacagcagtcactctgcgactctctcttccggtgtttctccagcgccaagcgggagaagacggagcctgggagctgggactggaggagcgggaagcgcagtatcgggaccacggctctgggaccaggaaaaacgcagactctccagagtcaatgtctacttcagccagctcaagggcgcgacaacctggcgccgagcatctcaggccgccgcggggaccccccctaagggactcgggaacacctgcctaccctagaagaggcggagaataaccccgtagggagttaagcggcctctgcctacagcgttcctcccgcctccacggcgccgagccctgattgacgttcagccaggccaatcatagcctgtgtctgaggcgcgcggagctggagcgcccagggcatgtccgccgatcccaaggaggcaatctgtcaggcgccgcccgggcggcagtatgcctgagggggtcctccgtgttcgcgcctcccgccgcctgcactgaaaggtctgtacctgagcctggatacttgaacagaggcagacactgcggctcaaaaccccaagggtaggtacctattgtgcggagtctcggaacgcctgcctggaagaagagttccggcggctccccgaacgcttggagaaagcgcttggatgcagttgcagggtgagatttgagacggtgattgtgttttccagcaggcgctcaggcggggtggtgaaggagggatacagacctctaaagattcctctctcgttggggtgaggtggggaacagcagtgacagtagttctcatccctgagcctcctccgggccggcccgtggaggagagagaaggggagggagaagggtttgcccaggccttcagacactttactttgtgggagatgtatgtgctgagtgtccctgctctggagggattgttaaagaatccaggttcttggggagtgtctcaggagaacactccaggtgatatccttattcttcctattttcaccgtgttggtttttttttggatataacttgttccctttaacccgaggtggccttggtgtctggcagctgttttctctgccaggcaccaccc

SEQ ID NO: 46319 - DNA, 654 bp, Homo sapiens
ggtagcagccacagaagtggtaacatctgtagcagcgcagctccttggttctgttcatgacccataccttcttgccacacagtaggtaggagctaccaacccagccaacccagcttccccaactccctccccgagagggtggccttagatcatgttttgccagatcatttccaataggtgcccttgtcattttgtctaaaccaatcagagaagcgtagggtttaacatcatcagtcactggggagacgcctggggccagtaacctcctgaagacttggctgtttgaccagggcagagtatggcatgtaactgggctgggaagcccagtggaggaatgttgcttcctggtggagttccctctttggtttcaagctgtcagcctcagtctgtaagcgaccagctggctcttcagagcagtgccacctcctggcagaatgctgcaatggggaaccgcatcttccccaagtaaacccccagggctcttcggaccctgccttctcctccctcctggctcttcctctttctcaaaaaaacttattctccttcaggcattagctctaattcatttggcagacatatattgaaaatacaagaaattctgggtgttgggcccagggctagaaatacaaagatgaataggcatagtctgccttc

SEQ ID NO: 46320 - DNA, 7831 bp, Homo sapiens
ttatcccagtgggaatatttagtagaaagtttagcttagagagctgtctgaactaaagattcagacttcagaggctttgagccatggagtcagattacctagagaagttgaacaaaattagaagcaaacaagaatcacagcaaatatcaacacataaaaaggggctaaggaagaaaaatctactgagactggagaggaacagttacacaaataggaaaagaaacaagtgagagtggtatagaagtcaagggtagagagaatgtcaggaaggaaacatgatcaaatgtcgaatgcctcagaggtcaaataaagtgagaactgtaaagtgcttcctgactttgccagttaggaggttcttggtgacatctgccagaaaagttttggtggtagcagcctgacagaggtagcttgaagagtggggatggggaaagagaatgtgacaaagaattgagatagtaaggataatttcaatttcaggtcttggctgtgcaaggaagccgagagacatgagtctctaagagggcacgatattgagagggttgttatctttctgtcagcggggaaaccaagagaaaagtttaaaaaggtcaaaagggggagaagggaagacagcttccgggtaacagagaaggttgaccaggtcaatagtaaaggatttcctcaaaccgaagggaggacctctagtgaaatgagaaaggaatacacaattgacccagtttgcaggtgggaaatgggaagccagttctgcaaattggcctttctgttctgtgaagtgccatctgtcggtgaggagagattagggtctgcagcgtgaaaatctggaccatactctgggtaatcaagggagaggttatcggctaatgacaaattaaaggcttactttttagctggcaactgaatcaccataacattttatgttaccagttccaaaattttggggggaattcactcaagcttgggagaggagagatcataactttaagagtataagaggtttaaacggtccactacgaaataaatagagaaggaaaagttatcagctggtaaatatcgtagaaggtagagcggtccagggactcacaggtctcactaaagaaaagtctagcgtaggttcacggcacggagagattttaaggctgcctaagactaaagccaaatacgaagtccacatctgcggtccgcaccttatctctccgcgcggcaggcgcgacgagggcgagaaactccctctccagtggtcgcaccacacgacaccagggaaggggcccctctctccagaccctcatatctccaggtccaggccccattttcctccgctgacagctcagcagcgtgcgcttccgctggattcaggccaggaccagcgaagccgcaccttacacccaccgaggaggaaacaagcctggccacccgaggctaccccgctaggccgcgggtagtgggggagggggcgctgaggcaggaggtcagcacccgggcgcgggctcccgccccacgaaaagcgcgcgctccaagccccgccgccggagatgcggttccggtccggacgcctgcgcactacggctctccccgcagcctctggccctccttccccctcccccagtcagggcgcacccttgcgcctgcgctgtgtgtgttcctggtctgcggcagccatgctgaactcgtatggagaggcgagtgggggggacagagtccaggactgcgggataggaagctggggatatggacaagcagcagcgttatagcgctctgggtttcgggacataggcctgggccatgcggcccccttggccccttggcgcgacccccaggaacgttcggaaagctggtcctcgtggctgggggaaaggcggggggtgggggggaagcgggcacgtgaccccggtcagccaatctgggtgctgctgacgtggccgcgcggccccgatgctctccccacccccccagcccgttcgggaagggaggggctgggggctacgccccctcccccagcacggcttcgttttctgggggggggttgacaccccggattacataccccgtaccaagccgagggcaactttggaggccccctggaaggctttaggatccaggtgagaaggggcccttgtggggcggagatgtcagtcaagtgcttaaccaatggtggggagtccgggagggggattcttggggttcaggaaagaatcctgagagtgggaagatttgtccttcaaaccttttacagccaatgggagcgtggagggggggcgagcgggagagggccatggggggggaggggaatggccagcctcatgcctccgtacccattggagggcaaaggggttagggggcggtgtggccccccctattccattcgtcccctgggggtacagcagccgggagccaggtgagaagggatccatcggcggccgagggaggggtgacctggcggtgggctgaggagtggtggctgtggcccctacccgtggatgtgaatgctttaggagttggccacccatgttgtgaactgaggttgttcccaggcgccaacttcctttctccccagagcctctggagggagcattgctgtgcgccctttgtgtccgcggtaggggagctccagtcgtcacaccgcaggctggaggttacgcttcgagtcgcttaccgaatttgtgtgcattcacgtggacacggcctgtggggccttttgcccctgtagggtctttactgagcacgtgtctactccaggctggggtgcttacaagctgaaagcttgaggtctgcttaggaacagaaaccaggcccaaggtgggtgctggcagtagggggtctagacagcatggtctgagatgcgagggaggctcgggacctggaatgatttcacagctcccaaggtttcgggtttctccagggtggcctcttccatcgcctccctcatcccctcccccagtcctgaacagttctctccttgtgtactgcgggggagggaacggaaaggaggaaagagttactttcccaaattactgagtagcagtagcctccctggtgactcatgtgggggaagggaggatagaggatcgggaggcagtgattttccggaatgcagggaataaacgagagcaatgtctggctgcccttttcctaaggcctagtattttctcagcctcctaagtttttattccatggccggccccctgatgggcctctgtcctggcctgcagagccccggtggagaaaagcagatttgggaggttgggccgctagggggaggggaaaaggcctctgcaaagttgctgtgtcattgccctccatgctgcagccacccaaacggggccgcttgtacttttgggggccagggcctgatccctggctgggggaaggggactctgctctcctgacgctcattttcccccgccctcccggggtttgccctactcggggggtcagaagacaggagattggcggccattttagacgcagtaaccgaggttggagttgaagggctactgcagaggagggagggtggcgtggttgcagctcaaggacctaggcccttacgagcccttccggggcgagggggaatcttaccgtatatttgttcacctacgttgattatttttcccagatacgtacacaagtttgttttctccctggtagcgaagaaaggggaaacgggggaggggacgccccaccaaagcccaggttttctcgggtgggggagatcctttcactctcttgtaagggggcggggacggccccagagatgctctggagatcctgactctgggctctggttgattcacagagtctgcacccttatttagataaccaagttaggaggaagacttaagagtaagttggggggagggggcgaaactgagctcccaaaatggctcctgcccctcctcggaggcggacggccggggggaggggaggaggggaggagggggagggctagtctgagccgcagccgccgcctcctccgctcgccctcctccctggcgctgaccgatggaccagccgctccgtggggaggactccggaccctggtgggggggcgggggggttctttcgcccccgtggcggagggcccctgagaggcggatacgggtgtgcctttgggggtgatgtggcgtgtggggggaaaggtccgagctcgcctggagggggagggtttttcccttaagtcatccctcccaggacttgctttttctgctctgagccggacgccggaatggagtttgaggaagaggtgaggtgtgttgcattgtatagggtagatggatgcgtttggagattttaatcccacttttagggttgccgaggatttttcgaacgagcagaaatgtattggtaactgtaggtgtgagtggggagggattagaaaggtgcttggacgtgcaaatttgggagacgtattttagcttttgtggtctttgggactaaacagtagtaaataatgttttgctcgtctttccatcgtttggcttgagggagggagtggagtattataagactctggcaacactgttttagactgtggggcatgggaacgttagatcccctcatcgccgttctgaagcccgtagctgttcgccatagaggagcaggccgcggcttctaagatggcgtctttttcctcgtttcagattcttcgctgctgctgccttaccgccgagaaccaccacccgccaggcgtcttgcggccacacccctggcgggttcaggcaggctacgcccacgcgacccctcccgtttccctgctttggccaatggaggagctacgaatggcacgacctgctcgagcttggcagtctccagttgggctgtgcatggaagcttgggaagactttgttggaaggggaggcggggagagagtgctggaggctctggggcgatggcttccgcacctcttccaaccaccctctttccctggagtcggcggaccacagctcagccaattggcttggagatgtggcgggttgccacttccctgtgggtctctgcggcactcttctgcctggtgactgacaccttggaaatgaagtttatgacgtcatcgttgcggctggccaatagaaaaagctcccgcggagaggtgttccttccccttcgactcagcttcttcacccgcgtgagcgagcgcgcgcgcgcggagggggtggggaaaagctcaagcagggtggcgcgcatgagcggcgaagctcctcctccccgcctatatataaagggctggcgcggggctcggcggcgccatttcgtgctggagtggagcagcctctagaacgagctggaggattctgcctaccgatacagagccttcgagtcgtccggggccgccattacaatccacctccatccgcttggaaatggccttcgtcccggcctatgactggtcccagcgggcagtacagaccccctagaagcccctggagctcccctttttcgggccccgcccaatcctcggagtctgtccaccccctctactccgccctcaagaggatttcaaagatggaggcggcggctccctaaaccacttttcgtgttcatccgcctccatccgagatcgaaacgggacctcgtcggccccgtaggggcccgacaagaagagggaatccctgcagaccaacagcgggctatattgacgacggtgtctgagatcggggaccgtcttttgaagagtcagtccctccttagttgcccgcctcagctgaggccgccgccattttcttgctgtccgccgtctgcagagcgcgccaagctgcccggagctctccgagaggccccaaagagactgctttcgtgccggccaggcagggggtttgtcgcctggaggcccaagaggaacggcctccccccaacttagcgggttatgctggaccgggcggtgaggggaaccgaggccacccggactttccgcggctgagggcagcgccggttccttgcggtcaagatgctgcaaaacgtgactccccacaataagtacgtttccgcgagccgcgtgtgggaaggggatgttgcagggcggcggcacaggggtgtggggcgccgtgttgggagtactgagcggccccggcgcgctgctgttgcggcgcagctgtcgactcggtcgcgcggagggaattgagcgacggttttggaacggtggtggcggctcggctactgctcgtggaggggaatacaggttgtcaatttatacgctattaatgccgccgtggcccagtcttaaccgagtcaggcagagctagtttgacggtggagtggagtgaggttgaacagcaggtttggcgtttggtgggtctggtatctagcggcggtctgttagccttttaggggggattcacggacacctctagcgccctgtagggttgccatggtgacggagcgcttaagggactggcaacggggattcccagagaagggtaaagggatcactctcccgtgtgtgcaggttcctaatgcccagggtatgtcattaaatcttttgctttctttgggtgggtgggttgtgtgtggtgtttgttggtgcagggattgttttttcctaacattaaaagtttgattcagggcaggagggtagagctaaggttcctagttcagctctgcgatgtaaacaatgagattcccatatgatgttttaattcttaggtggtaggaaagactgatcggaggagcaccagagggactgtaaatgaaccactgttagcgtttggtgtccggagttggtgctacagggggaactggtagtggaatcgtgttgtgtagtgggtgggtggaagggggctatcacttggtgaccttgactgttttgtacggctttttgacttccttggagtgaggagactctgatttggtgcgaataattttgagggcctggaagttacgggctgtgaagtctgacaaattcttccttgtctgaatttgtttttaagttgatatggttcttcctctgggtttctagtctatgttctgttgtggcgtgaactacccagaccttgtggaagatggtgctctctcttctatctaggtggattattctgtgtcttatcagcattttatggaattttttatagccataatttgttcttttcctccttaccggcgctcaaccaccatggcaaccaccaaacccctagtgaggaggaagcttggggtttgagtttcttaactccacccattttgcttaagccccatccccatagggctgtagttctgagatgtcgtgccttgtcagaaacaatttgggagttttttaaaatatgaaaaagaacagatagagcctatcagacttaagaaggtgggatctagatagtatactaaaaatattaataaaaggaaggcggggccagcaataaaagctccacagattgtttggatattgtttctgcttaagaagcacttggcataagcttaaccacctcactagggccagcacctggattcatcagactattgtgcagatgcactttttcctcatttggacgatattgccctaattttgttcccatctttacaggctccctggggaagggaatgcagggttgctggggctgggcccagaagcagcagcaccagggaagaggattcgaaaaccctctctcttgtatgagggctttgagagccccacaatggcttcggtgcctgctttgcaacttacccctgccaacccaccacccccggaggtgtccaatcccaaaaagccaggacgagttaccaaccagctgcaatacctacacaaggtagtgatgaaggctctgtggaaacatcagttcgcatggccattccggcagcctgtggatgctgtcaaactgggtctaccggtgagtagagacattggagccgggga

SEQ ID NO: 46321 - DNA, 622 bp, Homo sapiens
aaaacactctttccctatattcagttaattagtaaagtcatatattcaggcctcaaacaatgcagtcagttgctaggctatgatcctgatatcctgaaatcatcaggattcctttaagtaaaaagcaattagaagcagttttgtccctattgttagatctgcaaatagctctctctgattacacaggacaaatagagcatgttcttcctgctgataaattccttcatttcttatctcatactcctgtgatcttgcctacaaaaatagttcattcctccatacctaatgctttaacattgtttactgatgattcaggcaaacatggaaaggcagcagtctggtggagaccacataattcactcactcgatctgggtttactagcattcagagaggtgagatcggggccctgatattggccttggaaactttttctactcagccatcaatatagttagtgattctgcctactttatttatttatcgcaaaatcttgaagcagccgtaattaagtccactctggagcccgccctgtgtgctctttttctctgatttcagcaattgctaaatcaatgtacacatcctacttttattacacacattcgagcccacagctctctgcct

SEQ ID NO: 46322 - DNA, 1046 bp, Homo sapiens
gacctctgcgggtttggctccagctgcagaaagagcgccaaagaaatctcaactccagcccggctaggctgggagtgggtgcgggagaaacagatggggggcacctatttagatctgatcttctcttaatgtgaccctgagagggagggaagggggtgtctgaagcccctgggccttggatattgagatggagagcatgggtgatcccagaaaacctatccaccaccggacccctgacagatgagatcaggggcttcttcctccattcggccttcggggtcagggggttcagcgggtgacaagggagaggcgtctgagggaccgggattattcagctgacccggtgcggggccgcgttctcagcgcgggcactagggggcggcagaggcggaggcgccagcgccgaggagaggcttccaccctcgagaagtttttccgcgcacccgcccgggccagagtggccgtctagacgcccacgtggggcttcctgcgatcgagaatgggttgggaccgggacggccaagccgatgctgtcggggacacgctgggaggaagaagtacggggaggaggggcgggggcgcagcctacccgggctcgggctcggggtgaagggcagccctgccaggcccgccccgaggccgcggatgcgaaaccgggacacaaaggcacgcactcttgattctggcgcccgcgaggaagagggttgaggaagaggaaattgggatgaggccctggaacacgttttaatgcagcgccctgacaggcaggagccaggcaatactgcttgggaatgtgaagccccatgggcaccagctagggggtcccggctgcgcggccagccttggaagagaggacttcttggacacctaacccggagggagcagagcttctgagtgcccaggagagggaggctagggaagtgggggacagtcaagagtggggggacacaggcagggactgtgcgactccacccaacacaaagactcaacgagtatgcacgtgactacacgtgagtgtggagggcttggccacagccctgtcttca

SEQ ID NO: 46323 - DNA, 860 bp, Homo sapiens
agggcccactgggtttgtgggatggatccgtggatgtgggtttttcctcggccagttgggagatttccaggttgagggtcttactgagggggatagctgggtaacttaggagtctcggagaagaggaggctccaaggttgccttggccttgagagacaaaggtaatcctcctcttacctggattaaacagaatgattgccctcaggcagccaagctctgtcttgtccatcctcatgtcacgcattttggacactagctctgtcagcaccctggagagggacctgcaggtcactcaaaggtcacagctcagccagccttggacacggaccagcctatagccccaccccctctatctacatgccagcctagccgagggccactgaccgatcaaagatggctcctactcctgctgaatgggctgagttgcggtgcacgtgaagacctgtggcaaggaggatgccatctcgaacatcaatggatcggtgtgagaaggaggcaatgaggagttcattccagcctgggtggggcagcaagggtcaggagccagaaatcaggccaagggattcaaagcacatcagtggaagagaaggagaaaagaggtggcgaggtcagcaagtttggctccctgggtacgcaaggtaaggccactggggtcactaaagatcgggaagtcaaagaggggtcaaatgtcaagaagtcaaagggatccaaggtcactgacctgcccgcagcaatatgacctgatcatccagaggcaaggaggaaaagtgtgggatcctcttcgcccactcaacaagcgtgaatagctgtttgtcagctgcctgacagatgttagtcacagggtcatttggctgcagggg

SEQ ID NO: 46324 - DNA, 2287 bp, Homo sapiens
tgtctgggcttcgggagtctgagggaggggtatgtacaggcacacagacacacaagagacagaagagacaaaaaaagaaaatgagtcttcaaacatccaactagagactttaattctctaataccccaccgtgccggacccagcccactccacccatccccaagttcagagacaccctgctgtcaaacaacagtgtaactccggctggtccgatggtagtgggttatcagaacttattaacatttgtgtcactaaaattggtatacaacctcccactgctatatttgactggctaaaaaaacccaaaaacagcgtaactcctcattgtggtgagaggagggagttgacaaggagaggaggatagttcaggtgaggaaaattttccaaccaatccatttgaatgaataccaggtcatcccaaagccacacctgtctcgtgggtggggcagcacgtggggtagaccatcgagcccctctattcccagcgtaaagccaggtagccagagcgtgcaagggaaagagacaggcaggagagacccctcctaagacgcaggatctgcctgtaaacgcccaaagtcctgaggtttaagaggaatcgtgcccttcccaggcccgcgacctccggtgcccaaggcctcaagcggtcacagctaggagggcggaagctccccttccccgccccgccccgggggggagggtgctaaggccctcgggagggaggggacgcgtgtttacaaacaagggggcgggagcgcaaggaaaagagcaccgggggagggtgtgggggaggggtcgcagataaagcggtcactggctcgcctgcccttctgctggggcactcaccccgcccgctgtcgcccatcccgtcccgtccagcctcccctggctccggctccggggtttgttgttctccgcctgccaccgccgccgccgccgccgctgcgggatccagccagggccgtcgccgccgccaccgggacgcgaccccacaatgcatttcttttcgcacccccaccggcccacactgccctgcggcatgccgctgagggaggaagggcgggcgagcggcccaagacatgatccctggctgagagtagggataccgaagaggtcccagggattcccaaggattgatcggaggattagctgagcacgaggaagcccctgagagaaagactctggcctggattgggtcgaattaagcccgtcgctctgctcagtaccaaaatgacagcgccaatgtggcagccatctttgtacagacgggaagtctcggcgcgagttcccgccccctcgtctagttggaaaccgaggaggcggtctcctccggcctgttagcccgcctcgcccaccctcccctcaaatcacctccacactcgcgcatgcgtgtcagtgcaggatggattcgtcgctaccggagtgccgccatattggtaaaggcattagggcgaaggtggaacggaacttcctgttctcgcgggatctaaaggcgggactgccacgtccaagcaaaccgggaaaggagaggatcccggagccggtgagaattctctgttttttctctaccatcctttccaggccttttcctcacctaatgagtcgtagagacgagggcccagagagtctgtaaagtggctggtgaaagattagtgtcccagggccctacatccgggaggtggttcgggataaagagaactagtcttgggaacaatgtaggtgggaacttaagggaatgggagagcggcccatagaggtggacggagggcgcgattggagtaaagcggaccctgtgtaggtatagagttgagtcaagtggagtcactgcctctgtccctctggtcagcgtgatggccagaggcctgggggccccccactgggtggccgtgggactgctgacctgggcgaccttggggcttctggtggctggactcgggggtcatgacgacctgcacgacgatctgcaagaggacttccatggccacagccacaggcactcacatgaagatttccaccatggccacagccatgcccatggccatggccacactcacgagagcatctggcatggacatacccacgatcacgaccatggacattcacatgaggatttacaccatggccatagccatggctactcccatgagagcctctaccacagaggacatggacatgaccatgagcatagccatggaggctatggggagtctggggctccaggcatcaagcaggacctggatgctgtcactctctgggcttatgtgagtctccaggggatgggagagagaag

SEQ ID NO: 46325 - DNA, 1447 bp, Homo sapiens
gggaggggtggtaaccggaaataaagacctccgatcttccgccccacatgcagtctttgtctttttggggggaatggggccccttgtcttctccacacccggggcccctaagcagcagtgtcgggccacgccccctcggtgggaggtcggcctgcgctggtggccgcagatggcctaaggctggcgggcctttgattggccccggctttgcccttgccacgcccctctgcgctgggattggcttagtgctgggattcccacccacccacagcccgccatggcgtctcagctccagaaccgactccgctccgcactggccttggtcacaggttgagggggttctttccccgggcggtttggggtattggagtgaggtcaggggcgtgcccttggagtgcgcggccgctgtgacctctggccccttacccacattttactttctgccctgtgacctctgatccctgccctctcctccccgtgcccggtccggcgtgttctgtcctacctcaggtgcggggagcggcatcggccgagcggtcagtgtacgcctggccggagagggggccaccgtagctgcctgcgacctggaccgggcagcggcacaggagacggtgcggctgctgggcgggccagggagcaaggaggggccgccccgagggaaccatgctgccttccaggctgacgtgtctgaggccagggccgccaggtgcctgctggaacaagtgcaggtgaacgctaggccactttccccctctaaagctctgatattgcctccactgccccggctttttgtggggggtttttgatgcgtaacctccccctcccataggcctgcttttctcgcccaccatctgtcgttgtgtcctgtgcgggcatcacccaggatgagtttctgctgcacatgtctgaggatgactgggacaaagtcatagctgtcaacctcaaggtggcgatctctgaacctgcgacgtttggcccccttagcctggggagggagttggaggagggctgtcaccccagctgatcttttctcccttgttaccctttcccgccagggcaccttcctagtcactcaggctgcagcacaagccctggtgtccaatggttgtcgtggttccatcatcaacatcagtagcatcgtaggaaaggtcaggttgagttggacgaggtcagccagccaagtggtatagagaggagaacccctccttgagactcctgactcattccacatctctgactcacctataggtggggaacgtggggcagacaaactatgcagcatccaaggctggagtgattgggctgacccagaccgcagcccgggagcttggacggttggtcagatgcttgagggtgctggggagcacctggggggtctgagggaggtaccagcattcagccctctccagaatcggcagccactctccttcccacagacatgggatcc

SEQ ID NO: 46326 - DNA, 1957 bp, Homo sapiens
cctttctctgagtccccccctcccctttctctccaccttacaatagctgcagccggcctggggtcggatgggggggattaggggagggggccaggattaggggaatgaaccagccgatgaaaggggctggagagagcaggagggagggggctgggaagaggaggaggaaggggaggggggtctgcgctaatcgactctggcgcccacataaggactggccacggactgaaggagaggacagggaagtaggggggaactggggtggggggcgagggcacccactgctgccttgtcccagggacaggccaccccctggcagccgcagcccaagtccgggagcctcagctcgggcggggacaagatgcccatcagggtctctaactgccccccaccccctcgccctgtatccctctcattccctacactcaatggggatcgctctgccccttcctcttctctttcctccccatccccttcgtttactctagagtcctcgaagaggcttctgcccacttcccactccagacattctgcccctgtgtaccccacccacacgcgcacccccccttcccaatgggagctccatcttgtgtatgtccctgtttccgcgtggtgtctccattccccctttcctcccgtgcgcctccctcccttccccgccccgggccgcggctcctgattgtccaaacgcaattctcgagtctatggctccggccgagagttgagtctggacgtcccgagccgccgcccccaaacctcgagcgggagagcgggtcggagggtctagggagagccaaagcagagggtggagggagtccccagggtggtaaggggaatcccgggcacatcgggacctaggtgtgttctcaggactagaaggctaaagcggcagatcttttgcagccttttcccccgggatcctggaatgggggttacggagaagtgaggggggttgatccccagagtcgccagggtacgcagagtgggggaggtagcccttttcacgagccctctgtcccctcctggggtcccagatattccaggccccggccccccggagctgaggccccgcgtgggggcctctggaagggaaccgaggctaaggttgttggccgcgcgacggtgctgggccgggggcggagaccgtggttccctaagtggcgcagaactcccgggacgcaggatcctcacgcgggacgagcccgtcccgtgggcgggagaaccgcggcgtccacgtcccgtcccacccgcgccgcgaatggtgggtgacgtctccgccggcggggggagcgggtgtagcggaggagcaggcggaagtgacgtagggccccagcgcccgggccatggcggcggcggtggcgggagctgctgtctgagcagcggttgcggaccgagcgaacttggcccaggagcccgggcctagggagaggcgcggcggcggcgggagcgcgaacggctggagctgggtgaggggcagtgccggcgcgggggcgggagcgggggcggagaggggcgcttctggaggggcggggtctacgcgaggggcggcccccctgacgccctcctccccttccccccacccccagccttcttcgccttctcctcggctgtggagccctggtggggggtctgcgcccggtcaccatgacgacgccggcgaatgcccagaatgccagcaaaacgtgggaactgagtctgtatgagctgcaccggaccccgcaggtgacaggcattctccctttcaggcttaccccctcccccaaacccttatatccacagaccgcatcacacagcttcttttccgtaatttgctctattctgccttgcctggccctacctttgaatcaccttaatctttccaaagcactttcgcatttagctcatttaatcctcaaaacagccctgccagagaggtggaacaagtattattatcttcatttgaaagatcacaaacaca

SEQ ID NO: 46327 - DNA, 2271 bp, Homo sapiens
tgactccagatgcttctgagtctgtgaggcccctgtgtccgtcatcagcaaaacaagtgagggagaagtttgaggagtgatgaccctagcagttatgggtttaagcctgggaatcttaagccacagagcagaggatttgggggctgaagaaaaagaccctccgcagcttcagcgcgaagagggcggcggggaccggggtggtgggggtggaacctcgccgccttccgaagcaggagtaagctgcagaggctgcgcgggggtttgagcggagcgagaacagctccttcccttgatcatgctgccctccggaggtcagtttaggtatcgccgctccctttcacgctgttttgtctcttcaccgtctgttctggatcatcctgtccagagagaccgttgggtcagagggttcctgtggacccctggggcgagcttaatgtccccgaaaactgcgtgctccagtatcacttgaatgcccaccgggttccggaatcacgagtctccagagctgtcccttcgccccacggctcacattccaggtctgcccctcagtgacttctgcaacaacacgcgcttctcgatcagctctgaggatttgggttctgcgacggacaggggaaggaaagaaggaaggctgtgaagaaccgtggtgcctgcctgcacagccctcctcgcgtgcgagcattagttggctaaagtcgcctgtctcgacagtctcccctgcggggtatctggggaccctttctttgggaatccacgctctttgtcagagtagccaatgcctctcctgtccaaaatctcatacccttggcccttctcccgtcctcgcgctgaggctggagtcaggtcaaatgtcagaacatctggatgtcccaagagtgacacctgggagtgggtgggcaagaaaccagtagcgggaagggaaagtggaggagcagaggattcccggggccggcgtctggggtgagctcgcggcccctcagagcctggcacatcgccgcctggcatccggcaggcgtgagggaacgcatagcgcagcgagtcaggcggggtaaacccggagcaacgcggaggcggtgatctgggcaagggcgaggtcagttaaggacgcagttctggccccgccctcaaggcacgcctggccaatcaggaatcgctgattcaccaagcctctcctcctgcgctcgccctcttctgcacttcggtctcaggcgcaaacacgttcaaagtcgctaggccaaagcgctgagatacggtttcccaagccaattagagagcggctctcggatatggggcggaaccctgaaaaggcgagagctgagatgccgctccgttctgccttaccacgccgccccccagcgtccgccaattaggagagcccggagccggatccactctcagcctcaggaagcagcagcctccgctccgcggcgggtgtgctcggcagtcacagacccactcaggacacctcccgttgccgacgggctagacctgcatccgaagggcctaagcggggaggaaccgctttccaccactctccagggacctggggagggaatgtttaggccgtaggggtggaggacacaggaaacgtaacatttttccttaactgcgcctctcttcttaggccttaaaggggtccccgtgtctctccagtctagagcctaagttcaaacgaggcgtataggcgaggacagcaggaaggctccaagtcaaacaaacggatggtacgaatttcgcctggtctagccctgccccaacggtgtgggtgtgggttgggtgctgcagcccccgagcaaggggctgtcacagccacaaccagaggagctatggagctgctacggaggagggattccagagtcagcttgggcttgtcccaagggagcccttgggacagtgtctggggctgcgcggcctggttctcatcccttgcagcatctgctattttagccaggggccaccttcctccaatggcctgggagtagctagaggttagaggttacacccaccagaagggatgtaagcccaggaagtagtcagaaaggaaaggtcattctagagatggggccacctgaaaaaccttcaggaggaaggagaaaggaaatgggataagtgtcatgtcatactaaatatttattttctgcagactgacttcggagtaattcttgagccaggaggggagaggttagtgttcaaattgctgagatcttaggtcaaaaagctacagaaaagaaatcactttgaaaaacacaatgactcagaggcagtcacccc

SEQ ID NO: 46328 - DNA, 2416 bp, Homo sapiens
tgggaggttgaggcaggagaatggcgtgaacccggaaggtggagcttgcagtgagccaagatcgcgccactgcactccagcctgggcgacagagcaagactccgtctcaaaaaaaaaaaaaaaaaaaaaaaagtgcagtggagatgaccgaatgaggaaagctaggaattgcagaggatagagcagaacttgcacttaaatttaagaccctcagactcctgccatcttgggtgttctatcacacctctggggaaccccaggctttctagaaatgtcaaaacacatagtgtttacctgcatgccaggtgcaatcttacacatattcatctaatcctaacgacgatgtatacaataggttctatcttcctcaccttaaaggtgtgagaaatgatggcacagagaagctggttaacttgcccaagggcacacagcgtgtaagtggcagagatagaactcaggcagtctggcttcagaggccatgttcttaacctttacactatactacttcgtgactctaccccaaaatgtggagtgaagttgaaattttgtgccccagaacatgagtttcagccactagggtcccgctcagggtcgggtctgatcacagggaagggtacggggagccaaacaggtaatatcacgggtagcagccaagttcccacccttgtgcctaaacccagctcaggtctttctgaagctaggagcaccggaactacggaggagaaacagctccgcgctctcaccagcgggccctcttcctcctccatatctgaggtcccagcccgcaacaccagttcccgggccgcagccgccatggtcgcagcggcggccattccccgcagcctcacttccggcaactgtcagtcccggcgagtccgttccccggagtggagctacaagtcccaaagggtcttcctcagcgcgaaatcgttcccagatatttgagttaagttgtttgactccagctgtcccctttcagctctaaccacttcacccaactgcaaatggaaatatggaagtctgaaacacaaactagccccggaaccttcgctgttctcttacctatgaaccttacgaactgtaaagaaaggcgcaccggaagttgtggtacccaagccatactctcataaatccagccaggtcgcgctgaaacagtttccggaagcacttctcctagatcgcaccgcctcttcctcctggaagctatataatgatatcgcgtcacttccgctctctcttccacaggaggcctacacgccgccgcttgtgctgcagccatggtaagactggaatccgtgccgtgatccagcggcatcgcagctcgggcaaggaaagccggctgtcagggttctggaaacgtcctgccctgagggcctgcgactttctgtatggagccttggatcgcgtccctggaaagggacaccaaagatttccaattccggagagcgggcccgaggaagggtcactgctcgggcgcacgaaagctgtctaaggcttgggcgtatatggggaactctggcttttgccacgcacttttgggaatgggcaggagacctgcttcctctctccagaggttgcattttcccaagcttgaacgcttcatgtgcctactctgcaggactgaggagtttgctctgtggtgtgaaaacctaaggaatggggggcgggtgtcttgccacttgtgtgacaggcttaacctttttgtatgaagttcgtttgccttatcggccttactgtttgatagtttactgtgtctgatttcttcccccgtactttttcaactagtctctagtgatccctgaaaagttccagcatattttgcgagtactcaacaccaacatcgatgggcggcggaaaatagcctttgccatcactgccattaaggtaagtgaagtagggtaaggaatagggaatgtaaatgagaattgggttgtgaagacataagcaaaaatgaagcaaggctggggagacttgagtctcatccagatcaccttgactgctggattaagaaaagaaagtggtttagggagagactgacccctttagcatttaccacagaaaataagtgattaaagccaagatagtggtctaaggtcaagccaaaacatttcacctggggaagtggggaggaggtatggttgctcacccgaattcgctaagattttcctgaaccacgagcttgtgagatttcttctagattcggtttctttacccatcccaccatcataacagcaacccttcctgcgaaatttatattccctgagaattggaggattattgggcatcttgagggataagtagaaataccaacagataaaaagtgtgaagaagcctgtagatggagggtggaagaagtctgagtgggacatttactcagatgagccataattgacactcctttcctgtcgaagtgtga

SEQ ID NO: 46329 - DNA, 2410 bp, Homo sapiens
aaagcaagggttaggatggcagtaaagcttcccaatatgaagcaagtataccaacataaaaacgagaaaagacagtcccaaaaggcagggaatgggggtccagattagggctcactcacccaggttcttcagcaagcagcagctcagaacgagcagctttgatacttgtttcctcttcctcagcttcagccacctcaagtcggcttcgagttttggctttagaatgtggtagctgtaacattgttggtggggaggagtggcagaagaaccacaggataagtggggtcacaggagagctacctgtcccagcctccatccaactcacccagacactccctgcctccagcacttcccaactctccggctggacctcacctttcgggatttgtcaatgcgacagaacttctggaccacttccacagggacgggggcggggcctgggaatggatcttgggtctaggggaaaggaggacgcaattagcagacagccttggattgaccccaaccctctcactctcaaggaacgaggcggcctgcctcgccacccatcaggtcccacgctcaccccggacaagccgcgctgggactccgggttcttccattctcggggtttcttcgggacctgaggcttcttagagatccgagacttctttaagatgtaagcattttttggtctctgaggacggagctcccgattcttcttgttacgaggaggccctggagaggctccggctgtggtcggaacggtctcttcctcccagtatcgccgcggtttctacaggcacatcaggaactccgcactcacgccccgccccccgaccccacagctaaaaacttcgtttcccacccagggaggcctctacctttctcttggtctgaagtttgtctttcttgggcgggacatccttgcccggcttgggggctgtctccatctcgcccacccgaacggcgatccacgtgcaaaactcctctcagctgccacacagtcggcttgaaaactcccggaagccctctgtccttcatccaatcagcagcgtaccaggtatgaagctctctaggtgccatcttgagtgagggcacgctctccttagaggggcggaacagtttttggcaccttatcgcgagcggcagcttatgcaagagtgatttaaaaaagaaaggcaggtccggagccaggggctaagtagcggtgcggtttctttttctggattagtttccccatcttgcctaaaaatgtcctagtctagtctttttagcagaactccactccctaaacatgtcagaactacacttcccatcaagggtcagaaagaaacttccggcacagtcttttcccagcattccttgtttacttccgggtttattactactgaaggaagaacgtgagtaggttaggatttcggttgagaggcttggggtcttgcgtttcgcccaccatctcctggggacagggtggagtcgatatccgggacgggggggaggttgcggtgcccctcagggctacctctcaagagtgctatcatttccgcaggccagatcagaaaagggagctcaggtaccttccagagagtgagacccagcgcccttgtctcgcacccagtaggctttcatccccgccatggcggagctgatccagaagaagctacagggagaagtggagaaatatcaacagctacagaagggtaagggaacagggtcggtatggtctcgcccaatgcacttacaacccaaagccattaccgagataaggtttgttgccccatctgggccctcgcgtgcagagacttccccgcctcagtctcagtactcttccctgttcactcacccgctgcccccatccttttctgcttcctcagatccatatccacctgactaggattgtggggataggtggcacatttgatgtttctaaattgcctttcctctcatccccagacttaagtaaatccatgtcggggaggcagaaacttgaagcacaactaacagaaaataatatcgtgaaagaggtgagggactgggatttgtggggcgaggagggacctgtactagccatggttctgatcacatatgtcccatccctccatcaggaactggccctgctggatgggtccaacgtggtctttaaacttctgggtccggtgctagtcaaacaggagctgggggaggctcgggccacagtagggaagaggctggactatatcacagctgaaatgtgagtttttattccaccaccgtgtgctgcaccctgtgatgcaagtgaaccattggagtagaggtgttgaaccattgcagaacagctctccatagtggcccctagtcctccagttcctccaaccctttccttcccttttaaccccccttcttctccctcccctggatctcaagttttccacctatctctttcttgcgt

SEQ ID NO: 46330 - DNA, 3768 bp, Homo sapiens
agagatgatcgctaaccctttctcccactctgcacctagatttctgaggacaatcccagacccaggagatgttccagactcatttttctgatattcagagagggcaagagtcttggcctatgtcacacagcagagtccaggactccagaactccaacctagcactctggccagaaagtcagccagaggaaggaaaactgggaatgaagagtcagaggtgagaagctaaagtcatgatctcaccaagggatcaagaggtcgatattggcggcttgtgacggtaaacacggcaccatcctcctcctcatcccagacggacacaggggcctggaggagcaaggaaggggaagtcagacagttccacaccaccccccattgccctcagccttcaccccaggccctgctcctccctctgtacccctcacctgtggtggcagggcatagtaccagcgagtgcgaggaagggttgggggagctggtgaccccaggtctcccccactggggcccagacagccccaccccagccgcctcagggccccggtggagtcgaaggggctgcagtggaggcgtggatggagtacaggaattctgatcctggagacccccaaagccccttctccccagagctgaacccacacacgacagagaagcagggtacaaagggcaggagagggaagcgagaggcagcaagccagaggcagcgactaggggtagctgaaacctcagtccaggcactgccgcatgccccgcccctcccggccaaggactataccagcccagagaattagtctttttcaggacccctttcaccctggtccctcgggtagcgcctccactatctcagccctaagggacccccgaaggtagcagctccaatcccagtacaggaaggaaaaggggaagtgggatgatagggggttgggggcggtagactcagagagtcacgtggccccagcccctcccccgaccgatcccgaaaaaccagccctgccagtcaacctgccctcacctaggatctggacctaggagtttagggcctcggggccccaaatccaaattctggcccctcctgaggcccgaaatcctgctcctggccaccaccattaatccctaatgaaaacagatgaccactctctacccaccctaggatctttcctccaggtcccagaaccgtggcttcccggcctctacccaggaccggggcggggcgggggggcggggggaagggggagagagggaaggaggggtcacgaaatctgagggttccctccccaatcccagagtcagaggagctggttactgtggaaacaaacccctccccgccaaacaaaaacaaggagggagacagggaccaagacacgactgctcagagaggtaggcacactcaggcaggcagaggtggagggccaaagacccgcagggacaggacagccagccagaagttccaggcaggaacagggcaggttcctgcgggcaggtcctgagtcacactgacagagaaccacggagacgccaggactccccgcagcagagaaacgggccgacacccagggaggcgcgagaataactgaggcaaggaggaggagatgtagggacccagagacaagagaaaagtggagacttcagaaatacatacgccccctacctcccaccacccgcgtctcacctcttcttcttcctcctcctcttcctcctgccccccgcccacgaccaggccacctgggcccccaccctcttcggggtcccggcttcggaagctgctcagtacgactcccccgggggggctcgtgtccaaaagcagccgcaggggccgcgggagcatggccgagtgaaggaatcagcggggtcgggccatgggggcgcctggggagagacggggtggggtgggggtggagagtcaggcaggcgcgggggaaccgggcagggaagggacgtgggtgggtgtcaagaagaccggaagggagttctgcaggaaggttgggggagggggcaacagaagggtggaataggggggcccttggtgctgttggggaaggaggaggtcacgagtacggggacgcgcagggtgctcaggctctgacctgctcgggaggggtgggggcagcgtgggtcctgagccgctgttgccgtcggtctccggccccggaccgagtcccctccccggcttttccgtacccccttgaacccccccgccgggctcctgggccctcccgccctttccgctcccccccgcgtccgcccgctccgagagcaggagccaaaaggggaaggaagtgaggacaggagccagggccgcggactaggggagcgctggacgctcagggaccaggacccaggcgcccgagtccccagctccactgtcctccgcctctacactcggggattctggagaccacgtcgacccgcaatgaactggaataaagattccagtctccagcccctgggggaaggcaggagcagaatttgacattcccttccccaacaataacacggctaaaactcccgcgggaagcgtttcaggcggagagagagccggtcactccatccccacgggattaccctccctaccacaacccacgaatgtagctgaccgaaatcccggccgggttttccgaagggccctcgattcccgccccctcggcagggggcggggcaggaagcagccacatccggttccagattcggctctcagaggcttccggcgccgagaccgagatccccgtcggctcggtgtatcctcgctggtggagtaccctctgcttgagcgcatctcatgcgccagtagtggcgcccgccccgaacggtgtcgacggggcgttctctgagcggttcagggtcactggaagggaccagaggtgattggaatattcattgagcttggaaaggggttggaatgagagaaccgtttggaagcactggaatacagctttattcctacacgattagacccgttaccccgtgggtctggccgaccgtcctgactcggagatccctgagctgcgccgccgcttccttcgtcaacatccagcagctacttgatgagcgccctccagtgggccttaggtccctatgccggcgcggggttacagcagtggacagacaggccagtccctgtcctcgaggagcccatgatccgcggggagacaggcatttaacgacgactcacacgatcacttaaatacaactgtggtgaaccgcacaagagggacgcgcggcggtctgcggggaatgacgaggccgacctcgtctgcgacccagggagggcaagggtggaccaggcaaagggaacagaggactgggacctggaggtgggcgggaggcgtttggttcattggaggaaaggaatagccctgtgtgtgatgagcattgagaggaggtctggcgagcaccatctagggctgaagaactaggcagtggctccagcgcggggcggtgggggggacaagtgagccagggcaagaagaatggatttggccctagagtacgggttctccaaatgtaacctcggccctacagatctctgagactatgtcagggggtttgtgagattttataacaaaattaagatgttagtacaatatcgtgtttcgccgccgggcgcggtggctcacgcctgtaatcccagcactttgggaggccgaggcgggcagatcacaaggtcaggagatcgagaccatcctggctaacacggtgaaaccccgtctctactaaaaacacaaaaagttagccgggcgtggtggcgggcccctgtagtcccagctactcggga

SEQ ID NO: 46331 - DNA, 2517 bp, Homo sapiens
gtcgctgacataaaatccagatagaaaagctaagaactctaccggtattctaccccggaataccccgcctccgctgccaggagggagagctcccagatatccaggtcagactctcctcattcttgaattatctgcacagtccctcccacgtcccagcctagaaaagcttctgactcctgggcctcaaactgcaatgcacctttcagtgcaataggagctatccaatctccagccgcgtccatccgcccactcgagcccacctgtttgcggaccacagagcggcagcacatccctacacggggctgtcaggcaaggtcaacgcgctagagtgcaagagcctttgctttgcggattgccgcagcgccgggtgtgggcgcaggtggggatagagtgctgggttttgaaagagtgacccgcaaagctgagggtgcagagcaagacacagatctgggaagagcagagaaaaaacgctcctgcttctgaacccctcccacctcgcatcacctgacaagtctctcaaggtctggtgtcgggaaaccccacctcttcaaagccccgcccttcgaaacaccagaaagtaacccccctgcccggccctgctttccccctaccccctgccaagctgcagttttttttttgttttttttttttaactgggtgagggctagaaggagcggtagagattgattcattctagccaaaccacctctcttaacaaaaaaaggaaactgaaccccgattggcgaaatgtcttgctcaagtccataaagcgagaccaccggctgatctggacccttagaatctacccacccttctccacctcccctccccagctacctgttgccatggtgatgagaacaggctcctgctgaggctctggctgtggtcgcaagaggctggagaggctgaggactgggctggatatgctgaccatcagccaagccccatccagggcccgcgggcagttctgcgcgggggtcaggccgctggcccatttcgcagaggcggggagaggcacgaagcggctcatctcgcagtgtggtgcgggggcgccccggggataccgcctgaaggcagcctggagggcgcccgcggggtctgagtgtagagaaggaagttgcagctgtagagtcaccgccgggaaaggggctggaagggcagcgttcggggaacttcaaatgcacagactaccccgtagtgagactcactttacaaaggggaagctgaggcctgaggtcactgccggatctaaagaggagggggtttcggtggaggcgacagaggtaggggggcggcgagtccctagagactcaccgtgtacactgagatagagctcagggtcgaggtccggccggggcggcggttcccccggtccctggcgcaacagcagtgcaccgggtctcttggccaggccctttccgctcgcatcctccacgaaccaacactcgatcaccgcgggtcctgctgagacggcggtcgccaggcctggcgtatagggacgcgagtgaggagcggtttgtatgtctggtgacctgccccactcccaccctggcatcggctccagtggggccacctccctccgcttccctctagttcttgggcgatgagtcgcggggttcgctcacccaaagccacagcgaggagcagagacagggacttcatggcgctgcgacctcctcagccatgaagcctcctcttcctcctttcactttcactttcctccaaagggcggcatgaggggcggtggaaatccccgctctggttaggtgaaggtgcctgggggaccggtgtttccccactggccaggcagggacccgggtagatcctctccagttctcaccaggacaccccagccttaccgcgccctcctggactacccagcagccccgagttcgagccctccccaaccccaggccctcccccgccccccaactcctgtgtgtgctctccaacatccacttgcccgaaaaccattactccggcttccccctatctgtgccgcgtccccagcaaacacacgggttatcgggaagccaagtaaatgaccaataaatattttaatcactgttaaaaaaaataaaaaccttgtactcctacgacttactccctccttgtctccacccactcctccatgagaaccgagttgggaatttccacgggaagtcgggggtggcggggagagacagggtagaaataaagagcgcatccttgagagggggtaggttctaggacaagggtggggctcaaaggccttgtctccacgacaacacaaacacagacttcaggcacagactacaaccacctgacccctgaccctgtgactgcaggatgttcaacacgccccctctccctccctccatgtgcaatctactctgtggagcaggggcttcagtgtacccatcagagggaaaggaagggtttagttctggaaataccttgggggggaggggttgagtagtagaatgggcgggcgatggtgaaactgtggttccccttccagaatatatacaagtccac

SEQ ID NO: 46332 - DNA, 686 bp, Homo sapiens
ccaagctctctcgccgaccacgccccctttcgccccagcttctctagccccgcccctttccaggcccacccccccgtgccccgcccactatcgggcctttcgaccccgccccttgtctacctccgcccacaacggaccccgcccccccccgctccgccccaagcgctacctcggcctcttctcccacccggaaggcgccccccaacctcgcgcgtccccgcttaccgggccgcgcgcccccgggccccccccgcccctcactcggcggccagagcagcaacctgggcccctcccgccgccatcttgcgccgactccctccgccctccgcctccgctccgcctcccgcccctccgcctttaaaggcacagccgggcaccccgcccgtgccgctgggcaatactcggccgactcggccactttgcctttaaagaaacatcgccacattccaccttaaaagatcaggtcccctcctccgctgggagctcaggacttggttcggccgaagcatttattcccctttaaagctataagcctgccttttcccattggcgatgggtccaggtatcgttccccaggctccgcctctgagctgtgaccattagctggttggtgggatctaatcgccctcttcctagctccttacagtcccactgaagccccgccccctttctccgggcctggattg

SEQ ID NO: 46333 - DNA, 2149 bp, Homo sapiens
acgcctccattgaaggaagtagaagagaccatgcctgctccattctctaagacagtggtgaagggctcctctgattgcttcctggaagaggaaatgtccgtctccacagaggaaggggtatccaggggcaaagcttcaatctctagctcaaagagctgagacacagggctttcttcctccagggtcagctcctcaggctgttctccattgctttcagcatctatgctggagggggccaggggttcttctgacagtaacgatggtgacactatgcgtcctttgttttgctgctcccctgaagatctgctgatctgtttgccaggttccaggttcttttcattggagatctgtagtgaggacatggggctcttgtctccatctttacctggaaaagaagaaaaggggagagggtagcctgagaatgagggggaaaaaatactgctgagaggacactaggaggaggaagggaaaggtttcaaacaggtggctcatgcctaacaaaacagaaatgacaggtgaggagaatgttcccttgacatacctgctgctgcttcttcctcttcgtcctcctcttcatcatcctcctgaccctcctgcatctgttccagatcctcctcctcttcagaatctgtggcctcctcctcttcttcttcctcctcctcctcctcttcctcatcactctcctcatcgtcttcgtcatctgtctcagctctggaggcagaagggcacccctgggatgccattccactagggccctgggagacaaagaagtttctctaaggaatcccttgccccagagggtttggttcttgctttccttctcatgctcccccatcagtcaacctggactccctggtggccagtgcaggggaaggacaatgtctctctgaaggctgtaccccatccacacctcaccagaatccaaggaggcttcgggggtgtctgcagagtgggaagaggtgccttggagccgagctcttctcttttttctctcgccctcctcacttttgtcttgcaacattgcatatttggagatgacctcatccagccgactcatggccaaactccggttttcccgaaggcgccgggccaacacaggatctgatagtgcagggtcaacgcctacgtgggaagacataaagtcagagcactcagcccttgaagggactagaagagtaaaaaccctagaaaggactagagagatgccccatccgcctcatacctgacatataagggtcactgagaggcatcccaccaaccccctacctggcctatagtcatctgtgaggtggcagccaaagttgtagatgagatcgaggtgacgtcgctcctgtaacctgatgcccacatctcggaaggcatcctgagccatgagctggagctgctgtcgggggaggccaaggctgtgtcgggcagctgccttctctacagcccgaagcacatccccatagtcagggaaggtatcaggccctggcttgttgatgagccgctcaatgcgcctgttaacctctgggtagcgggtgccacggtaggggatgcgctgctctatgacacggccggtcagtgaagagcagtctttcagctcacatagtcgcccaaagaggcggatcagcttacgcttcaaccgtgcctcctgcaggtatgcggagtctgggtcatccaattctgagagatccaactccttttcctgcagccgccggatctctgccacatagagcgccagcagctgctccaaacgctggatctgccgccgggaaccacgggtccttggagactgagaggcagtgttttcagcatttgtggggtccaaggagaggtgtgtgggagggttattcccagagggctcattggaggtggtggcggcaggggccaagttcagcttctttttggctgagtgggccttgagaacagtgcagagctcattgatgtagacatagagcttggctggccggctccgggcccgagacaggaccctagagaggatgttgcagaactccgccgaggccaaaaacagagagtgggcacgttgctgccggttatagaggaatgggaccacctcagggtggtctgctgtctgcatcttacaaagttcaaggaactagaaggttcaggggaagaaggaaggggaagagagacaagggagggggtt

SEQ ID NO: 46334 - DNA, 1953 bp, Homo sapiens
ggggagtgggtgggagggccctggctgagcagctgcttcatcttcgtcatcatcatccagcacgatgatgctgttagcggtggccataggggatcaaatcccccggagggaggaagtggtggggatttcagaattcctgctggaaggggatggggcctcagaatgagcccctccagcatagccccatcccttcacctcacacattttctgaactccttgggtttcagtaacatccagccctgaccaacactgtcttcaccacctgatttcaataaccattagttctatatgctttttggggcccttcaagtggtgtggggggggggcaaaccacccccacaccttaagttgccaccttctgctccacccctcacgtcgatttccggtctttctgttgcatttcccccctatttcttagagttggcaagttgattcttcctcccacactgcaccccaaatcgtcctgacacccccttgcacagacaacacactcctgtgggcgccacctcatgtgtttgccccctctgctctcaaacaagtcaaccccacacccaccctatcctgaatgatcaccccaactcctagactctctgaggtgaaagaggttccctcccaacagtccgttctcttttctcctccttgaattatctccatatttcaccctccgatgagtctcctcaaactggggctttaggttgaagatattttacccaagtcccctccctttcaccccaccctaattttccccattctctcggtgacccgtaactgatcaaaagtccccccgcaccgcgctacgctctcgcgattcctcttagatcccaaccgtgggtccggccggtccgctagatgcgcttcccgccaaatccccctcccccagttcagcccccggccgctccactccctttcagggacaggaaggtaccacagctttcccctcagactcagcgcccagctctccccaatacctctccctctatatccccgcccccgcctctgatccccgcaccgtccggcccccacctcagaaaccgtctctcgaggcgaccctcgccgcaattctcagaacctcgcatggttccctccgccttccttcccactcccaccgcaggccccactacggaccggaagtcacagagtttccgccttcatgcaactaagcgccgccatattgtcgtacggaacacaggcttcctgtggccggaggtgacagtaggcccgccccgcgaacacctccagtgcggcccacatagtcagcggtctcttccaggtcggagtttgtctccccgaacccaggcgtcccaaagcagctgggggccgccattttgccgtacggcactggctacgcccggactccggtgcgcagccagtggagctcttttcacccggtgcttctacgactccgccaatcagaaacttcctgcctggggcccaaccgccggagagtagcgcgtagggaggaccgagcctcgtttccaaggaggggcaggggaaccgaacagggtggattaggaattgggctttccaaagctgtgcagagtttcagggaagggcagaagtctcttaaaagggaagtaaaaccttttctttcagttgggctattggcaagctatctggccctgctttcctgtcccccaggttcccatttccacggcttattcggctgacccagccccttcccctgcaagggcggcgcgctccttgccgctgtccagcagctgtttctactgccaggtgctgcgtcccgcgatcgttataacacatgcgtacaaatgagcacaacgcgccataaaagtgttattgttattactattgttgctgatttgcttttcaagcttcaccacagaactaatgaccagccagaccgttgggacctgaatggttcttctccagagggggtcctcgaagggccgtctgtgctgaccaggtggccgtgctttgtcgtgggaggcc

SEQ ID NO: 46335 - DNA, 1325 bp, Homo sapiens
ttggggggatggcaacatggttttcagacagtgtgtctccccacaatctgcttctctctacaagcttgtttgaagccaagttaaagcaatggatagaagacggcagcgcgggtgtcagacctgccaatttccaactgcacaccaaatccccgaacatatgcttgaggcccctgcctttcggtttcataaataaaaccctgtcctgactacctccaggattggatggaaactcggatgagtaaatatggtagaacgactttgcaaactagcaccctattcacacgtaaggggttgctcttgtcaccgagactgttagaggcaacgtgagttaacagaaatagcttggattttgaagctaatggaatctagatccattcctaaccagcagtgtgaccttattgtgtaatctttctgaacctgtctccatccatctctacaaagaatgtggcacaatgtaggaactcagtgaattttcgtgattaaaagacgagataatacaggtgcacaatctgcaaaacataaaatactccataaatggaagcagtaaatcttccccgagctcgagactccaaaggccctgagcccagtaccagtaacagcacccaggtaagtaggctggctgagagaagagggctataaagaaaagttctttcctgagctttgaatccccactgtcaggcttcaatggagcgcaaaaattcctaaatttggtgagaaatggcaacattaccagggaatgaacagaccaggccactcacatccacgtgagggctccaggagccacttccgggcccagtcaaccacgaccaggagaggcagcgctggagcctcaatcacgtcgacggaaaacaagtgcgctccctactgcagtcaccaggaggcgctagtcccgcctgtctcccggcacgggtcctcgtttgcgcacgcgtcatttctttcctccagcgtccccgccccttctcctccggccgccaccagtttcgcttggccagttgcgttcgtgcggcgacgtccacgcattttctgacgtagcgagcgacggcggggagccgagcggaagtccagcactattgccgctagaggaggggaggggtgagaagcataagtggcaccggaagtggaattaatccgcctacctctcctgcgcctgcgaaacagaaaagacaaggcgcctgtcgggcggggtgtggcttcgggtggcggagaacgctgcgattggccctcggctgtggcgacagcgacgattggtccctgcgtgcagagcgcggtgagagtgggtggtggccgttggaattcaaaagtggcgggtgtggcgcggggctggt

SEQ ID NO: 46336 - DNA, 2173 bp, Homo sapiens
gatgggagatcttgggaaaaatgttgtattggttacgctgcaaacttttatcctgtctaaccccctgcccccaggtgaaccagtgtgttattggtactgctcaggccaacaggaagtgaagacggatccagatctgtgtgtgtgtgtgtgtgtgtgtgtgtgtgtgtgtgtgtgtgtgtgtgtccctatgtctatgtatcgggtgaggggtgggagggttgctggagggtgctttattgggtggagggcaccatgtcccagggctatcaaataaagaatagtttggttttttttttaaataaaggttttattagcatttgcccaagaaggcagatactttcatatctgtaaaagtgggagctgtgatctgtaccctctgccaaacgtttacgtgggaggcgggagcgggggctgagggcttcgtcttttctcccctctgctatcaccggttctggaccttggcctggatcatcttcccctctgctaataccccctaccccgtccgtcacatcagggaggtgtgccctctagctatccacgccccctccttggtcactagttataggtaactttcacccttccgccggccaccccagccccagggaagaacgttcctttggtgggtgtcggcaaatggggaccggaccccagagtccagaggcggggctagcgcgcgctcccaaactgttggctctttcctcccgtcccgccctttccctgcctttccgttcgaacggctggggctctgcccgctcgctgcccattggctggctctcggtggcgtcaccgccttgggtcctcgcgcccttcgtctgcgccagccctggaagcacggggcgggacgtccacgggaagcggcgcgcacgcccgccgactccctcgcgccaaccgccgacggccgccgcccggtgaaggaggggctcagtcctcccaggtgccgcgcgcaggaggggacacgcgtgcgcaaaagggcggtgggtggggcgcgactcgtcacggggagggcggggcgcgcgagggaggagggcgtggtgggggcatcgagaagggtgaatggagggcggggctgtgaactggggccggggggcgggacttggagtgaccatggggggtggggcagctaacggatgtggcatggggcgggggaccaggccggaggcgggctgccgggaggggggattccctcgtgccccaagggcgaatctcaggtcggaggaaggggctgaggggattccctctcccaccgggtccgactcttcgctccccaagccgcggagggccagcctcttcttcggcgccctccaggcctgttggaggtgagggaggtggggtgaggtggtgcccgcccccccctccggctcctcctttcccccagtcctcccctcccaccaccctcccccccaaccggtccgtccctcccctccctccctcccccccgccgcctcctcctcctgccgctgccgctgctttggctgctgcgtcatacgccccagagccgccgggacggaggggctgggcctggggaccccccggcctccgcctgcacgcccccccacgcccggacgtgccctctccgcgcgggggactcgcctaggtctcctacgtctgcccctgcccggctcccggcggccccagctgtcaccggtaaggaggcggcaggaggcgctggtggggggcagggagccgggggtcggcgcggggcgcgggcgggagagcctcgccgccttggcctcgggtccgggctgggccgacacaagtcccttctcggacttgccgtcctggggagtagagaccgggactgggacacgcccccctcccggggcactcagagaagttgtctaacccgggggcagggagccccgaatttgagggtgacctgacataacctggcaccaggatgattgttcttaatgagacgcgcaggcctggggagacagccgtttctgctctggaaaacatctccagaaaaggtcccaaaacacgtctctgggcaacaggacaccctaattatgatacctctaaactgagtagcctttgcttctacaaccataatttctcctaaaatttcaaggccagtatataatatcccaggagagctctggaagctgggaaactagcaactaggtttggggtcggggggagggctgttagttaccgagaggagagccagtca

SEQ ID NO: 46337 - DNA, 2228 bp, Homo sapiens
caccatcagcacctcactgtcttcctcgatcttccctttccactcatagctgaaaggtcagagggggagagttgtggggagcaaagaatttcccccaggaaagaggttcccagtcagctcctacagttaggttaaccccccaactcctatgactcacatggatgtaatctgagggatgaggttgacgcaggctgctaggcgcttctccaccacggccctggagtgaagagacagtcccattcagagtaccccataaccccagtttttgtactggcagcccagagacaggcttccagagctggagaaaggagaaagcagcactcttctgccccacccccaactgtcccttcatgatcatcctttctcgctgcacatcgaggtccctacctggcgatctccttggcgaccttctcgttggggcaagtaacaaaggctgcagagaccgagcccggaacgtagccagagccggaatccgaggccggcgagggctgggtcggagggcttccagaggccatggtcagcaagactcggggtagcaacaaaaggcgggaggccacaggcagcagcgccggcatccaaacaaaagacaggagcagagaggcctgagagcaggaggcgaattcgatctctcctcacaaacagcccaggaaattacacccggggaagccttcgcttagatcctcaggctctgccctccctctgatgcacccccgaagaatgcccctgaaggtgagagagaaacttggaaaataaagcaaaagctcatttcactcacacctcagggggccaacctctgggatttagggtgcgggtagcggtcgaggcttcgaggaccggaaggggcggggcggggccggtcactcaccactccgccgagcaggaccgcgggagcccgccccccactcatgcggcctacgctggtacaggagagttgatctcaaaggccacacgtcacacggagaaacaaccccaggaagagcggcctcttcttacctgggtggcagccacgtgattagaaaacagcgcgcaccatgtgacagtagaagaaggaccacctgcgcctccagagccagccaatcccgaccctatcatggcgcggtttgcccacctcctgatgaaggaggagccatgggagacttgaccaatcgactaccgcatctgcagacgtgcgcggaaatggcacgcccgtttccgtgtgaacccgaaactgccacttgctggctgaggagagccgctgcggcgttccactgtcacgtgagggggccggtcctcttcggcggcggcactcagtgagtgacgccaagtggccaatcacaggccagcctcgcaggccacgtgaggcgagagctggttccaggaaaggggggccagagaccccgcagagtcgatgcgtcaggctgtggagtggggaatcatccttaaaccccacaatgtgcctagtgacctcccctgcactgtttccgaggtcttaaggagtgggagggtctgagaaggacccttcaccccaaactcaggggttaagagagcgccccctgcccttttagttgggcagagatatgcctgggtttgggaatgaacaacggtgatctagaagcccgctgtccctgggtagcagggagtgattaggcaggcacgggcatggcaagacaatagctagctgaggaaagaagcattttaaaacagagcgagaccctgtggtagaggatggtgaaaatggggcctagccatcttaattgaaaacccaaagcttgagacagactactgaatcagagggaaggagaacgagggctgcaggatggggacagtggtgatggtccttctgtcccctcttccctgcctattccactccccaggattggtccacctctcagcctcgggtctcctttccctaacccatcccccaaggagccaggacctgccctacataacttccctggggcccaagcacatcctgtgacccaaaaatggagagaggggccaatgagaggcagagaggtgggaggaggtgcagagaaaaaagctcttgccactgcccccacccaatatttcccctcccttcaaggtctgaggtcattggtctggtggtggggatgcctcggagtttcccaggctgacgtcagggttatacctctcggaggttctagggcagggaagtggggaggggaggttccctgagatctctgtctttgagtttggagtttgtctctgagacagatttcggaggggtc

SEQ ID NO: 46338 - DNA, 1538 bp, Homo sapiens
gaatgacagagatagggacagactgaagggaccagtggccagcaagttgaggggcaataggaatggccggtctggagcaggaagggcgtgtgtgtgggaggaggagtagatagaattgggaaaatgagcagcctgaacagacgcagggagttggaattggatgggtggtggaactggggctgggggatagtgaggggtctgttcctgtggctctttgtagaggtggaggagactgcaggggtggaggtgtatggaggtagggatggaggtggacagggggagctgggtgtgaagcttagggaaaggtgatggctgaggggaagaagggaactgagagatgctgggtcgggtgatggaaggagatgaaaggtgggggaaggtgaccaggccctctggcgggaggggaggttgggtcccagtctggccgcaagccgggccgtgggagggagacaagctgtggatcctgattataaatgcagcttctgctacccccgtgacaggctcggagggagagaagggggtaagggaggtgggaggttgggaggaaagcagggagaatggaggaactgaaggtcaagggaaaactggattcaggaagtagctaacttctgaggagttgcagaagagctgagtagggtttgggagaattctccggaaggtgtttcaagacaaatggagggagaaaagagggtgggacggcaaagaatgagagagagagactgggggagagaagggagagatccagtcaccaagtgtggaggggccggggcagaaaaagtgggcaggcttagggggaaaaggaggcccgcccttcctgggaggaggcggaggggggaagagggaggggaggggcggcgtgggccagggaggtctgacacacccccacctcccctagatacaccccctactgatccgggaccggaggagcgagtccagtcgcaacaaactgctgagacgcacagtctccgtgccggtggaggggcggccccacggcgagcatggtacggcggccgagcaggctctcatgacccggacaggcgcggggagagggctgaagatggaccgggctggcggggcgggggcgtcggggagcggcgggagctggccgggggcgggagaaggcggagacaaagtcttgcttcccgaggggagatggcgccctcctctggaaggtggagcgggacaggggctgtgggtgagaggcccctgtgggtcctcgctcggcttcgctccctttctcctctccagcagtgaagtttgactattttcctggtgcttgtaaaaatagtctccttagatctttagcttccagtccgtgtgttcctgcccctgcccctcccagcccctggtctgggatcttggaaagaatgacctagttcctgccctccccccagacctcttccccacccctatgctcctgattcttcttccggaccttcagtccttgaggtctccttttattaccccctgttttctcctctcatcagctgcttctattttctgcaattgtatcaccctttctctttcctccctgattt

SEQ ID NO: 46339 - DNA, 544 bp, Homo sapiens
agaaggataattaacacatttgctcctggtttttctttactctggtggcaatctcggatgcctgtgttagagtgagagaagggctgggggaggaaagggggttgtcctgagacagagtggatgtggttgtacttttcacgtgaatgaaaggatgtttgtgcttctgagatatggggatacctttctgtggtcaggatcatggtgtactcaagcatgtatttcaggggttaaactggaattcccctgcatggggatatgtgtgtcttagggttataggtccatttctgtagtgtgctgtccacatgattgcccaagagacttgggccacaaagtccacaccagcagctctcatgtgggtcactgggttcaagtatgtactcccttgttgcagagctcacatatgtcaaagcatgtatcctgtggggtgtgtgggcctcagggtctcagaatgtggatccgtgctatgcccgtgctcacagttgtctgtatgtctcaaaagcacatagatccccagttatttttctgtattgtggttctcatatac

SEQ ID NO: 46340 - DNA, 1742 bp, Homo sapiens
gggggcaacccttctgtacagagcttcctggccccctccccccccgcccctctgcttccctccccacccaccacctcaagggtagggagttgctcttcctacctgttttattttgttttctcgttctccctccccaccccactcccagccttatctatcccccctcactgtccccttttctccactcccagccccatttcctttttttctggagtgtgtggtgaaacagaaaaaaacatgtttaataaacggagattgttcttttatcgctgtgccgactttcttaggcagggctctccagacctgtacggtggtaagatctgctttctgaaaggaagctgacagcctgagaggaaaaccgtatatccccacctgatgccacactctcctcatagaatgtcactctcccctcccaatgagattttttatattttagagcaggagttttgcaccggccaaacttctccaatctaactctcccctcaccactgtgtcacttagtccgaggccaggaacagcggcgttatctgataaaagagttcatgtatatatccacatttatctcttttaaaaattacctagaaataaggtttctttaattgctggttaaaatgctcccgtgcagaaaacaggaaagaacctgcctggttccttagcaaatctgagttccagtcccaggtccactactattagctgagtgacgcttccagcccgtttcccccgcctggaaactgaggacggcaacccccaccctcgcagggccggtgggaagacacaaagtgatgtgggcaagtgccaggcccacatggtaagtacccaactaatctcgcccctctcaggacctaccgggggcgggtgctacacttaatcaccgggaaacgcagctttccggggcggctgacggcccaccccctccgaccgggctgttctctcccgggccctgcctctcggtcctctgcagcggggaggacttcagcagctccccgggacgcccgttgcgaggacaccctgggcctgtgccctcctactagcaccgccctcctcgtctgcagtagccaatcaacacgaggcttgtaggctgccgttcctcgattggctacggctctagctccgcccgccgcacttggcgacggtgtccggcggggaggcggcggcttccggtctgggacggagctgtagcggcactgtaactgcgagggcagcgccgcgtgtgtaacggcgggggcgtgtcggcgggaaggacaatcgggccgggactcgcggtgtccgggtgaccgcggcttcccgggagcagacctctgtgggcactgtgaggcggaacggagcggcggggcaggagctgttctgggcaggtgaaggcaggctggtggctgaaggacctccttcttatcttccacaggggctggaagttaaaacccctgttggtgtttagtggtggtggttgttgttgttgtttgtttttgctttcttggtgtgcgggactgatttgcagaaaccgccactgacttaaaagtttccagttattgctcgtggggagggggttgtttgagaagatgtggctccctttatccagggcttctgtgacctccatctttttcctctgcagccttcatcccgcgtggagtctacccccaagcccttctcctcttcccaattcttgtcaccttcgaggaggccatggaaaccccaacacctttgccgcctgtacccgcctccccgacctgcaacccagccccacggac

SEQ ID NO: 46341 - DNA, 1226 bp, Homo sapiens
gactatgtcataataacttgttcaatatactgagtgattttaggctaaggaaggattttttcaaatgaaagggtttggatggacactcggtgactctctaaaatatactcttcagaggaggtaaaaataaatacgtgaaggtaaaacggcagggtgggggtggggagaatgtgaggctgttgtgtgcaaggaagggcgggtattcatactgaaactgcagaactaagcaggtgacagctgcacaccgctcctttccctggccgggctgccccagctcagtgacatcacagactgtgacgaacccagacgtatttggtggaaaccaagccacaatctcagaagcagcgcacagtttgagtagaaatgagtttttttggtttctcttccctaatacccacagagcccctacactcccgttatcctcgcagcccctggctgactgtgtccgacctaacttctcgccccctggtttcagaatatcctggcagcggaatagagggcgttggggggcggtgcaggccaaaactttttgggctgccccacccatgcctttccggttagcgttgcagctccttagacgagtaggctaaccacagcccacccgcctttcttccagcgatgcaacgatctgttcgccgctcaatgccgcatgctgttcaaagcccagaggctggagtgggtgcgccccaaaggccccgcccaaggaagggcacgcttgcgtgctcgcggcggcggccatcttggactcgggcagccgcccacttctaacctctatggcatcgctccgggagggaggcgaccccgcactctgggcctcttaaacctgtgctcgcgagccccacattgctctccggcctccacgtaaaactcgagccagtttcctggtggcaagtcctcactccttgggtgactctgagaaagcacccgtttccttatctgtaaatagtagtttgagtacccccacccccgtctcctacctattatttgggcagatgatgaactctcagcataaagcctggcacacagtatgtgttctataaatgttgtctgtgagcttttcctgtacactgcggggtgccttgtagcaaccaccttccagccaccactgcctgcagcgccgccttttcccttttccaagatcgcgtctgtactagactctgaagaccttgtggagggaaaaggggcttggcaagcccaccccaggagggtgaaggtgaaactcacga

SEQ ID NO: 46342 - DNA, 1374 bp, Homo sapiens
cgagattgcgccactgcactccagcctgggcaacagagcgagactccatttcaaaaaacaaaaaaaaagagttttgcttgcctcccaccccccgtagctccttacataagatggccttccttcttccccagtctccaggacccggcacccccaggacagtagggctggaggatgctgactgcacctccaactccctctaccaacaccccaggcttccgaggggagcaggtagagcctcagaacacccaccaaggccagcaacctatgctgactcaggcctagctctgcctcccccatccaagtggcctaaattcccggtgaggggagccacccccgacttcctgggcttgctgggccccgatgaatgttgcccagggatacatgcctggccaggccctggacccagtctagggatgttgggcagcagcaagcgctgagaaagttctctctctgcccttgaccttggctctgacctccactcccatctcccagactgttaaaggacccagttcttacagttctccggcatccagggctgggccaagaggggaagctgtgaggggcagccagaggcaggcatggcaggatcaggtccccagccggggcggcagacctgcccagggaagccttgagcttccccttccccacccggctcccggcaggctccctgccccaccctggggctggggctgctgagatctgggaggatggacaagacccttccagcttacctgccgggatcctggcccaacccgggtggctcagcagggtggagatggaggtcccgaggggctggcggctgctgctcccaggggctgagtgggagcccagtttccaggaatgggcgtcagtgcattcccggcatctggatgtagcctttacttgtccctgtgcagcccgagggacccgcgagactccagtgatcatagaggtgccagcggcacccggctccaatcagctccctctagaggaagttgctctgtggccaccggatgcagacgcacaggccgacagcctgtagggtgatctgggtgggccaggcccaggagcatgtcccgcccactttccccaccccacctcccaggcaggcagggcggctgtcagtggcccactgcttttcccatccctgattctcaatccttgtctttgatcttctcccccacctctacatcaatcaataccaataaaaaacccagggtgagaagtttcttaagcactgctgcatgcctggcactttagcaactatttgtctcattggatcttctcagcaactcttgtaagtgagtgctgttgacaatacccattcagatgaacagaggctcagctgggttaatcatcagttctgggccaggcgcggtggctcacgcctataat

SEQ ID NO: 46343 - DNA, 2900 bp, Homo sapiens
ccctgcccagatccccggagctggtacatggagtatgtcttttcttagggtacatctaaggatcccctgtggccagcgggtcttgagacacagtgtccatgtgtctgtaggatgggcctgccccaaattctatcccacccagccaactcaggcctgtgatgttattaataaaaatgtgctttgactttggcctcattgttggctgtctttggaccccaacccccaatcttcaaccctggagcaagcccagtctatctgaggtcttgatctagtccccagtctgtgcccatggggctgctagggctgccctgctgcagagtggaggggttgcagcagggcatctgtgcagagagggcaggaggtctagttggcctgacctagggctggggaaggacccaaggcccagagtgccaggggaccctgctgcccacaagccgtgcccctgttaggaggggtgtccctgacttccctccctccctaagttcccaggctgtgctgcagcctcctagggaggatccgggaattctccagcaggaagttcctgcccagccagcccaaggacaaagccaggaaagaggccctgggatgggggatctgcctcgggagggcgggcctgggtaagccaggggtccctggtgtccagtgttgcctaatctcaaaagtaagggtgggcttgggatggagtgcataatgatgggccttactggccagggaaggagaccgacacacctggcttcccagagatgagatgggcagcagggccaggcctagtttggacaccaggaggtgctgttcaccagaaggtcctgctggcttccctgtggggtcccccgttccttcctttctttctgcctgggtccaggctctgagacccctcagcagatgtatgagaaaaagagctcactgtccccagctcttttcaacatgactgctatccatggatgcttgtctgatggtccccatgggtccccactgtgtctagcccgaggcctgttgcagagctgaagttcagtatcagaacatgatggctattcttagtaatcgcggtgattgataacaacagctgttggttggatggccggccctgtggccacagacttggcgtggggagacagaaactgtagcagcctggtcccctgccctggcccaggccagcccagtgaaggtgggagtccctgcctctgtcccccagcctgcagggtgtgggtggagcctggagagggctgaaggctttctcctggacttcctggccagagcccatggtgtccttgactcagaccccgagctggggccgggtggaagggcccatctggactgcccccctgagtcagccaggaggcagccttgtgaccagatgactcacctgtgccctaattgccctgttaatcatttcctcccagagtgttctctgttgggaagggtggggccttgcagggcttccctgggagcacctggatgaggggggaggggcagaggggggcagaaaccttggttcggggtgtgggaccctgggctggtcacccttcctctctgttcctcattttccctgtctctccagtgaggcccatggcaccttcttgtccactcctgggattcctctgaactgcgggggtctgtgaggctgggaagtgtggtgtgctggcgctgtccctggagcaggagggggtctgtgtgctggagcaggcctgagggcctcttcccagacacacagtgtcctgggctggtttctgcggaagggcctggcttgacatttctgggtggtgaaggcagaggtgacccaaggacctgctgtgggggaaggccccgtgggtgagggcagagggctgggctcgggtcaaggctagaatggtgagagcccaagcgttcctgaaaggcctcagagaacactgcaggcgcaggcctgcagggcggggctgaggactggggatcctgaaacgcctcagagaacactacaagggcaggcctgtggggtgggcccgaggactggggagcattgcagcattgccttctcccccttgcatagagacatctggggacagcttccacggcccctcctgcaccagcacactcactcggccgaagggccagcgggactgaagcccagcccatcacactcactcaccaggccctgggaggggtagcatccccccggagggtgcctttcctaacttgttcaaaagggacaatgggctggcagtggccctgattgggtccatgaggtttggagcattgcgaagggacttgccaaatctctgtcactctcctggtctctccctgttggtatataaatgtgtccctgtgtgtgtgtttctgtctctgccctgtctccccatgtctcccagtgtctctgtctctctcactgtatctcaggtgggatgaaggcaaaagcaaagaggcacccaggtccattctgagagagtttagggactcagtggtggctgaaaggaaggcagtgggttgggtcatttaggagctgggggtcagggtgggtggtcccaggaaaatgtgggcagggccaaaggtgggcctatccacctcaggagactgtatgatccccctcctgtggccccctggccaagacctcccagggagatggtgcctcaggccctgtctggggtcactgggggtcagcctggcctacactagggtgaagggagggcaaaaccggagattttgctccccttctcaactgggagatgagctggaaagcagagaggcagaggggagagactcagctgggttgaaacctggctcccactgcagcaagctcatatgacggcagacaagtctcatatctctctgaatctcagtctccacgtctgtgcaatgggtgaatgaagagctgcttggctcgtagaagattctcaaagaatccgtggggccgggcacagtggctcacg

SEQ ID NO: 46344 - DNA, 1200 bp, Homo sapiens
ccaccctagacctactgagtcaggaacactggagaggggccctgtgggctgtgttgtgacaaaccctccaggtgattctgaggtgcactgaagtctagttcaattctcccattttacagatggggaaagtaaaagcggggaggtaaaagcgggggccggggggtgctttcccaaggtcacagggattttgaagcagagctagagatttaagaacctatttcttggcaaggtggatgcagtcatccctgttgtggtctcatctgagactccccagccacaccccaggaaggggctcatccccgaggagggatgaggatgcttgcttttgccttgctgtcaccggagggcaggaagggtagtgcagtgacctccgtgggggacctctggcggtcagagtggagggagcttctgactcattctgagggctgggccttccatgtctgcatcctggggcttggccaaaggctcagtgccccatgagactgtgtgactcacccatgtctgcaagccctgcatcctcacgtctgccccacagtagcctctcctcctccctcacaggcctcagtttcccctcccatgagtatccagggtctgtttggctgagcaggataggaggacaagagtcagtttttggacctgggggcttcattccccttcctgtcagtgtctagcttgggaaagagggactgagtgggccgggcgcaggggtgctcgctgcctcatgctgagaggaggccctcatactccatcactggggcaggagctggggagagggcaccctgggcctggggagaggggtcttgttttcttgctgtgacatcctggagcatcccaaatgactgtgctgaggaccctgctgccccaagtgctagagcctatttgggggctccctgccccctgccccccataaagtaggaagggccttctgacctcagatcagtcctcaccccatcctcacctgacctttcctctcttctccagttcatcctcaatgtccgcctggattaccgcatatcctacctgctgtctgtcttcaagaaggagtttgtggaggtgtttcccatgcaggacagtggggctgatggcacagcccctgccttcgactctaccagtaagcccctgccctgccttcaggctgaggctgtgcgactctcccagggatacacagcagtggggtggagccagctcctcagccctgct

SEQ ID NO: 46345 - DNA, 1432 bp, Homo sapiens
tggtaagtggcagagccaggacttgagcccaggctgggtggctcagagccgtgctcttggccactccctcaggcacctcttcaggcccccttgcagcattatcatcgtaaaccatgtgcgtggtgtgtttatacacctggtgtagccttggccagtgccagcacaaagtaagccaacacatcgcagtggctcttattgatcattttctaggcccttttcctttccctgtgcctgaagatggtttcagccagtctggactgacccgcttgtcaatcacccagcgccattcctagcacattaataggcactgcctggaatgcagctgggtggtgccagcaccttggggagttgatgaccattttaacacctacctgccggctgtcactcattccacactgaatgcctcattgaaaacccccaccagggcctcacctcccaagtcatttggaatgggtatttgggctttatggaacgctgattgctctttatagaaactaggcaccatcagggggaggagagaggagggagggagcacttcttcggtttttcaagttataatgatcccagtaatcgagacaccgaattgcacatttaaatcgcttgcaagtaaaaaatatcgttttgtaatgctggtgttaataatgtaaacattaaaaaggaattaaatacttagcttcattgtggagcacaactgcgtgagttttcttctttcaccttattcaactggaggaaacgattggctgcaatacccagatatgttacccaaaaagtgggtctggacttgcatcagaatagtgagtcatttcatgcctcctgttaaaggtagctggaagggtcactctggtaatagactgctgccttattctggaggtgagctttttttaaagacatgtaagtgtttgaggtgtgctgggataggctcaatggggacctgaagtgcagccgaatatatccaaagcccctcagttctgctgagatgcctgtcatctgccccagggatctgctgcctctctgcatctgttccgtagtagatgtcacctgagagcaggtttcctgaccctcatctaaagtagcagcctcttctctcttgtttgcttttgcctcaaagcactggtcactgtttgacagcagggcctggtacccactcatctgtaaatatttgttgagtaaaagaatctgaagagaatgaacgacctgagaatataagcccaggtcatctggcacccccaccaccctgtccccagcctcagcccttcccctttaagttgcccatcttcgagggctgggggagaaaggctaagggaaattgggagcaggtagatttccaggttttgctctgggatttttttttttttttttttttttttaagacagagtctcactctttcacccaggctggagtgcagtggcgtgatctcagctcactgcagtc

SEQ ID NO: 46346 - DNA, 1080 bp, Homo sapiens
gtctcacttggtcctgtcttgcatggtttgtgtcagttcatgtgtgttattcttgcctccctatctagaatacaggctccccaagagctgcatcttctccagcatgagccgggagatgagcaaggaatagctgctcagtgtactcttgctgactgccagattatttagggctccctcactctttttgccattttcaagtaaacacagattggagaccaaaaacatacacaccccaccatctcttctttccatgcctttctcctctcctgcttcccagattggagcaactgggtgggctcattcagtttctaaattcattgagtttctgaatctgcagagtcatgcgcaaattttcagatcacagcaacccctcggagtctgttagtccagtaagaatgcgctaaaaccagtagacaactttgttcccccaacttttttttttttaaacaacaaattactttttttagggacatatttaggaggagatgggaacatgggctgggcctcaaatgatttggaggaagaagaaggcctcatacatgaggggtgccatggggtaaaggaatagctgagagagggggcatcacctgggcaagaattgggaccccagccacagagaatagttgtgacacagctaatgacctgggtgggccagcccccaaagacttggattccagctgatcatctctgtgccatcctcgggcaagtcccctcacactgagagctgagaacaggtggagaaatgagaagctaagcagggggtttggacttggttgatgtggttccagattctcaaacaaggaactggcctggaaaaggcagtatttagggctctgttttgtcattagcaaatatttagttttaggctgactcccttttgtcgcccaacatgctctgactcaactctcccaccttgggcacacagcatgcaaatgaatcacatcattgccttggccaaacataatttgggaagtgaacctgcttagaaacccatagagtatgttctaaaattaaacaaaaggttttgttttgttttttttgtttttgtttttttaattatccagtccattctttcttttt
